United States Patent Application Publication US 2011/0004955 A1 - sequence listing, part 3

SEQ ID NO: 8538 - protein, 314 aa, Nitrosomonas europaea ATCC 19718
MEYKDYYQTIGVPRDATQDDIKRAYRKLARKYHPDVSKEPEAEARFKEIGEAYEVLKDPEKRTAYDRLGTRWKSGQEFQPPPGWDQGFEFHGGGFTEAASQFSSFFESLFGRNQQSHRYRDREFNLHGEDSHARISIALEDSFQGGIRSLTLQHTESGQDGRPLIKERTLKVRIPKGIQQGQHIRLAGQGSPGTGGGKAGDLYLEIVFKPHPLFRVEGKDIFLDLPVAPWEAALGATVAIPTPAGTVDLKIPAGSRSGQKLRLKERGIPGTPSGDLYVVLQIVLPAADSEQARAFYREMEQKLAFNPRAGMSIR

SEQ ID NO: 8539 - protein, 224 aa, Helianthus petiolaris
NIHGRGWGSAITSPDPLAFLGCSATTYPSSLTQQKRWFTGVFEILFTHKNPLLLTIEGNIWFRQALAYFYICLWAVRSVPELCYASLPAYCIIKDSHFLPKVNERASLIFMGIFVIYNLYAYWECKRIGVSLRMWWNLQRMERVNTLTARLFAFVSVMLKLIGLSNTVFEVTQKEHMSNDDDNDNVSVGRFTYDNSPMIMPGVVILLINIMALVNGMLRLYKVE

SEQ ID NO: 8540 - protein, 52 aa, Macaranga pearsonii
AHYKACLYAGINISGTNGEVMPGQWEFQVGPSVGIEAGDHIWCARYLLERIT

SEQ ID NO: 8541 - protein, 314 aa, Oryza sativa Indica Group; identical to SEQ ID NO: 1133

SEQ ID NO: 8542 - protein, 363 aa, Cuervea kappleriana
SQKLAVRAISQLQSLPGGDIKLLCDTAVESVRNLTGYDRVMVYKFHEDEHGEVVAESRRPDLEPYIGLHYPATDIPQASRFLFKQNRVRIIVDCHASPVSVIQDDGLMQPLCLVGSTLRAPHGCHAQYMENMGSIASLAMAVIINGNDEDGIGGRNATRLWGLVVCHHTSARCIPFPLRYACEFLMQAFGLQLNMELQLAAQLLEKHVLKTQTLLCDMLLRESPTGIVTQSPSIMDLVKCDGAALYYQANYYPLGVTPTEAQIRDIVEWLLAFHGDSTGLSTDSLADAGYPGATLLGDAVCGMAVAYITNRDFLFWFRSHTAKEIKWGGAKHHPEDKDDGQRMHPRSSFKAFLEVVKSRSLPG

SEQ ID NO: 8543 - protein, 854 aa, Phaeosphaeria nodorum
MGNSQGKEAQPASRGHTRRASAQGPASPSAAGASSASQERSASGVYSSRNNRGSTSFLGIGGSSEPRDPALEPRRETKAEREARKLEKERVIRAQEREKSLREEGVDGGYLVTLGVYTGPEDYSKPVVRQLQIERRLAPFWKGLNDHEDTWTEHQLVAVVNGRPLPAPDDIPPEEPQRPSNHLSPAWNPRGSESNLNNLTVPIGSRSMSQNSDRSNTLSPSHPAFSLPSPTSPIAANSSSSPFFRGRAKTLASLASGSRNTSQTDMAPQELNLPKDPYVNGQRIEAFLYKNAEECPICFMFYPPHLNKTRCCDQPICSECFVQIKRPDPHPPEHHGDAETPAPEPQEESQLVSEPAACPFCVQPEFGVTYEPPPFRRGLVYNQQGQPPLGSATSAMSSTSSLNSPAVTSPGRRRATSLAVNDKTVITTDMVRPDWAKKLSDARAHALRRAAAATALHNAAYMMGNISQHESRFALGRRRRTMFGSDSAGSSGQGTPRRDRDPSTGQAGEASNDLFPGRGSSRRGNRLDDLEDLMMMEAIRLSLAAEEERKRKDEKDAAKEAKKDGKKKAKELKKAAKAQSRIGSGFHPLDIDGLDESGVGSSSAAGKGKEVDRAVGNVGFNPMNEPTSTINTSSAKDDPQKHLETSRAQIQRDTSSSNLGPSDALEDQPSHRSALRNLSNASSSASSFAESYENSLRQPGQDSLAPGSIEPSPSGSGVNLSQTDTPPQGTPGTEPMFNFKSLADSITPEEQGEKDGGPQFIENVEGAHETSSKAPLASQSPKTEPTTQPHDSGLADSTMTLKPTLPSLSIDNQNGDEIKPAPRIEAVQNGHSDLDSKQLGDVSMIDGYHHHATQ

SEQ ID NO: 8544 - protein, 380 aa, Chlamydomonas reinhardtii
MAFALRGVTAKASGRTAGARSSGRTLTVRVQAYGMKAEYIWADGNEGKPEKGMIFNEMRSKTKCFEAPLGLDASEYPDWSFDGSSTGQAEGNNSDCILRPVRVVTDPIRGAPHVLVMCEVFAPDGKPHSTNTRAKLREIIDDKVTAEDCWYGFEQEYTMLAKTSGHIYGWPAGGFPAPQGPFYCGVGAESAFGRPLAEAHMEACMKAGLVISGINAEVMPGQWEYQIGPVGPLALGDEVMLSRWLLHRLGEDFGIVSTFNPKPVRTGDWNGTGAHTNFSTKGMRVPGGMKVIEEAVEKLSKTHIEHITQYGIGNEARLTGKHETCDINTFKHGVADRGSSIRIPLPVMLKGYGYLEDRRPAANVDPYTVARLLIKTVLKG

SEQ ID NO: 8545 - protein, 364 aa, Dicarpellum baillonianum
VQSQKLAVRAISQLQSLPGGDIKLLCDTVVECVGDLTGYDRVMVYRFHEDEHGEVVAESKRPDLEPYLGLHYPATDIPQASRSLFKQNRVRMIVDCHASPVRVIQDDGLMQALCLVGSTLRAPHGCHAQYMENMGSIASLAMAVIINVNDEEATAGRNPTRLWGLVVCHHTSARCIPFPLRYACEFIMQAFGLQLNMELQLAAQLLEKHVLKTQTLLCDMLLRDSPTGIVTQSPSIMNLVKCDGAALYYQGNYYPLGVTPAEAQIKDIVEWLLAFHGDSTGLSTDSLADAGYPGAALLGDAVCGMAVAYITNRDFLFWFRSHTAKETKWGGAKHHPEDKDDGQRMHPRSSFKAFLEVVKSRSLP

SEQ ID NO: 8546 - protein, 362 aa, Dicarpellum baillonianum
QSQKLAVRAISQLQSLPGGDIKLLCDTVVECVGDLTGYDRVMVYRFHEDEHGEVVAESKRPDLEPYLGLHYPATDIPQASRSLFKQNRVRMIVDCHASPVRVIQDDGLMQALCLVGSTLRAPHGCHAQYMENMGSIASLAMAVIINVNDEEATAGRNPTRLWGLVVCHHTSARCIPFPLRYACEFIMQAFGLQLNMELQLAAQLLEKHVLKTQTLLCDMLLRDSPTGIVTQSPSIMNLVKCDGAALYYQGNYYPLGVTPAEAQIKDIVEWLLAFHGDSTGLSTDSLADAGYPGAALLGDAVCGMAVAYITNRDFLFWFRSHTAKETKWGGAKHHPEDKDDGQRMHPRSSFKAFLEVVKSRSL

SEQ ID NO: 8547 - protein, 365 aa, Dicarpellum pancheri
QSQKLAVRAISQLQSLPGGDIKLLCDTVVECVGDLTGYDRVMVYRFHEDEHGEVVAESKRPDLEPYLGLHYPATDIPQASRFLFKQNRVRMIVDCHASPVRVIQDDGLMQALCLVGSTLRAPHGCHAQYMENMGSIASLAMAVIINGNDEEATAGRNPTRLWGLVGCHHTSARCIPFPLRYACEFIMQAFGLQLNMELQLAAQLLEKHVLKTQTLLCDMLLRDSPTGIVTQSPSIMNLVKCDGAALYYQGNYYPLGVTPAEAQIKDIVEWLLAFHGDSTGLSTDSLADAGYPGAALLGDAVCGMAVAYITNRDFLFWFRSHTAKETKWGGAKHHPEDKDDGQRMHPRSSFKAFLEVVKSRSLPGR

SEQ ID NO: 8548 - protein, 243 aa, Oryza sativa Indica Group
MVKLTMVARVTDGLPLAEGLDDGRDQKDADFYKQQAKLLFKNLSKGQHEASRMSIETGPYFFQYPYVLYIIEGRVCYLTMCDRSYPKKLAFQYLEDLKNEFERVNGSQIETAARPYAFIKFDTFIQKTKKLYLDTRTQRNLAKLNDELYEVHQIMTRNVQEVLGVGEKLDQVTEMSTRLTSDTRMYADKAKDLNRQFTIYGQLRLIYGMHKPFGFQALIRKYAPVAIVIGVVLMLFWLKNKIW

SEQ ID NO: 8549 - protein, 364 aa, Dicarpellum pancheri
VQSQKLAVRAISQLQSLPGGDIKLLCDTVVECVGDLTGYDRVMVYRFHEDEHGEVVAESKRPDLEPYLGLHYPATDIPQASRFLFKQNRVRMIVDCHASPVRVIQDDGLMQALCLVGSTLRAPHGCHAQYMENMGSIASLAMAVIINGNDEEATAGRNPTRLWGLVGCHHTSARCIPFPLRYACEFIMQAFGLQLNMELQLAAQLLEKHVLKTQTLLCDMLLRDSPTGIVTQSPSIMNLVKCDGAALYYQGNYYPLGVTPAEAQIKDIVEWLLAFHGDSTGLSTDSLADAGYPGAALLGDAVCGMAVAYITNRDFLFWFRSHTAKETKWGGAKHHPEDKDDGQRMHPRSSFKAFLEVVKSRSLP

SEQ ID NO: 8550 - protein, 379 aa, Rhodopseudomonas palustris CGA009
MSTTKRCYYETLEVERNADDSTLKSAFRKLAMKWHPDRNPGDPQCEIKFKEINEAYEVLKDGDKRAAYDRYGHAAFEQGGFGGGAGFGAGFASSFSDIFEDLFGMAAQRGRGTGRERGADLRYNMEITLEDAFKGKTAQIEIPVSVTCEACSGTGAKAGTKPKTCSTCGGAGRVRQAQGFFTLERTCPSCQGRGQTIEDPCPSCTGSGRVTKERTLSVNIPQGVEDGTRIRLAGEGEAGLRGGPPGDLYIFLSLANHAIFQRDGADLHCRVPISMVTAALGGEFEVPTIDRGKTKVKVPSGTQTGRRFRIAGKGMPVLRSRQVGDMYVQVVVETPQNLTKKQQELLAEFEKLSSGETQPEAVGFFSKVKEFFGSRASAP

SEQ ID NO: 8551 - protein, 1465 aa, Adiantum capillus-veneris
MATPGGPKTKHSVSVAQTRADARLHAAFEGSGDAGAGGSRAPFDYSKSGMDASSVTSVAPEAITAYLQRMQRGGLTQAFGCMLVVAGQKIVAFSENAPEMLEVAAGLGTDLRMLFTQGSTAALDQAVKEEDLSSVNPLVLQSCGGSAKQFYAMLHRIEDVAGVVIDLEPIENGVVEKKSSAEMAVKPIARVQSLPGGEIGRLCQVVVEEVQEMTGYDRVMAYKFHEDGHGEVVAEVRRPDLEPYLGLHYPSTDVPQASRMMFMKNGVRMIGDCTLPPVRVVQAKELAQPISLAGSTLRAPHGCHAQYMSNMGSAASLTMAVAIDDYDDDSSLSCGSRKLWGLVVCHHPSPRTVSYPLRCACEKLMVAFGVQLNIELDLAAQLRENHILTTQALLCDMLRRIRGAPIGIVSRSPSIMDLVKCDGAALYYGGRFWPLGTTPSEFQIRDLAEWLLGASEEIASTGVTCTDSLAEMGYPGAALLGDAVCGMAAAMITPNSDFLFWFRSHTAKEVYWGGAEHDPQSRDDDSWMQLPRSSFKAFLEIVKRRSLPWEEVEVDAIRSLQLILREDLEQFCAAVGAVKASDGDDEDSLVPSAKKLSLKETEENGGADNSKKLERMHSAAAGGGGGGGRWEKMRLPSSLAQEWMEAIRGTGDGGASGGGGGGPFDWDLISAFQHNSFIVVDALKPDFPIIYASTGFFNLTGYTSREVIGGNCRFLQGPDTNPADVASIREALAQGTGTFCGRLLNYRKDGSSFWNLLTIAPIKDDLGSIVKLIGVQLEVSKYTEGIRANNRRPNGMPQSLIRYDVRHQDKVSAFIAQLVAALTKPDKVETPRLSSAMRFSLTGQTIESLPQPTAIPREGGGRTRRPRSSSFLSLLGMEKEKDIPEEDELQELEVIMLEDASVGRPGSLDDPERTRRGIDLATTLERIGKSFVITDPRLPDNPIIFASDRFLELTEYTREEVLGNNCRFLQGRGTDRKAVQLIRDAVKEQRDVTVQVLNYTKGGRAFWNLFHLQVMRDENGDVQYFIGVQQEMVAPRPVHQPPELPDILPDRVEQEKAEVVRATAQRVDAAARELPDANLVPDHLFAPHSKVVTPLPHSKTNSSSWFAIRRVQRRLRRGERLGLKHFRPIKPLGSGDTGSVHLVELRGTGQVFALKAMDKSMMLQRNKVHRARAEREILAIMDHPFLPTLYASFQTKTHVCLITDYCPGGDLFLLQDKQPTQTLSERTASFYAAEVVVALEYLHCMGVIYRDLKPENVLLQKNGHILLTDFDLSFLTSCRPQLILQGGKGRSRRSKRRRRVTFCAEPRVSSNSFVGTEEYIAPEIISGEPHSSAVDWWALGILLYEMLYGRTPFVGRNRQKTFYNVLNKELIFPTSIPVSLAGRQLIAGLLQRDPTIRLGTLRGASELKKHPFFREINWPLIRWRKFSANQAHNANNVSSLDEGESDSGNAWEANGGSTQSFQDTF

SEQ ID NO: 8552 - protein, 192 aa, Araucaria araucana
DEHGEVVAEIRRSDLEPYLGLHYPATDIPQASRFLFMQNRVRMICDCRAVPVKVVQAGQLQQPLCLVGSTLRAPHGCHAQYMANMGSIASLVMAVVIIGNEDEEEGRWKRKRRGSMKLWGLVVCHHTSPRAVPFPLRYACEFLMQAFGLQLNMELQLAAQLTEKHILRTQTLLCDMLLRDAPIGIVLILPSI

SEQ ID NO: 8553 - protein, 368 aa, Caulobacter crescentus CB15
MEDYSESRRAGERLAAGHGVDDPFAAAISATRMAMIVADATQPDIPIIFANDAFLRLTGYARDEVIGRNCRFLQGPDTDPKAIQAVRDALAAGEDVAVDLLNYRKDGSPFWNALNMSPVRNDAGQLVYFFGSQVDVTDKKVVELRARDHSDGLQQMVEERTRELTEALKQKTALLHEVDHRVKNNLQLISSLLLLQNRRVPDPAVKASLRGMLGRVNAIATVHRRLFQSEDVERFDVSAFIRDMVADLMGSAMRDDIRVELDLERVEIPAAKAAPLALVVNELLTNALRHGFPEGRGGRIFVGLSRLNGDFRIEITDDGVGQDRETRASGFGLTIVQLLCQQLKAKWETTDAEPGTRVVVLLPINGTQ

SEQ ID NO: 8554 - protein, 429 aa, Phaseolus vulgaris
MAQILAPSTQWQMRFTKSSRHASPITSNTWSSLLMKQNKKTSSAKFRVLAVKSDGSTINRLEGLLNLDITPFTDKIIAEYIWIGGTGIDVRSKSRTISKPVEHPSELPKWNYDGSSTGQAPGEDSEVILYPQAIFKDPFRGGNNILVICDAYTPAGEPIPTNKRHRAAEVFSNPRVIAEVPWFGIEQEYTLLQTNVNWPLGWPVGGYPGPQGPYYCSAGADKSFGRDISDAHYKACLFAGINISGTNGEVMPGQWEYQVGPSVGIEAGDHIWASRYILERITEQAGVVLSLDPKPIEGDWNGAGCHTNYSTKSMREDGGFEVIKKAILNLSLRHKEHISAYGEGNERRLTGKHETASINTFSWGVANRGCSIRVGRDTEKNGKGYLEDRRPASNMDPYVVTSLLAESTLLWEPTLEAEALAAQKLALKV

SEQ ID NO: 8555 - protein, 1172 aa, Arabidopsis thaliana
MVSGVGGSGGGRGGGRGGEEEPSSSHTPNNRRGGEQAQSSGTKSLRPRSNTESMSKAIQQYTVDARLHAVFEQSGESGKSFDYSQSLKTTTYGSSVPEQQITAYLSRIQRGGYIQPFGCMIAVDESSFRIIGYSENAREMLGIMPQSVPTLEKPEILAMGTDVRSLFTSSSSILLERAFVAREITLLNPVWIHSKNTGKPFYAILHRIDVGVVIDLEPARTEDPALSIAGAVQSQKLAVRAISQLQALPGGDIKLLCDTVVESVRDLTGYDRVMVYKFHEDEHGEVVAESKRDDLEPYIGLHYPATDIPQASRFLFKQNRVRMIVDCNATPVLVVQDDRLTQSMCLVGSTLRAPHGCHSQYMANMGSIASLAMAVIINGNEDDGSNVASGRSSMRLWGLVVCHHTSSRCIPFPLRYACEFLMQAFGLQLNMELQLALQMSEKRVLRTQTLLCDMLLRDSPAGIVTQSPSIMDLVKCDGAAFLYHGKYYPLGVAPSEVQIKDVVEWLLANHADSTGLSTDSLGDAGYPGAAALGDAVCGMAVAYITKRDFLFWFRSHTAKEIKWGGAKHHPEDKDDGQRMHPRSSFQAFLEVVKSRSQPWETAEMDAIHSLQLILRDSFKESEAAMNSKVVDGVVQPCRDMAGEQGIDELGAVAREMVRLIETATVPIFAVDAGGCINGWNAKIAELTGLSVEEAMGKSLVSDLIYKENEATVNKLLSRALRGDEEKNVEVKLKTFSPELQGKAVFVVVNACSSKDYLNNIVGVCFVGQDVTSQKIVMDKFINIQGDYKAIVHSPNPLIPPIFAADENTCCLEWNMAMEKLTGWSRSEVIGKMIVGEVFGSCCMLKGPDALTKFMIVLHNAIGGQDTDKFPFPFFDRNGKFVQALLTANKRVSLEGKVIGAFCFLQIPSPELQQALAVQRRQDTECFTKAKELAYICQVIKNPLSGMRFANSLLEATDLNEDQKQLLETSVSCEKQISRIVGDMDLESIEDGSFVLKREEFFLGSVINAIVSQAMFLLRDRGLQLIRDIPEEIKSIEVFGDQIRIQQLLAEFLLSIIRYAPSQEWVEIHLSQLSKQMADGFAAIRTEFRMACPGEGLPPELVRDMFHSSRWTSPEGLGLSVCRKILKLMNGEVQYIRESERSYFLIILELPVPRKRPLSTASGSGDMMLMMPY

SEQ ID NO: 8556 - protein, 224 aa, Helianthus petiolaris
NIHGRGWRSAITSPDPLAFLGCSATTYPSSLTQQKRWFTGIFEILFTDKNPLLLTIEGKIWFRQALAYFYICLWAVRSVPELCYASLPAYCIIKDSHFLPKVNERASLIFMGIFVIYNLYAYWECKRIGVSLRMWWNLQRMERVNTLTARLFAFVSVMLKLIGLSNTVFEVTQKEHMSNDDDNDNVSVGRFTYDNSPMIMPGVVILLINIVALVNGMLRLYKVD

SEQ ID NO: 8557 - protein, 105 aa, Glycine max
MVKMTLIARVTDGLPLAEGLDDGRDLPDSDMYKQQVKALFKNLSRGHNEASRMSVETGPYIFHYIIEGRVCYLTMCDRSYPKKLAFQYLEDLKNEFERVNGPNIE

SEQ ID NO: 8558 - protein, 224 aa, Helianthus petiolaris
NIHGRGWRSAITSPDPLAFLGCSATTYPSSLTQQKRWFTGVFEILFTHKNPLLLTIEGNIWFRQALAYFYICLWAVRSVPELCYASLPAYCIIKDSHFLPKVNERASLIFMGIFVIYNLYAYWECKRIGVSLRMWWNLQRMERVNTLTARLFAFVSVMLKLIGLSNTVFEVTQKEHMSNDDDNDNVSVGRFTYDNSPMIMPGVVILLINIMALVNGMLRLYKVD

SEQ ID NO: 8559 - protein, 523 aa, Debaryomyces hansenii CBS767
MVVDTTYYDLLSLQPDATSLDIKKAYRKAAIKLHPDKNPGDPTAAAKFQEVGEAYQVLSDDNLRSKYDKYGKQESIPSEGFEDPSEFFSMIFGGDAFKDWIGELSLLQELSKSAELSGYGDEEKKDSTEEEKTGDDSKTQTSESKAQDATASTTTTGDTTKNSNSQDEEDVKLRDKTQKLYLEDTSGGGNVGTNDGDRKELTKEEKEELKRKEELEKFEEECRIKKIEMREELSKKLTDKLSLFTETDMKEDVAESFKQKLKYEAESLKMESFGLEILHTIGSVYKTKLKIFLKNQTFLGFGGLWWSVKEKGGVVRDTFKTITSALDAQLTMQEYAKMQEDNEYHAKKEAEEQAEAKQKAEEVDQIEKEIEEMKKEKEQKEAAAANNSADKVVKEGEGIKSDEKKEEEKVPEKHTAEDIADMEKYLMGKVLAAAWSGSRFEIQSTVRGVCDNILQDKEVPLNVRVARAKGLRLIGEVFSSITRTEAEDEEARVFEELVAEATKKREKKKKPTEHTTTADEPTK

SEQ ID NO: 8560 - protein, 467 aa, Zea mays
MADEKLAKLREATAGLTQISENEKSGFLSLVGRYLSGDEEHIEWAKIHTPTDEVVVPYDTLESPPEGTEATKKLLDKLAVLKLNGGLGTTMGCTGPKSVIEVRNGFTFLDLIVIQIESLNKKYGSNVPLLLMNSFNTHDDTLKIVEKYTNSSIEIHTFNQSQYPRVVADEFLPWPSKGKTDKDGWYPPGHGDIFPSLMNSGKLDLLLSQGKEYVFIANSDNLGAIVDMKILNHLIHKQNEYCMEVTPKTLADVKGGTLISYEGRVQLLEIAQVPDAHVNEFKSIEKFKIFNTNNLWVNLKAIKRLVEADALKMEIIPNPKEVDGVKVLQLETAAGAAIRFFDHAIGINVPRSRFLPVKATSDLQLVQSDLYTLVDGFVTRNSARTNPSNPSIELGPEFKKVGSFLGRFKSIPSIVELDSLKVSGDVWFGSGIVLKGKVTITAKPGVKLEIPDGAVIGNKDISGPEDL

SEQ ID NO: 8561 - protein, 224 aa, Helianthus petiolaris
NIHGRGWRSAITSPDPLAFLGCSATTYPSSLTQQKRWFTGVFEILFTHKNPLLLTIEGNIWFRQALAYFYICLWAVRSVPELCYASLPAYCIIKDSHFLPKVNERASLIFMGIFVIYNLYAYWECKRIGVSLRMWWNLQRMERVNTLTARLFAFVSVMLKLIGLSNTVFEVTQKEHMSNDDDNDNVSVGRFTYDNSPMIMPGVVLLLINIMALVNGMLRLSKVD

SEQ ID NO: 8562 - protein, 376 aa, Burkholderia pseudomallei K96243
MAKRDYYEVLGVAKNASDDEIKKAYRKLAMKYHPDRNPDSKDAEEHFKEAKEAYEMLSDGQKRAAYDQYGHAGVDPNVGAAGAQGFGGFADAFGDIFGDIFGQAAGGGRARGGPQVYRGADLRYSMEITLEQAAHGYDTQIRVPSWAACGVCHGSGAKPGTKPETCPTCHGQGTVRMSQGFFSIQQTCPKCHGTGTYIPEPCVHCHGSGKVKETKTLEVKIPAGIDDGMRIRSAGNGEPGINGGPSGDLYVEIHIKPHAVFERDGDDLHCQMPIPFTTAALGGEIEVPTLAGRASFTVPEGTQSGKTFRLRGKGIKGLRSSIAGDLYVHVQVETPVKLTDQQRDLLKQFEKSLAEGGPRHSPQSKSWFDRVKSFFE

SEQ ID NO: 8563 - protein, 297 aa, Triticum aestivum
AQWATNLKWAPVLALLLVAAMVGSTSAGNIAVYWGQNGNEGTLADTCNSGLYAYVILAFLTTFGNGQTPVLNLAGHCDPGSGGCTGLSSDIQTCQSQGIKVLLSIGGATGSYGLSSTDDANSVADYLWNSYLGGSDGSTRPLGAAVLDGVDFDIENGQSAHYDDLATALKGKGSVLLSAAPQCPYPDASLGAALQTGQFDNVWIQFYNNPGCAYANGDDTNLVNAWSTWTSSVTAGSFYLGLPASTQAAGSGYIEPGTLTGTVLPAIKGVGKYGGIMVWNRFYDVQNNYSAQVKDSV

SEQ ID NO: 8564 - protein, 361 aa, Elaeodendron orientale
QKLAVRAISQLQSLPGGDIKLLCDTVVECVRDLTGYDRVMVYKFHEDEHGEVVAESKRPDLEPYIGLHYPSTDIPQASRFLFKQNRVRIIVDCHASPVCVIQDDGLMQPLCLVGSTLRAPHGCHAQYMENMGSIASLAMAVVINGNDEEVIRGKNLTRLWGLVVCHHTSARCIPFPLRYACEFLMQAVGLQLNMELQLAAQLLEKHVLKTQTLLCDMLLRDSPIGIVTQSPSIMDLVKCDGAALYYQGNYYPLGVTPSEVQIKDIVEWLLAFHGDSTGLSTDSLADAGYPRAALLGDAVCGMAVAYITNRDFLFWFRSHTAKEIKWGGAKHHPEEKDDGQRMHPRSSFKAFLEVVKSRSLP

SEQ ID NO: 8565 - protein, 362 aa, Elaeodendron orientale
QSQKLAVRAISQLQSLPGGDIKLLCDTVVECVRDLTGYDRVMVYKFHEDEHGEVVAESKRPDLEPYIGLHYPSTDIPQASRFLFKQNRVRIIVDCHASPVCVIQDDGLMQPLCLVGSTLRAPHGCHAQYMENMGSIASLAMAVVINGNDEEVIRGKNLTRLWGLVVCHHTSARCIPFPLRYACEFLMQAVGLQLNMELQLAAQLLEKHVLKTQTLLCDMLLRDSPIGIVTQSPSIMDLVKCDGAALYYQGNYYPLGVTPSEVQIKDIVEWLLAFHGDSTGLSTDSLADAGYPRAALLGDAVCGMAVAYITNRDFLFWFRSHTAKEIKWGGAKHHPEEKDDGQRMHPRSSFKAFLEVVKSRSC

SEQ ID NO: 8566 - protein, 947 aa, Oryza sativa Indica Group
MASKEYLQENMLTWISCREPIDTITGALRAGTEGGHGGVERKEQQQQRGYQLPRDSRGSLEVFNPSSASSFRTAAAAPKSASPFLAIPDREEDNVVAQQRAAEWGLVLQTDHHTGLPQGVSARPSSGSARTSSEDNPQQQQSAAAIPRVSEELRAALSVFQQTFVVSDATHPNHPIMYASAGFFNMTGYTSKEVVGRNCRFLQGSGTDPHEIDKIRQSLANGSNYCGRILNYKKDGTPFWNLLTIAPIKDEDGRLLKFIGMQVEVSKYTEGKKDTVVRPNGLSESLIKYDARQKDHARSSVSELLLALKNPRSLSESSNNTLKRKSQESLSMSMSEVPSKRSSESGSRRNSRSGTRSSLQKINEVPDQVNRTRKSGLRAFMGFLGMGHGSVEKNMLKPRDEDPLIDSDDERPESFEDEFRRKEMRRGIDLATTLERIEKNFVITDPRLPDNPIIFASDSFLQLTEYNREEILGRNCRFLQGPETDRATVRKIRDAIDNQAEVTVQLINYTKSGKKFWNLFHLQPMRDQKGDVQYFIGVQLDGTEHVQDDAAKEGVVLVKKTADNIDEAAKELPDANLRPKDLWANHSKVVLPNPHMKDTASWRAIQKVLESGESIGLKHFRPVKPLGSGDTGSVHLVELLNTGEYFAMKAMDKSIMLNRNKVHRATAERQILDLLDHPFLPTLYASFQTKTHICLITDYCPGGELFVLLDNQPLKVLHEDAVRFYAAEVVVALEYLHCQGIIYRDLKPENILLHRDGHISLTDFDLSCLTSCRPQVFLPENADEKKGRKNGSYPIFFAEPMRASNSFVGTEEYIAPEIITGAGHTSAVDWWALGILLYEMLYGYTPFRGKTRQRTFANILHKDIRFPASISVSLAARQLMYRLLHRDPANRLGSYEGANEIKGHPFFRGINWPLIRAMAPPKLEIPLFSKDDMEKKGLVTNNRTDMF

SEQ ID NO: 8567 - protein, 396 aa, Oryza sativa Japonica Group
MARAAASRLAAAATSTSTLEMFSRHLAAASSAWGIASSRAPYPGRERRSASWWCPTRSFHATRGMNARDYYDVLGVNKDASASDIKKAYYLLAKKFHPDTNKEDADAEKKFQEVQHAYEVLKDDDKRETYDQLGAEAYERQASGGGPDDFSGSHPFGDIFGDMFDNPFAMRGGRDVKVPIKLSFMEAVQGCRKTIAYEADVFCDTCNGSGVPPGTVPQTCKACRGAGVIFMQRGIMSIETTCSRCGGSGKIVKNFCKTCKGEQLVKGKKSVKLDIMAGIDDNDTMKVFGKGGADVERNKPGDLYVTIKIREDPVFRREGNHVHVDAIISIAQAVLGGTVTVPTLTGNVSVKVRQGTQPGEKVVLRGKGIKARNSPAYGNQYIHFNVRVPTYDTFSN

SEQ ID NO: 8568 - protein, 374 aa, Elaeodendron xylocarpum
ALSIAGAVQSQKLAVCAISQLQSLPGGDIKLLCDTVVESVGDLTGYDRVMVYKFHEDEHGEVVAESKRPDLEPYIGLHYPSTDIPQASRFLFKQNRVRIIVDCHASPVRVIQDGGLTQPLCLVGSTLRAPHGCHAQYMENMGSIASLAMAVVINGNDEEVIGGRNPTRLWGLVVCHHTSARCIPFPLRYACEFLMQAFGLQLNMELQLAAQLLEKHVLKTQTLLCDMLLRDSPIGIVTQSPSIMDLVKCDGAALYYQGNYYPLGVTPSEAQIKDIVEWLLAFHGDSTGLSTDSLADAGYPGAALLGDAVCGMAVAYITNRDFLFWFRSHTAKEIKWGGAKHHPEDEDDGERMHPRSSFKAFLEVVKSRSLPWEN

SEQ ID NO: 8569 - protein, 355 aa, Paxillus involutus
MAASTYHNDLLAPFLALPQGDKVQAEYVWIDGDSGLRSKTTTVSKKVTDIGQLRIWDFDGSSTNQAPGHDSDVYLRPAAIFKDPFRGGDNILVLAETYNSDGTPNRTNYRHHASKVMDLAKDSVPWFGLEQEYTLFDADGSPFGWPKGGFPGPQGPYYCGAGTGKVVARDLIEAHYRACLYSGINISGINAEVMPSQWEFQVGPYEGISMGDHLWMARYLLVRIAEQWGIKVSFHPKPLQGDWNGAGCHTNYSTLPMREPGGMKHIDAAIEKLAKRHNEHIAVYGEDNELRLTGRHETGHIGDFSSGVANRGASIRVPRHVAAQGYGYLEDRRPASNIDPYRVTGIIVETTLLDK

SEQ ID NO: 8570 - protein, 374 aa, Elaeodendron xylocarpum
ALSIAGAVQSQKLAVRAISQLQSLPGGDIKLLCDTVVESVRDLTSYDRVMVYKFHEDEHGEVVAESKRPDLEPYIGLHYPSTDIPQASRFLFKQNRVRIIVDCHASPVRVIQDGGLTQPLCLVGSTLRAPHGCHAQYMENMGSIASLAMAVVINGNDEEVIGGRNPTRLWGLVVCHHTSARCIPFPLRYACEFLMQAFGLQLNMELQLAAQLLEKHVLKTQTLLCDMLLRDSPIGIVTQSPSIMDLVKCDGAALYYQGNYYPLGVTPSEAQIKDIVEWLLAFHGDSTGLSTDSLADAGYPGAALLGDAVCGMAVAYITNRDFLFWFRSHTAKEIKWGGAKHHPEDKDDGERMHPRSSFKAFLEVVKSRSLPWEN

SEQ ID NO: 8571 - protein, 520 aa, Arabidopsis thaliana
MEKKENGLDGKQSGRVINGPTNPMVTPLLNDLYQFTMAYAYWKAGKQSERSVFDLYFRKNPFGGEYTIFAGLEECIKFLANFNLTDEEINFVRDSLPGCEEAFCDYLRGLDCSDIEVYAISEGSVVFPKVPLLRIEGPVAVVQLLETPFLNLINYASLVATNAARHRFVAGKSKLLLEFGARRAQGPDGAISASKYCYLGGFDATSNVAAGKLFGIPLRGTHSHAFVSSFMSLDEIVDKVLRSSDGKSTCKDFICLVQTCLTKIQVMKSGIPNFCAVALALNELGYKAVGIRLDSGDLAYLSTEVRKFFCAIERDLKVPDFGKMIVTASNDLNEETVDALNKQGHEVDAFGIGTNLVTCYAQAALGCVFKLVEINNQPRIKLSEDVTKVSIPCKKRTYRLFGKEGYPLVDIMTGENEPPPKVGERLLCRHPFNESKRAYVVPQRVEELLKCYWRGNADEAREELEPLKELRNRCIKQLENMRPDHMRRLNPTPYKVSVSAKLYDFIHFLWAHEAPVGELH

SEQ ID NO: 8572 - protein, 574 aa, Oryza sativa
VFFKAAEREAFLGAPEMQQRRKSVFASAPFAMKQAALGAGVAARRNGAPLSLAAVVFALFVFATFLYNEDIKSIADFPFGAGALRAKSPDLHVLQETVGAAHLAAGSIAKRGEEVIVRVLDAPASTAMAAAAGSSSNNSTIEVAKANANANANAADAGVKVDEGQERERDVTLPSVKEGGADEARRREDEEAAEKESSAKAAAATAALRTVVSVPDTCDLYRGNWVYDEVNAPVYKESQCEFLTEQVTCMRNGRRDDSYQKWRWQPTDCDLPRFDARLLLERLRNKRLMFVGDSLNRNQWESMVCLVQSVIPKGKKTLTKFVNGGNSNIFYAHEYNATVEFYWAPFLVESNSDNPQVHSVPDRVIQWHSIAKHAHNWLGVDYLIFNTYIWWLNTLDMKVLKGSFDQGATEYVEVDRPVAYKEVLKTWAKWVDRNIDPNRTTVFFMSMSPNHITPEAWGNYGGIKCAMETLPITNRTTSLDVGTDWRLYAGAQEVLQTFRRVPVHLVDITALSELRKDAHTSVHTLRQGKLLTPEQQSDPKTYADCIHWCLPGLPDTWNQFLYARIASAPWSSDQ

SEQ ID NO: 8573 - protein, 312 aa, Triticum aestivum
  misc_feature (12)..(12): Xaa can be any naturally occurring amino acid
  misc_feature (20)..(20): Xaa can be any naturally occurring amino acid
GRSRRSQYPRVXAKEGLPWXSKGKTDKDGCYPPGHGDIFPSLMNSGKLDLLLSQGKEYVFIANSDNLGAIVDMKILNHLVHKQNEYCMEVTPKTLADVKGGTLISYEGRVQLLEIAQVPDAHVNEFKSIEKFKIFNTNNLWVSLKAIKRLVEADALKMEIIPNPKEVEGVKVLQLETAAGAAIRFFDHAIGMNVPRSRFLPVKATSDLQLVQSDLYTLVDGFVTRNAARTNPSNPSIELGPEFKKVGCFLGRFKSIPSIVELESLKVSGDVWFGSGIVLKGKVTITAKPGVKLEIPDGKVIENKDINGPEDL

SEQ ID NO: 8574 - protein, 374 aa, Euonymus alatus
ALSIAGAVQSQKLAVRAISQLQSLPGGDIKLLCDTVVETVRDLTGYDRVMVYKFHDDEHGEVVAENKKPDLEPYIGLHYPATDIPQASRFLFKQNRVRMIVDCHASTVRVIQDDRLVQPLCLVGSTLRAPHGCHAQYMENMGSQASLALAVISNGNDEEVIGGRNATRLWGLVVCHHTSARCIPFLFRYACEFLMQAFGLQLNMELQLAAQVSEKHVLKTQTLLCDMFLRDSPTGIVTKSPSIMDLVKCDGAAFYYQGKYYPLGVTPAEAQIKDIVEWLLAFHGDSTGLSTDSLADAGYPAAASLGDSVCGMAVAYITNRDFLFWFRSHTTEEIKWGGAKHHHEDKDDGQRMHPRSSFKAFLEVVKSRSFPWEN

SEQ ID NO: 8575 - protein, 1121 aa, Pisum sativum
  misc_feature (28)..(28): Xaa can be any naturally occurring amino acid
SNNNNNRNIKRESLSMRKAIAQYTEDAXLHAVFEKSGDSFDYAQSIRVTAATESVPEQQITAYLAKIQRGGFIQPFGSMIAVDETSFRVLAYSENARDMLGIAPQSVPSMEDDSSSSSFFSLGVDVRSLFSASSSVLLEKAFSAREISLMNPIWIHSRSTGKPFYGILHRIDIGVVIDLEPARSEDPALSIAGAVQSQKLAVRAISQLQALPGGDVKLLCDAVVESVRELTGYDRVMVYKFHEDEHGEVVAESKRVDLEPYIGLHYPATDIPQASRFLFKQNRVRMIVDCNASPVRVFQDEALVQPVCLVGSTLRAPHGCHAQYMANMGSIASLAMAVIINGNDEDGGGIGGAARGSMRLWGLVVCHHTSARCIPFPLRYACEFLMQAFGLQLNMELQLAVQSLEKRVLKTQTLLCDMLLRDSHTGIVTQSPSIMDLVKCDGAALYYQGNYHPLGVTPTESQIRDIIDWLLAFHSDSTGLSTDSLADAGYPGAASLGDAVCGMAVAYITEKDFLFWFRSHTAKEIKWGGAKHHPEDKDDGQKMHPRSSFKAFLEVVKIRSMQWDNAEMDAIHSLQLILRDSFKEAENNDSKAVVHTHMAELELQGVDELSSVAREMVRLIETATAPIFAVDVDGRINGWNAKVSELTGLLVEEAMGKSLVHDLVYKESRETVDKLLSHALKGEEDKNVEIKMKTFGPGNQNKAVFIVVNACSSKDYTNNIVGVCFVGQDITGQKVVMDKFINIQGDYKAIVHSPNPLIPPIFASDDNTCCLEWNNAMEKLSGWSRADVIGKLLVGEVFGSFCQLKGSDAMTKFMIVLHNALGGHDTDKFPLSFLDRHGKYVHTFLTANKRVNMDGQIIGAFCFLQIVNPELQQALTVQRQQDSSSLARMKELAYICQEVKNPLSGIRFTNSLLESTCLTDEQKQLLETSVACEKQMLKIVRDIALESIEDGSLELEKQEFLLENVINAVVSQVMLLLRDRKLQLIRDIPEEIKALAVYGDQLRIQQVLADFLMNVVRYAPSPDGWVEIHVFPRIKQISEGLTLLHAEFRMVCPGEGLPPELIQDMFHNSRWVTQEGLGLSMSRKIIKLMNGEVQYVREAERCYFLVLLELPVTRRSSKAIN

SEQ ID NO: 8576 - protein, 1129 aa, Avena sativa
MSSSRPASSSSSRNRQSSQARVLAQTTLDAELNAEYEESGDSFDYSKLVEAQRDGPPVQQGRSEKVIAYLQHIQKGKLIQTFGCLLALDEKSFNVIAFSENAPEMLTTVSHAVPSVDDPPRLGIGTNVRSLFSDQGATALHKALGFADVSLLNPILVQCKTSGKPFYAIVHRATGCLVVDFEPVKPTEFPATAAGALQSYKLAAKAISKIQSLPGGSMEVLCNTVVKEVFDLTGYDRVMAYKFHEDDHGEVFSEITKPGLEPYLGLHYPATDIPQAARLLFMKNKVRMICDCRARSIKVIEAEALPFDISLCGSALRAPHSCHLQYMENMNSIASLVMAVVVNENEEDDEAESEQPAQQQKKKKLWGLLVCHHESPRYVPFPLRYACEFLAQVFAVHVNREFELEKQLREKNILKMQTMLSDMLFREASPLTIVSGTPNIMDLVKCDGAALLYGGKVWRLRNAPTESQIHDIAFWLSDVHRDSTGLSTDSLHDAGYPGAAALGDMICGMAVAKINSKDILFWFRSHTAAEIRWGGAKNDPSDMDDSRRMHPRLSFKAFLEVVKMKSLPWSDYEMDAIHSLQLILRGTLNDASKPKREASLDNQIGDLKLDGLAELQAVTSEMVRLMETATVPILAVDGNGLVNGWNQKAAELTGLRVDDAIGRHILTLVEDSSVPVVQRMLYLALQGKEEKEVRFEVKTHGPKRDDGPVILVVNACASRDLHDHVVGVCFVAQDMTVHKLVMDKFTRVEGDYKAIIHNPNPLIPPIFGADEFGWCSEWNAAMTKLTGWNRDEVLDKMLLGEVFDSSNASCPLKNRDAFVSLCVLINSALAGEETEKAPFGFFDRSGKYIECLLSANRKENEGGLITGVFCFIHVASHELQHALQVQQASEQTSLKRLKAFSYMRHAINNPLSGMLYSRKALKNTDLNEEQMKQIHVGDNCHHQINKILADLDQDSITEKSSCLDLEMAEFLLQDVVVAAVSQVLITCQGKGIRISCNLPERFMKQSVYGDGVRLQQILSDFLFISVKFSPVGGSVEISSKLTKNSIGENLHLIDLELRIKHQGLGVPAELMAQMFEEDNKEQSEEGLSLLVSRNLLRLMNGDVRHLREAGVSTFIITAELASAPTAMGQ

SEQ ID NO: 8577 - protein, 367 aa, Pyrobaculum aerophilum str. IM2
MSTRSEFLKRLESWGTQLAKAILELEEPIMEIPARTLSNTIWDEKARMLKLGPEKLHRRFLDVKEARKFMQTVLMLRLIVEAIREDVYPTIRDLYYNGKHTIVFKDPLGRTHRENTWDEQSESNAVIEDIEVATNVLREEMGVSADVKGKIVGPIVVRSQGYELDASKFGETALSLPVNVDALEIVKVEASYVLVVEKDAIFQRLVREKFWSQEGAILVTAKGMPDRATRRFIRRLNEEYKLPVYVLTDGDPYGWYIYSVYKSGSIKLSYESERLATPDAKFLGLTATDIDTYKISDNYVIAANDRDIKRAQELLRYPWFQKPEWTREINLFLKKKKKVEIEALSTHGLKFLHDYLRDKIRSKKFID

SEQ ID NO: 8578 - protein, 1129 aa, Avena sativa
MSSSRPASSSSSRNRQSSRARVLAQTTLDAELNAEYEESGDSFDYSKLVEAQRDGPPVQQGRSEKVIAYLQHIQKGKLIQTFGCMLALDEKSFNVIAFSENAPEMLTTVSHAVPSVDDPPRLGIGTNVRSLFSDQGATALHKALGFADVSLLNPILVQCKTSGKPFYAIVHRATGCLVVDFEPVKPTEFPATAAGALQSYKLAAKAISKIQSLPGGSMEVLCNTVVKEVFDLTGYDRVMAYKFHEDDHGEVFAEITKPGLEPYLGLHYPATDIPQAARFLFMKNKVRMICDCRARSIKVIEAEALPFDISLCGSALRAPHSCHLQYMENMNSIASLVMAVVVNENEEDDEAESEQPAQQQQKKKLWGLLVCHHESPRYVPFPLRYACEFLAQVFAVHVNREFELEKQLREKSILKMQTMLSDMLFREASPLTIVSGAPNIMDLVKCDGAALLYGGKVWRLRNAPTESQIHDIAFWLSDVHRDSTGLSTDSLHDAGYPGASALGDMICGMAVAKINSKDIIFWFRSHTAAEIRWGGAKHDSSDMDDSRRMHPRLSFKAFLEVVKMKSLPWTDYEMDAIHSLQLILRGTLNDASKPKREASLDNQIGDLKLDGLAELQAVTSEMVRLMETATVPILAVDGNGLVNGWNQKAAELTGLRVDDAIGRHILTLVEESSVPVVQRMLYLALQGKEEKEVRFEVKTHGPRRDDGPVILVVNACASRDLHDHVVGVCFVAQDMTVHKLVMDKFTRVEGDYKAIIHNPNPLIPPIFGADEFGWCSEWNAAMTKLTGWNRDEVLDKMLLGEVFDSSNASCPLKNKNAFVSLCVLINSALAGEETEKAPFGFFDRSGKYIECLLSANRKENEGGLITGVFCFIHVASHELQHALQVQQASEQTSLKRLKAFSYMRHAINNPLSGMLYSRKALKNTDLNEEQMKQIHVGDNCHHQINKILADLDQDSISEKSSCLDLEMAEFVFQDVVVAAVSQVLITCQGKGIRISCNLPERFMKQSVYGDGVRLQQILSDFLFISVKFSPVGGSVEISSKLTKNSIGENLHLIDLELRIKHQGLGVPAELMEQMFEEDNKEQSDEGLGLLVSRKLLRLMNGDVRHLREAGVSTFILTAELASAPTAIGQ

SEQ ID NO: 8579 - protein, 190 aa, Agathis dammara
DEHGEVVAEIRRSDLEPYLGLHYPATDIPQASRFLFMQNRVRMICDCRAAPVKVIQAEELKQPLCLVGSTLRAPHGCHAQYMANMGSIASLVMAVVINGNEDEGGGSGSGRGSMKLWGLVVCHHTSPRAVPFPLRYACEFLMQAFGLQLNMELQVAAQLTEKHILRTQTLLCDMLLRDAPIGIVTHSPSI

SEQ ID NO: 8580 - protein, 495 aa, Avena sativa
MSSSRPASSSSSRNRQSSQARVLAQTTLDAELNAEYEESGDSFDYSKLVEAQRDGPPVQQGRSEKVIAYLQHIQKGKLIQTFGCLLALDEKSFNVIAFSENAPEMLTTVSHAVPSVDDPPRLGIGTNVRSLFSDQGATALHKALGFADVSLLNPILVQCKTSGKPFYAIVHRATGCLVVDFEPVKPTEFPATAAGALQSYKLAAKAISKIQSLPGGSMEMLCNTVVKEVFDLTGYDRVMAYKFHEDDHGEVFSEITKPGLEPYLGLHYPATDIPQAARFLFMKNKVRMICDCRARSIKVIEAEALPFDISLCGSALRAPHSCHLQYMENMNSIASLVMAVVVNENEEDDEAESEQPAQQQKKKKLWGLLVCHHESPRYVPFPLRYACEFLAQVFAVHVNREFELEKQLREKNILKMQTMLSDMLFREASPLTIVSGNPNIMDLVKCDGAALLYGGKVWRLRNAPTESQIHDIAFWLSDVHRDSTGLSTDSLHDAG

SEQ ID NO: 8581 - protein, 577 aa, Chlamydomonas reinhardtii
MDLATALGLGIAPPPPADDSSHHSTTEACTLPAYLRAPEVTAQVMAEYIWLMGGTGQLRSKTKVLDAKPSCAEEAPIMIVESNPDGQLAEPNHELFLKPRKIFRDPFRGGDHILVLCDTFIVAQVVAEAGAAPSTVLQPSETNSRVACENVLRVAEQQEPVFAVEQEYAIIHPAYPTKVPLGPRRPSTSRASSCHSGSRRSSYVSSGSARGGIGKNSSHHGGKQSHAAAAAAAAAVAGIPWPSPDACEQTAQEASAARQKASRQLADSHLRCCLFAGVRVTGADVHSLDGLHSYKIGPSPGVDLGDDLWTSRYLLQRVAEQHSASVSWEPDSMPSERPLGCHFKYSTASTRQAPHGLNAIEQQLVRLQATHVQHQVAYNDGRLDRLSSPEASTFTHAVGSANASVVVPSLTFLQQGGYFTDRRPPSDADPYKVTLLLAATTLDIPLPKLPASSSAGNTAANCSGGMSAGPSSCPAAAALPFGSPMQSYLLAAAAAQRQQQQQHLMFDTESEECDSVDEDDAMTEDSAALLAKMDDDGGAAEASSCDSDFEDQDDASSSPITGTWADNDCTHMLGAGI

SEQ ID NO: 8582 - protein, 234 aa, Dunaliella salina
KAQEPWFGIEQEYTLLNSVTKWPLGWPKGGYPAGQGPYYCSVGAGRSIGRDIPEVHYRCCLHAGIQISGVNGEVLPSQWEYQVGPVEGIAMGDQMWMSRYLMYRVAELFNVEVTFDPKPIPGDWNGSGGHVNFSNRQPESPPAGKQSRSSAKKLGKRHRWHIAAYGEGNERRLTGKHETSSMNDFSWGVANRGCSIRVGRMVPVEKCGYYEDRRPSSNLDPYVVTRLLVETTLL

SEQ ID NO: 8583 - protein, 1124 aa, Cucurbita pepo
MSTSRPSQSSSNSGRSRHSTRIIAQTSVDANVQADFEESGNSFDYSSSVRVTSDVSGDQQPRSDKVTTAYLHHIQKGKLIQPFGCLLALDDKTFKVIAYSENAPEMLTMVSHAVPSMGDYPVLGIGTDVRTIFTAPSASALLKALGFGEVTLLNPILVHCKTSGKPFYAIVHRVTGSLIIDFEPVKPYEGPVTAAGALQSYKLAAKAITRLQSLPSGSMARLCDTMVQEVFELTGYDRVMAYKFHDDDHGEVISEVAKPGLQPYLGLHYPATDIPQAARFLFMKNKVRMIVDCRAKHLKVLQDEKLQFDLTLCGSTLRAPHSCHLQYMENMNSIASLVMAVVVNEGDEENEGPALQQQKRKRLWGLVVCHNSSPRFVPFPLRYACEFLAQVFAIHVNKELELENQIIEKNILRTQTLLCDMLMRDAPLGIVSRSPNIMDLVKSDGAALLYKKKIWRLGLTPNDFQLLDIASWLSEYHMDSTGLSTDSLYDAGYPGAIALGDEVCGMAAVRITNNDMIFWFRSHTASEIRWGGAKHEHGQKDDARKMHPRSSFKAFLEVVKTRSLPWKDYEMDAIHSLQLILRNTFKDTDATEINRKSIQTTLGDLKIEGRQELESVTSEMVRLIETATVPILAVDLDGLINGWNTKIAELTGLPVDKAIGKHLLTLVEDSSVEVVRKMLFLALQGQEEQNVQFEIKTHGSHIEVGSISLVVNACASRDLRENVVGVFFVAQDITGQKMVMDKFTRLEGDYKAIVQNPNPLIPPIFGSDEFGWCSEWNPAMAKLTGWSREEVIDKMLLGEVFGVHKSCCRLKNQEAFVNLGIVLNNAMCGQDPEKASFGFLARNGMYVECLLCVNKILDKDGAVTGFFCFLQLPSHELQQALNIQRLCEQTALKRLRALGYIKRQIQNPLSGIIFSRRLLERTELGVEQKELLRTSGLCQKQISKVLDESDIDKIIDGFIDLEMDEFTLHEVLMVSISQVMLKIKGKGIQIVNETPEEAMSETLYGDSLRLQQVLADFLLISVSYAPSGGQLTISTDVTKNQLGKSVHLVHLEFRITYAGGGIPESLLNEMFGSEEDASEEGFSLLISRKLVKLMNGDVRYMREAGKSSFIITVELAAAHKSRTT

SEQ ID NO: 8584 - protein, 1131 aa, Zea mays
MSSSRPAHSSSSSSRTRQSSRARILAQTTLDAELNAEYEESGDSFDYSKLVEAQRSTPPEQQGRSGKVIAYLQHIQRGKLIQPFGCLLALDEKSFRVIAFSENAPEMLTTVSHAVPNVDDPPKLGIGTNVRSLFTDPGATALQKALGFADVSLLNPILVQCKTSGKPFYAIVHRATGCLVVDFEPVKPTEFPATAAGALQSYKLAAKAISKIQSLPGGSMEALCNTVVKEVFDLTGYDRVMAYKFHEDEHGEVFAEITKPGIEPYIGLHYPATDIPQAARFLFMKNKVRMICDCRARSVKIIEDEALSIDISLCGSTLRAPHSCHLKYMENMNSIASLVMAVVVNENEEDDEPEPEQPPQQQKKKRLWGLIVCHHESPRYVPFPLRYACEFLAQVFAVHVNKEFELEKQIREKNILRMQTMLSDMLFKESSPLSIVSGSPNIMDLVKCDGAALLYGDKVWRLQTAPTESQIRDIAFWLSEVHGDSTGLSTDSLQDAGYPGAASLGDMICGMAVAKITSKDILFWFRSHTAAEIKWGGAKHDPSDKDDNRRMHPRLSFKAFLEVVKTKSLPWSDYEMDAIHSLQLILRGTLNDASKPAQASGLDNQIGDLKLDGLAELQAVTSEMVRLMETATVPILAVDGNGLVNGWNQKVAELSGLRVDEAIGRHILTLVEDSSVSLVQRMLYLALQGREEKEVRFELKTHGSKRDDGPVILVVNACASRDLHDHVVGVCFVAQDMTVHKLVMDKFTRVEGDYKAIIHNPNPLIPPIFGADQFGWCSEWNAAMTKLTGWHRDEVVDKMLLGEVFNSSNASCLLKSKDAFVRLCIVINSALAGEEAEKASFGFFDRNEKYVECLLSVNRKVNADGVVTGVFCFIHVPSDDLQHALHVQQASEQTAQRKLKAFSYMRHAINKPLSGMLYSRETLKSTGLNEEQMRQVRVGDNCHRQLNKILADLDQDNITDKSSCLDLDMAEFVLQDVVVSAVSQVLIGCQAKGIRVACNLPERSMKQKVYGDGIRLQQIVSDFLFVSVKFSPAGGSVDISSKLTKNSIGENLHLIDFELRIKHRGAGVPAEILSQMYEEDNKEQSEEGFSLAVSRNLLRLMNGDIRHLREAGMSTFILTAELAAAPSAVGR

SEQ ID NO: 8585 - protein, 158 aa, Picea glauca
METTFYSILGVNKDSSSAEIRSAYRKLAMKWHPDKWSTDPSSSETAKLRFQQIQEAYSVLSDDTKRALYDAGMYEPSEDMDAFCDFLDELSSLIATVKVQSNKDDELLQLQEMFTKMLEEDWFSTDNFEAFKEISSQHSDDKPENGQDHEPYGSVDDL

SEQ ID NO: 8586 - protein, 321 aa, Hypocrea virens
MPSLTALASLLALVPSALAGWNANSKQNIAVYWGQNSANSQSTQQRLSFYCNDANINVIDIAFLNGITPPMTNFANAGDRCTPFSDNPWLLSCPEIEADIKTCQANGKTIILSLGGDSYTQGGWSSASAAQSAANQAWAMFGPVQSGSTVHRPFGSAVVDGFDFDFEATTNNLAAFGAQLKSRTNAAGGKKYYFSAAPQCFFPDAAVGALINAVPMDWIQIQFYNNPCGVSGFTPGTSTQNNYNYQTWENWAKTSPNPNVKLLVGIPAGPTAGRGYVSGSQLTSVFQYSKQFSTFAGAMMWDMSQLFQNTGFEAQVVNALK

SEQ ID NO: 8587 - protein, 164 aa, Hevea brasiliensis
GTLAETCASGNYQYVNVAFLSNFGNGQTPVLNLAGHCVPSSNGCTGLSSDIQACQGQGIKVLLSIGGGGGSYSLSSADDATQVANYLWNNFLGGTSNSRPLGDAILDGIDFDIEAGSGQFWDDLARALNGFSQQRKVYLSAAPQCPFPDAHLSTAINTGLFDYV

SEQ ID NO: 8588 - protein, 391 aa, Acalypha californica
REFTSDSADVPITAAGALKSYKLAAKAISRLQSLPSGNMSLLCDVLVKEVSDLTGYDRVMVYKFHEDEHGEVIAECHRPDMEPYLGLHYPATDIPQASRFLFIKNKVRMICDCLAPPVKVIQDSSLTQPVSLCGSTLRSPHGCHAQYMTNMGTLASLVMSATINEDADEIDDDQQKGRKLWGLVVCHHNSSRFVPFPLRYACEFLIQVFGVQINKELELAAQMREKNMLQTQTVLCDMLLRDAPEAIITQSPNVMNLVKCDGAALYYRKKFWLLGVTPTEAQIKDIADWLLEYHGESTGLSTDSLMEAGYPGASILGDAVCGMAAIRISSKDFLFWFRSHTAKEIKWSGAKHDPEDKDDGRKMHPRSSFKAFLEVVKWRGLPWEDMEMDAI

SEQ ID NO: 8589 - protein, 1124 aa, Pisum sativum
MSTTRPSQSSNNSGRSRNSARIIAQTTVDAKLHATFEESGSSFDYSSSVRVSGSVDGDQQPRSNKVTTAYLNHIQRGKQIQPFGCLLALDEKTCKVVAYSENAPEMLTMVSHAVPSVGDHPALGIGTDIRTVFTAPSASALQKALGFAEVSLLNPILVHCKTSGKPFYAIIHRVTGSLIIDFEPVKPYEVPMTAAGALQSYKLAAKAITRLQSLASGSMERLCDTMVQEVFELTGYDRVMAYKFHEDDHGEVIAEIAKPGLEPYLGLHYPATDIPQAARFLFMKNKVRMIVDCNAKHVKVLQDEKLPFDLTLCGSTLRAPHSCHLQYMANMDSIASLVMAVVVNDSDEDGDSADAVLPQKKKRLWGLVVCHNTTPRFVPFPLRYACEFLAQVFAIHVNKEIELEYQILEKNILRTQTLLCDMLMRDAPLGIVSQSPNIMDLVKCDGAALFYRNKLWLLGATPTESQLREIALWMSEYHTDSTGLSTDSLSDAGFPGALSLSDTVCGMAAVRITSKDIVFWFRSHTAAEIRWGGAKHEPGDQDDGRKMHPRSSFKAFLEVVKARSVPWKDFEMDAIHSLQLILRNASKDTDIIDLNTKAINTRLNDLKIEGMQELEAVTSEMVRLIETATVPILAVDVDGTVNGWNIKIAELTGLPVGEAIGKHLLTLVEDSSTDIVKKMLNLALQGEEEKNVQFEIKTHGDQVESGPISLIVNACASKDLRENVVGVCFVAQDITAQKTVMDKFTRIEGDYKAIVQNPNQLIPPIFGTDEFGWCCEWNAAMIKLTGWKREEVMDKMLLGEVFGTQMSCCRLKNQEAFVNFGIVLNKAMTGLETEKVPFGFFSRKGKYVECLLSVSKKIDAEGLVTGVFCFLQLASPELQQALHIQRLSEQTALKRLKVLTYMKRQIRNPLAGIVFSSKMLEGTDLETEQKRIVNTSSQCQRQLSKILDDSDLDGIIDGYLDLEMAEFTLHEVLVTSLSQVMNRSNTKGIRIANDVAEHIARETLYGDSLRLQQVLADFLLISINSTPNGGQVVIAASLTKEQLGKSVHLVNLELSITHGGSGVPEAALNQMFGNNVLESEEGISLHISRKLLKLMNGDVRYLKEAGKSSFILSVELAAAHKLKG

SEQ ID NO: 8590 - protein, 224 aa, Helianthus petiolaris
NIHGRGWRSAITSPDPLAFLGCSATTYPSSLTQQKRWFTGVFEILFTDKNPLLLTIEGNIWFRQALAYFYICLWAVRSVPELCYASLPAYCIIKDSHFLPKVNERASLIFMGIFVIYNLYAYWECKRIGVSLRMWWNLQRMERVNTLTARLFAFVSVMLKLIGLSNTVFEVTQKEHMSNDDDNDNVSVGRFTYDNSPMIMPGVVILLINIMALVNGMLRLYKVD

SEQ ID NO: 8591 - protein, 391 aa, Atuna racemosa
DLEPVNPADVPVTAAGALKSYKLAAKAISRLQSLPSGNISLLCDVLVKEVSDLTGYDRVMVYRFHEDEHGEVVAECCRPDLEPYLGLHYPATDIPQASRFLFMKNKVRMICDCLAPPVKVIQDKRLAQPLSLCGSTLRAPHGCHSQYMANMGAIASLVMSVTINDDEEEMEADQRKARKLWGLVVCHHTSPRFVPFPLRYACEFLIQVFGIQINKEVELAAQTREKHILRTQTVLCDMLLRDAPVAIITQSPNVMDLVKCDGAALYYRKKFWLLGITPTEAQIKDIVEWLLHYHGESTGLSTDSLMEAGYPGASVLGGAVCGMAAVKITSKDFLFWFRSHTAKEIKWGGAKHDPNDKDDGRKMHPRSSFKAFLEVVKRRSLPWEDVEMDAI

SEQ ID NO: 8592 - protein, 226 aa, Helianthus petiolaris
NIHGRGWRSAITSPDPLAFLGCSATTYPSSLTQQKRWFTGLFEILFTDKNPLLLTIEGNIWFRQALAYFYICLWAVRSVPELCYASLPAYCIIKDSHFLPKVNERAILIFMGIFVIYNLYAYWECKRIGVSLRMWWNLQRMGRVNTLTARLFAFVSVMLKLIGLSNTVFEVTQKEHMSNDDDNDNDNVSVGRFTYDNSPMIMPGVVILLINIMALVNGMLSLYKVD

SEQ ID NO: 8593 - protein, 317 aa, Oryza sativa Japonica Group
MATRANGSSCSLASLMAAIFFLLVVSSRGAHGGRIAIYWGQNGNEGTLADTCATGNYAFVNLAFLCSFGSGQAPQLNLAGHCDAYSGACANLTADIARCQSMGVKVLLSIGGGAGGYSLASKQDVSHLARYLWESFLGGRPSAPGGRRPLGDAVLDGVDFDIEGGGGDPRYYGDLAAYLKAYSGKGRAGKEVLLSAAPQCPFPDQWVGKALDTGLFDYVWVQFYNNPPCQYAAGSGGGAANLLDAWRQWTSGVEARYIFLGLPASPGAAGSGFIPVGSLESQVLPALKASSKYGGVMLWSRYYDDQDGYSSAIKNAV

SEQ ID NO: 8594 - protein, 226 aa, Helianthus petiolaris
NIHGRGWRSAITSPDPLAFLGCSATTYPSSLTQQKRWFTGLFEILFTDKNPLLLTIEGNIWFRQALAYFYICLWAVRSVPELCYASLPAYCIIKDSHFLPKVNERAILIFMGVFVIYNLYAYWECKRIGVSLRMWWNLQRMGRVNTLTARLFAFVSVMLKLIGLSNTVFEVTQKEHMSNDDDNDNDNVSVGRFTYDNSPMIMPGVVILLINIMALVNGMLRLYKVD

SEQ ID NO: 8595 - protein, 275 aa, Zea mays
MTAGQCGNIQDQEAAPGADLYAVLGLNRECTDAELRVAYRRLAMIWHPDRCSASGSSARVEEAKERFQEIQGAYSVLSDSNKRLLYDVGVYDSEDDDADLSGMGDFLGEMADMMSQATPTESFEELQQLFVDMFQDDLDGAGFFGGLPTSRSAQGPSSTSLPPSTSPLRPTPPARSKGAQTPSSFNGAGRRGSTAKRPRTGWAGLEPDLGLSGFCFMVSKSKERPAAWACDGGDERSGSKQRLSTSRDVSGSRWGDVALARQSQSSRNLWAVNGL

SEQ ID NO: 8596 - protein, 226 aa, Helianthus petiolaris
NIHGRGWRSAITSPDPLAFLGCSATTYPSSLTQQKRWFTGLFEILFTDKNPLLLTIKGNIWFRQALAYFYCCLWAVRSVPELCYASLPAYCIIKDSHFLPKVNERAILIFMGIFVIYNLYAYWECKRIGVSLRMWWNLQRMGRVNTLTARLFAFVSVMLKLIGLSNTVFEVTQKEHNSNDDDDDNDNVSVGRFTYDNSPMIMPGVVILLINIMALVNGMLRLYKVD

SEQ ID NO: 8597 - protein, 557 aa, Vitis vinifera
MEAKAANGPNTERSYGVIDGPTNPMVTPLLTDLYQFTMCYAYWKAGKHNERAVFDLFFRKNPFGGEYTIFAGLEECIKFIANFKFTEEEISFIRATLPPTCEDGFYDYLRGVDCSDVEVYAISEGSVVFPKVPLMRVEGPIAVAQLLETPFVNLINYASLVATNAARHRLVAGKSKMLLEFGLRRAQGPDGGIGASKYCYIGGFDATSNVAAGRLFGIPLRGTHSHAFVSSFMSPDEIIDKSLRSCDGSRTCEDFVSLVQAWLNKIQWSRSFRGTNQSELAAFTSYALAFPNNFLALVDTYDVMKSGIPNFCAVALALIDLGYKAVGIRLDSGDLAYLSCEARKFFCTIENEFGVSDFGKMSITASNDLNEETLDALNKQGHEVDAFGIGTYLVTCYAQAALGCVFKLVEINNQPRIKLSEDVSKVSIPCKKRCYRLFGREGYPLVDIMTGENELPPKLAERILCRHPFSESKRAYVVPQHVEELLKCYWSGSSGKAREELPPLKNIKERCMKQLEQMRPDHMRRLNPTPYKVSVSAKLYDFIHFLWLNEAPVGELQ

SEQ ID NO: 8598 - protein, 297 aa, Vitis vinifera
  misc_feature (3)..(3): Xaa can be any naturally occurring amino acid
  misc_feature (107)..(107): Xaa can be any naturally occurring amino acid
  misc_feature (211)..(211): Xaa can be any naturally occurring amino acid
  misc_feature (271)..(271): Xaa can be any naturally occurring amino acid
MAXTPQSTPLLISLSVLALLQTSYAGGIAIYWGQNGNEGTLTQTCNTGKYSYVNIAFLNKFGNGQTPEINLAGHCNPASNGCTSVSTGIRNCQNRGIKVMLSIGGGXGSYSLSSSNDAQNVANYLWNNFLGGQSSSRPLGDAVLDGIDFDIELGSTLHWDDLARALSGFSKRGRKVYLTAAPQCPFPDKFLGTALNTGLFDYVWVQFYNNXPCQYSSGNTNNLLNSWNRWTSSINSRIFMGLPASSAAAGSGFIPANVLTSQILPVIKRSXKYGGVMLWSKYYDDQSGYSSSIKSSV

SEQ ID NO: 8599 - protein, 226 aa, Helianthus petiolaris
NIHGRGWRSAITSPDPLAFLGCSATTYPSSLTQQKRWFTGLFEILFTDKNPLLLTIKGNIWFRQALAYFYCCLWAVRSVPELCYASLPAYCIIKDSHFLPKVNERAILIFMGIFVIYNLYAYWECKRIGVSLRMWWNLQRMGRVSTLTARLFAFVSVMLKLIGLSNTVFEVTQKEHNSNDDDDDNDNVSVGRFTYDNSPMIMPGVVILLINIMALVNGMLRLYKVD

SEQ ID NO: 8600 - protein, 163 aa, Oryza sativa
MWWEWEEDGEEAARPGEEVPVDFDFISLLCKPKDYYKILEVGYDASEEAIRSSYIRLALKWHPDKKQGEENATSRFQEINEAYQVLSNPAKRREYDKKGILYVQDHNVVHGHADLPLLGGNDDAEFILCFDKWKVVGRELGKISADLLVTLLLPLNFQCVKTQ

SEQ ID NO: 8601 - protein, 374 aa, Euonymus europaeus
ALSIAGAVQSQKLAVRAISQLQSLPGGDIKLLCDTVVESVRDLTGYDRVMVYKFHDDEHGEVVAESKRPDLEPYFGLHYPATDIPQASRFLFKQNRVRMIVDCHASPVCVIQDYRLIQPLCLVGSTLRAPQGGHAQYMENMGSKASLAMPVIINGNDEEVIGGRNATRLWGLVVCHHTSARCTPFPLRYACEFLLQAFGLQLNMELQLAAQLSEKHVLKTQTLLCDMLLRDSPTGIVTKSPSIMDLVKCDGAALYYQGKYYPLGVTPAQAQMKDIVEWLLAFHGDSTGLSTDSLADAGYPGAALLGDAVCGMAVAYITKRDFLFWFRSHTAKEIKWGGAKHHPEDKDDGQRMHPRSSFKAFLEVVKSKSLPWEN

SEQ ID NO: 8602 - protein, 337 aa, Arabidopsis thaliana
MGVDYYKVLQVDRSASDDDLKKAYRKLAMKWHPDKNPNNKKDAEAMFKQISEAYEVLSDPQKKAVYDQYGEEGLKGNVPPPDAGGATYFSTGDGPTSFRFNPRNADDIFAEFFGFSSPFGGGRGGTRFSSSMFGDNMFASFGEGGGGGGGSMHHGGARKAAPIENKLPCSLEDLYKGTTKKMRISREIADVSGKTMQVEEILTIDVKPGWKKGTKITFPEKGNEQPGVIPADLVFIIDEKPHPVFTREGNDLIVTQKISLVEALTGYTVNLTTLDGRRLTIPVTNVVHPEYEEVVPKEGMPLQKDQTKRGNLRIKFNIKFPTRLTSEQKTGVKKLLG

SEQ ID NO: 8603 - protein, 374 aa, Euonymus europaeus
ALSIAGAVQSQKLAVRAISRLQSLPGGDIKLLCDTVVESVRDLTGYDRVMVYKFHDDEHGEVVAESKRHDLEPYFGLHYPATDIPQASGFLFKQNRVRMIVDCHASPVRVIQDDRLIQPLCLVGSTLRAPHGCHAQYMENMGSKASLAMAVIINGNDEEVIGGRNATRLWGLVVCHHTSARCTPFPLRYACEFLLQAFGLQLNMELQLAAQLSEKHVLKTQTLLCDMLLRDSPTGIVTKSPSIMDLVKCDGAALYYQGKYYPLGVTPAEAQIKDIVEWLLAFHGDSTGLSTDSLADAGYPGAASLGDSVCGMAVAYITNRDFLFWFRSHTTEEIKWGGAKHHPEDKDDGQRMHPRSSFQAFLEVVKSRSFPWEN

SEQ ID NO: 8604 - protein, 374 aa, Gyminda tonduzii
ALSIAGAVQSQKLAIRAISQLQSLPGGDIKLLCDTVVESVRELTGYDRVMVYKFHEDEHGEVAAESKRTDLEPYFGLHYPATDIPQASRFLFRQNRVRMIVDCHASPVRVIQDDGLMQPLCLVGSTLRAPHGCHAQYMENMGSKASLAMAVIINGNDEEVIGGRNATRLWGLVVCHHTSARCIPFPLRYACEFPMQAFGLQLNMELQLAAQLSEKHVLKTQALLCDMLLRDSPTGIVTQSPSIMDLVKCDGAALYYQGKYFPIGVTPTEAQIKDIVEWLLVFHGDSTGLSTDSLADAGYPGAALLGDAVCGMAVAYITKKDFLFWFRSHTTKEIKWGGAKHHPEDKDDGQRMHPRSSFKAFLEVVKSRSLPWES

SEQ ID NO: 8605 - protein, 223 aa, Oryza sativa
MVKLTMIARVTDGLPLAEGLDDGRDQKDADFYKQQAKLLFKNLSKGQHEASRMSIETGPYYFHYIIEGRVCYLTMCDRSYPKKLAFQYLEDLRNEFERVNGSQIETAARPYAFIKFDTFIQKTKKLYLDTRTQRNLAKLNDELYEVHQIMTRNVQEVLGVGEKLDQVTEMSTRLTSDTRIYADKAKDLNRQALIRKYAPVAIVIGVVLMLFWLKNKIWVTALN

SEQ ID NO: 8606 - protein, 245 aa, Gymnosporia mossambicensis
ALSIAGAVQSQKPAVRAISQLQSLPGGDIKLLCDTVVESVRNLTGYDRVMVYKFHEDEHGEVVAESKRSDLEPYIGLHYPASDIPQASRFLFKQNRVRMIVDCHASPVRVIQDDGLMQPLCLVGSTLRAPHGCHAQYMENMGSLASLAMAVIINGNEEEAIGGRSPTRLWGLVVCHHTSARCIPFPLRYACEFLMQAFGLQLNMELQLAAQLLEKHVLKTQTLLCDMLLRDSPTGIVTQSPSIMD

SEQ ID NO: 8607 - protein, 671 aa, Oryza sativa Japonica Group
MAFSSEAWKSSATAGHGDGDGDGDRTPPPTPPLPTPLLPPTLAPLQRSLVFGRVEGEAMSSEARESSATAVDRTPPPTPRDEDKDSFMHLVSRYLIREEKEMIDWNKVERPTPEMVVPYDSLVQAPRDIPEIRNLLNKLAVLKLNGGLGTTMECVAPNFTHLQFLNKKYGCSVPILLMNSFNTSLVNKIVEKYTNIEIHTFNQNKYPRIITEKFLPLSSEGSTGSHCWYPPGHGDVFFSLCKSGILDTMLSQGKEYVFIASSENLGATVDIEIESLTSTEILNHLIHNKNEYCMELLEIFQVPYENVAFGYRRVNLKAIKRLVKAEALKMEIIPNLKEVDGVKVLQLEKEAGSAIQCFEKAIGVTVPRSRFLAVKNTSDLFLILSDLYIVMDGTVTRNPARDNSTNPLIDLGPEFRKVDSFLDRFKSIPSIVALDSLKISGDVWFGSRITLKGEVTIAAQLGLKLDILDGSVFDNKHSTHSSGAIKYTMKLDEGADCASIDSALNRLNPGSTLILKKDDFYRYIDPIQARNRAMFHSESNCIITATLKDNWFAKLVQGKLWLIILVFHQFKLLSRRRLRWGERRRRTLRSIHQDIQSYLDNYSDSDMWHLIVHSVARVISNVLEDVNRKYMKNHYLGFLAIHSTVFAIEVIGSYAVELNYDIEHYAEPPEL

SEQ ID NO: 8608 - protein, 207 aa, Dahlstedtia pinnata
VMAYKFHEDDHGEVIAEITKPGLEPYLGLHYPATDIPQAARFLFMKNKVRMIVDCHAKHVKVLQDEKTPFDLTLCGSTLRAPHSCHLQYMANMDSIASLVMAVVVNDNEEDGDSSDAVQPQKRKRLWGLVVCHNTTPRFVPFPLRYACEFLAQVFAIHVNKEIELEYQIIEKNILRTQTLLCDMLMRDAPLGIVSQSPNIMDLVKCD

SEQ ID NO: 8609 - protein, 245 aa, Gymnosporia mossambicensis
ALSIAGAVQSQKLAVRAISQLQSLPGGDIKLLCDTVVESIRNLTGYDRVMVYKFHEDEHGEVVAESKRSDLEPYIGLHYPASDIPQASRFLFKQNRVRMIVDCHASPVRVIQDDGLMQPLCLVGSTLRAPHGCHAQYMENMGSLASLAMAVIINGNEEEAIGGRSPTRLWGLVVCHHTSARCIPFPLRYACEFLMQAFGLQLNMELQLAAQLLEKHVLKTQTLLCDMLLRDSPTGIVTQSPSIMD

SEQ ID NO: 8610 - protein, 373 aa, Candida albicans SC5314
MTTSLTEQTAILAKYLELSQNGKILAEYVWIDAEGNTRSKCRTLSKKPTSVDDLPEWNYDGSSTGQAPGHDSDVYLRPVAFYPDPFRKGDNIIVLNECWNNDGTPNKFNHRHECAKLMKAHASEEVWFGLEQEYTLFDQYDYPYGWPKGGFPAPQGPFYCGVGTGKVVARDVIEAHYRACLYAGINISGINAEVMPSQWEFQVGPCEGIEMGDQLWIARYLLQRVAEEFAVKISFHPKPLKGDWNGAGCHTNVSTKSMRVPGGMKVIESALSKLAKRHKEHMLLYGADNDQRLTGRHETGHMDTFSSGVANRGASIRIPRQVAKEGYGYFEDRRPASNIDPYLVTGIMVETICGSIPDADMAKEFLRESSDDN

SEQ ID NO: 8611 - protein, 471 aa, Amorpha fruticosa
MAATATDNKLSNLKSAVAGLNQISENEKKGFINLVSRYLSGEAQHVEWSKIQTPTDEVVVPYESLAPTPDGSSEVKSLLDKLVVLKLNGGLGTTMGCTGPKSVIEVRDGLTFLDLIVIQIENLNSKYGSNVPLLLMNSFNTHDDTQKIIEKYKNSNIQIHTFNQSQYPRLVVDDFLPLPSKGHTGKDGWYPPGHGDVFPSLSNSGKLDALLSQGKEYVFVANSDNLGAIVDLKILNHLVKNKNEYCMEVTPKTLADVKGGTLISYEGRVQLLEIAQVPDEHVSEFKSIEKFKIFNTNNLWVNLKAIKRLVEADALKTEIIPNPKEVDGVKVLQLETAAGAAIRFFDKAIGINVPRSRFLPVKATSDLLLVQSDLYTLEDGFVIRNKARANPENPTVELGPEFKKVSNFLSRFKSIPSIVELDSLKVAGDVWFGPGIILKGKVSIVAKPGVKLEIPDGAVIANKEINGPEDL

SEQ ID NO: 8612 - protein, 294 aa, Zea mays
MANRALAPFLLVTTLLVSLLATCHGGGIAVYWGQNDGEASLSETCASGNYKFVILAFVYKFGKGQTPQLDLASHCDPSSGGCTGLSKDIRSCQNSGIKVLLSIGGGDGSYGLSSEGDARDVAAYLWNNYLGGTSSSRPLGDAVLDGIDFDIELGGAKYWDRLARDLKNKGGKAVLLSAAPQCPFPDEWDGGAINTGLFDYVWVQFYNNPPCQVNAGRGAFMDAWKQWESVPAGQIFLGLPASKDAAGTGFVPADDLNSNVLPLIRGSPKYGGVMLWSKYYDDRAGYSDAIKSHV

SEQ ID NO: 8613 - protein, 391 aa, Austrobuxus megacarpus
DLEPVNPADVPVTAAGALKSYKLAAKAISRLQSLPSGNISLLCDVLVKEVSDLTGYDRVMVYRFHEDEHGEVVAECCRPDLEPYLGLHYPATDIPQASRFLFMKNKVRMICDCMALPVEVVQDERLSQPLSLCGSTLRSPHGCHAQYMANMGSVASLVMSVTINEDDDEMDSGQQTGRKLWGLVVCHHTCSRFVPFPLRYACEFLIQVFGVQISKEVELAAQMREKHILRTQTVLCDMLLRDAPVAIISQSPNVMDLVKCDGAALYYRKKFWSLGVTPTEAEIRDIAEWLLECHNGSTGLSTDSLMEAGYPGASILGDAVCGMAAVRITSKDFLFWFRSHTAKEIKWGGAKHDPDDKDDGRKMHPRSSFKAFLEVVKRRSLPWEDVEMDAI

SEQ ID NO: 8614 - protein, 258 aa, Glycine max
MAPPNPPPTSEPSSSAVQKVKSNLVFRSTWPELNGAMGDLGTYIPIVLSLTLASDLNLGTTLIFTGMYNIITGAIYGVPMPVQPMKSIAAVALADPTFSIPEIMASGILTGATLLVLGVTGLMQLVYKLIPLCVVRGIQLAQGLSFALTAVKYVRKVQDLPRSKSLDQRYWFGFDGLVLAIVCVCFIVIVNGAGEDHDHDHGHGHGEESTHQTQARISKVRKIRRVIFALPSAFLVFVWEVVLTFIRRPKVMHENKFG

SEQ ID NO: 8615 - protein, 356 aa, Nicotiana plumbaginifolia
MSLLSDLINLNLSDSTEKIIAEYIWIGGSGMDLRSKARTLSGPVTDPAKLPKWNYDGSSTGQAPGEDSEVILYPQAIFKDPFRRGNNILVMCDAYTPAGEPIPTNKRHAAAKIFSNPDVVAEEPWYGIEQEYTLLQRDINWPLGWPIGGFPGPQGPYYCGTGADKAFGRDIVDSHYKAYLYAGINISGINGEVMPGQWEFQVGPSVGISAGDEVWVARYILERIAEIAGVVVSFDPKPIPGDWNGAGAHTNYSTKSMREDGGYEVILKAIEKLGLKHKEHIAAYGEGNERRLTGKHETANISTFKWGVANRGASVRVGRDTEKAGKGYFEDRRPASNMDPYVVTAMIADTTIIGKS

SEQ ID NO: 8616 - protein, 391 aa, Balanops vieillardii
DLEPVNPADVPVTAAGALKSYKLATKAISRLQSLPSGNISVLCDVLVKEVSDLTGYDRVMVYRFHEDEHGEVVAECRRPDLEPYLGLHYPATDIPQASRFLFMKNKIRMICDCLAPPVKVIQDKRLAQPLSLCGSTMRAPHRCHVQYMANMGSIASLVMSVTINEDDDETESDQQNGRKLWGLVVCHHSSPRFVPFPLRYACEFLIQVFSIQINKEVELAAQMREKHILQTQTVLCDMLLRDAPEAIITQSPNVMDLVKCDGAALYYRKKVWLIGVTPTEAQIRDIAEWLLEYHRESTGLSTDNLVEAGYPGASVLGVAVCGMAAVRITSKDFLFWFRSHTAKEIKWGGAKHDPDDKDDGRKMHPRSSFKAFLEMVKRRSLPWEDVEMDAI

SEQ ID NO: 8617 - protein, 1166 aa, Triticum aestivum
MASGSRATPTRSPSSARPAAPHQNHTQSSGGSTSRAGGGGGGAAGSAAATESVSKAVAQYTLDAGLHAVFEQSGASGRSFDYSQSLLAPPTPSSEQQIAAYLSRIQRGGHIQPFGCTLAVADDSSFRLLAFSENAADLLDLSPHHSVPSLDSSAAPPPVSLGADARLLFSPSSGVLLERAFAAREISLLNPLWIHSRVSSKPFYAILHRIDVGVVIDLEPARTEDPALSIAGAVQSQKLAVRAISRLQALPGGDVKLLCDTVVEHVRELTGYDRVMVYKFHDDEHGEVLAESRRGDLEPYLGLHYPATDIPQASRFLFRQNRVRMIADCHAAAVRVIQDPAMPQPLCLVGSTLRSPHGCHAQYMANMGSIASLVMAVIISSGGEDEHNMTRGVIPSAMKLWGLVVCHHTSPRCIPFPLRYACEFLMQAFGLQLNMELQLAHQLSEKHMLRTQTLLCDMLLRDSPTGIVTQSPSIMDLVKCDGAALFYHGKYYPLGVTPTEAQIKDIIEWLTVCHGDSTGLSTDSLADAGYPGATALGDAVCGMAVAYITPSDYLFWFRSHTAKEIKWGGAKHHPEDKDDGQRMHPRSSFKAFLEVVKSRSLPWENAEMDAIHSLQLILRDSFRDAGEGTSNSKAIVNGQVQLGELELRGIDELSSVAREMVRLIETATVPIFAVDTYGCINGWNAKVAELTGLTVEEAMGKSLVKDLIFKESEEIVEKLLSQALKGEEGTNVEIKLKTFGSEQSKGPIFVIVNACSSRDYTKSIVGVCFVGQDITGQKVVMDKFVNIQGDYKAIVHNPNPLIPPIFASDENICCSEWNTAMEKLTGWSRGEVVGKLLVGEVFGNCCRLKGPDALTKFMIVLHNAIGGQDSEKSPFSFFDKNGKYVQALLTANTRSKMDGETIGAFCFLQIASPELQQAFEIQRQQEKKCYARMKELAYICQEIKNPLSGIRFTNSLLEMTDLKDDQRQFLETSAACEKQMSKIVKDASLQSIEDGSLVLEKGEFSLGNVMNAVVSQVMILLRERDLQLIRDIPDEIKEASAYGDQYRIQQVLSDFLLSMVRFAPTENGWVEIQVRPNVKQNSDGTETMLFLFRFACPGEGLPPDIVQDMFSNARWTTQEGIGLSVCRKILKLMGGEEQYIRESERSFFLIVLELPQPLRSESRDRS

SEQ ID NO: 8618 - protein, 390 aa, Bergia texana
DLEPVNPADVPVTAAGALKSYKLAAKAISRLQSLPSGNISLCDVLVKEVSDLTGYDRVMVYKFHEDEHGEVIAECHRPDLEPYLGLHYPATDIPQASRFLFMKNKVRMICDCMAPPVKVIQDKRLTQPLSLCRSTLRSPHGCHAEYMANMGSIASLVLSVTINDEVDKIEGDKLLGRKLWGLVVCHHASPRFIPFPLRYACEFLIQVFGVQINKEVALAAQTREKHILRTQSVLCDMLLRDAPVAIITQSPNVMDLVKCDGAALYYRKKFWLLGVTPSEAQIRDIADWLLECHSGSTGLSTDSLMEAGFPGASVLGDAVCGMAAVKITSKDFLFWFRSHTAKEIKWGGAKHDPDDKDDGRKMHPRSSLRAFLEVVRWRSLPWEDVEMDAI

SEQ ID NO: 8619 - protein, 238 aa, Oryza sativa Japonica Group; identical to SEQ ID NO: 2074

SEQ ID NO: 8620 - protein, 80 aa, Triticum aestivum
MAAADNTNPKDYYKVLEVEYDATDENIKLNYRRLALKWHPDKHGGDSAVTAKFQEIIEAYNVLSDPAKRLDYDLTGICEI

SEQ ID NO: 8621 - protein, 457 aa, Zea mays
MGAATTSGGGGGGSAGPRSRRSLPETGSTGAVFCHDFLQVEETRELRTVVEAAKQLHLKEHVVLDGSGNPVKLAATVECKGIVGSDDRLERRGLEHPDGCPLCDHEQETTQHLLASCISGTSFFHLLGWDTSLLGNMCRLLLIGGKRSRFLPVKATSDLQLVQSDLYTLVDGFVTRNSARTNPSNPSIELGPEFKKVGSFLGRFKSIPSIVELDNLKVSGDVWFGSGIVLKEKVTITAKPGVKLEIPDGAVMEPNTNNSEGSLAGAAVWDVFRRQDLPKLNDYLAVHREECAARCQAVSSVKYPIYDQTVYLNDYHKKMLKDQYVWVLKLVCLVGSIFLEGLKTIEQITMDSASVETNMFKLCKVRSVQFGQKGIPYLNTYNGRTIRYPDSLIKANDTIKIDLEINKIMDFIKFDVDNVVMVTGGRNTGRVGVIKNREKHKGNFETIHVLLGAFCYV

SEQ ID NO: 8622 - protein, 390 aa, Bergia texana
DLEPVNPADVPVTAAGALKSYKLAAKAISRLQSLPSGNISLCDVLVKEVSDLTGYDRVMVYKFHEDEHGEVIAECHRPDLEPYLGLHYPATDIPQASRFLFMKNKVRMICDCMAPPVKVIQDKRLTQPLSLCGSTLRSPHGCHAEYMANMGSIASLVLSVTINDEDDKIEGDQLLGRKLWGLVVCHHASPRFIPFPLRYACEFLIQVFGVQISKEVALAAQTREKHILRTQSVLCDMLLRDAPVAIITQSPNVMDLVKCDGAALYYRKKFWLLGVTPSEAQIRGIADWLLECHSGSTGLSTDSLMEAGFPGASVLGDAVCGMAAVKITSKDFLFWFRSHTAKEIKWGGAKHDPDDKDDGRKMHPRSSLRAFLEVVKWRSLPWEDVEMDAI

SEQ ID NO: 8623 - protein, 376 aa, Oryza sativa Japonica Group; identical to SEQ ID NO: 2075

SEQ ID NO: 8624 - protein, 226 aa, Helianthus petiolaris
NIHGRGWRSAITSPDPLAFLGCSATTYPSSLTQQKRWFTGLFEILFTDKNPLLLTIEGNIWFRQALAYFYICLWAVRSVPELCYASLPAYCIIKDSHFLPKVNERAILIFMGIFVIYNLYAYWECKRIGVSLRMWWNLQRMGRVNTLTARLFAFVSVMLKLIGLSNTVFEVTQKEHMSNDDDNDNDNVSVGRFTYDNSPMIMPGVVILLINIMALVNGMLRLYKVD

SEQ ID NO: 8625 - protein, 298 aa, Gossypium hirsutum
MERKSQAKPILFFFVLVSALIETSYAGDIAIYWGQNGNEGTLSDTCATGRYKYVNIGFLNTFGNGATPGLNLAGHCNPASNGCTSLSGEIKSCQNQGIKVMLSLGGGAGSYSLASQEDAKSVADYLWNNFLGGTSSSRPLGDAVLDGIDFDIEAGSGQYWDDLARSLSAYSSQGRKVYLTAAPQCPFPDAHLGTAINTGLFDYVWIQFYNNPLAQCQYASGNTKDILNSWNQWTSINAGSISLGLPASPEAAGNGYIPPDVLTSQILPTIKSSAKYGGVMLWSKFFDTGYSAAIINSV

SEQ ID NO: 8626 - protein, 1042 aa, Populus tremula x Populus alba
MAGLVTGSSQTLHAKDELMPPTRQSATSKKCRVCGDEIGVKEDGEVFVACHVCGFPVCRPCYEYERSEGNQSCPQCNTRYKRHKGCPRVPGDNDDEDANFDDFDDEFQIKHHDHDESNQKNVFSHTEIEHYNEQEMHPIRPAFSSAGSVAGKDLEGDKEGYSNAEWQERVEKWKVRQEKRGLVSKDEGGNDQGEEDEYLMAEARQPLWRKIPIPSSRINPYRIVIVLRLIILCFFFRFRILTPASDAYALWLISVICEVWFGLSWILDQFPKWNPIERETYLDRLSMRFEREGEPNRLGPVDVFVSTVDPLKEPPIITANTVLSILSVDYPVDKVSCYVSDDGASMLLFDSLAETAEFARKWVPFCKKHNIEPRAPEFYFTQKIDYLKDKVHPNFVKERRAMKREYEEFKVRINALVSKAQKKPEEGWVMQDGTPWPGNITRDHPGMIQVYLGSEGALDVEGKELPRLVYVSREKRPGYNHHKKAGAMNALILVSAVLTNAPFMLNLDCDHYINNSKAVREAMCFLMDPQLGKKLCYVQFPQRFDGIDRHDRYANRNVVFFDINMKGLDGVQGPVYVGTGCVFNRQSLYGYDPPVSEKRPKMTCDCWPSWCCCCFGGSRKKSKKKGQRSLLGGLYPMKKKMMGKKYTRKASAPVFDLEEIEEGLEGYEELEKSSLMSQKSLEKRFGQSPVFIASTLMENGGVPEGTNSQSHIKEAIHVISCGYEEKTEWGKEVGWIYGSVTEDILTGFKMHCRGWRSVYCSPKRPAFKGSAPINLSDRLHQVLRWALGSIEIFLSHHCPLWYGYGGKLKLLERLAYINTIVYPFTSIPLLAYCTTPAVCLLTGKFIIPTLNNLASIWFPGPFHLNHSNICVGVGWSGVSIQDLGRNEQFWVIGGVSGHLFAVFQGFFKVLGGVDTNFTVTSKSADDAEFGELYLFKWTTLLIPPTTLIILNMVGVVAGVSARINNGYGSWGPLFGKLFFAFWVIVHLYPFLKGLMGKQNRTPTIVVLWSVLLASIFSLIWVRIDPFLPKQTGPILKQCGVEC

SEQ ID NO: 8627 - protein, 391 aa, Calophyllum soulattri
DLEPVNPADVPVTAAGALKSYKLAAKAISKLQSLPSGNISLLCDVLVKEVCELTGYDRVMVYKFHEDDHGEVVAECHRPDLEPYLGLHYPATDIPQASRFLFMKNKVRMICDCLAPPVKVIQDNGLSQALKSRWIYLESSPWLHSQYMANMGSIASLVMSVIINEDGDEMESDQQKGRKLWGLVVCHHTGPRFVPFPLRYACEFLIQVFGIQINKEVELAAQMREKHILETQTVLCDMLLRDAPMAIVTQSPNVMDLVKCDGAALYFKEKFWLLGITPTEAQIRDIAEWLLDYHNGSTGLSTDSLMEAGYPGASILGDAVCGMAAIRINSKDFLFWFRSDTAKEIKWGGAKHDPGDKDESRKMHPRSSFKAFLEVVKWRSLQWEDVEMDAI

SEQ ID NO: 8628 - protein, 226 aa, Helianthus petiolaris
NIHGRGWRSAITSPDPLAFLGCSATTYPSSLTQQKRWFTGLFEILFTDKNPLLLTIEGNIWFRQALAYFYICLWAVRSVPELCYASLPAYCIIKDSHFLPKVNERAILIFMGIFVIYNLYAYWECKRIGVSLRMWWNLQRMGRVNTLTARLFAFVSVMLKLIGLSNTVFEVTQKEHMSNDDDNDNDNVSVGRITYDNSPMIVPGVVILLINITALVNGMLRLYKVD

SEQ ID NO: 8629 - protein, 226 aa, Helianthus petiolaris
NIHGRGWRSAITSPDPLAFLGCSATTYPSSLTQQKRWFTGLFEILFTDKNPLLLTIEGNIWFRQALAYFYICLWAVRSVPELCYASLPAYCIIKDSHFLPKVNERAILIFMGIFVIYNLYAYWECKRIGVSLRMWWNLQRMGRVNTLTARLFAFVSVMLKLIGLSNTVFEVTQKEHMSNDDDNDNDNVSVGRFTYDNSPMIIPGVVILLINIMALVNGMLSLYKVD

SEQ ID NO: 8630 - protein, 450 aa, Picea sitchensis; identical to SEQ ID NO: 4980

SEQ ID NO: 8631 - protein, 895 aa, Coccidioides immitis
MGLTNILAAFIAVSSLFIQSLALNPYAKSNLAVYWGQGAGQNRLSYFCEKTSFDIIVVGFINVFPDQGPAGWPGSNFGNQCADSYYYTKNGTKTKLLDGCYQIKEDLPKCKALGKTILLSLGGGAVHDFYEVKSEESALNFADFLWGAFGPLTPDWTGPRPFGEASVDGFDFDIEKGSNFGYSIMVRRLRELFLQDPLNRYYISAAPQCIMPDKYLSHAISNSAFDFIFIQFYNNPSCSAKRWVTNPKSVTYTVDDWVKYIRKSGNPLAKLFIGLPASKSAAAKEDYLTPGEATKIVSTYMAKYPSTFGGMMVWEATASENNKLGGLPYADIMKEVLLRCDPDPPTSTVTSTISASTSTQTSSQSTTMETKTLSASTTPSSPSTVSPSSTMQTTSTGSTSTGTGTTSSQVTSSTTISTRSASTETVTTRSQEPPSTTISTRPASTETVTTRSQEPPSSTISTRSASTETVTTRSQEPPSSTISTRSASTETSTSSQDSPSTTISTKSAPTGTVTTRSQDLPSTTISTRSPETETETVTTKSQDSPSITLSTRSSSAETVSTRSQHSSSTTISTKSAPTETGTTSEHSTSMPVSTRSASTETVITRSQNSDSQSMTVSTRSPSTESITTRSQGSPSETFSTKSVPVDTISTELPSQTHSTTDSTPVSSSPTIPSGSTTIIPGTASDPVSAPTTTVPPNPTLTLAPSSSTTEDRTTITTIITTSYVTVCPTGFTTVTITYTTTYCPETASLTPTQAPIPGAPAPPPDGWTTIVTVCPQCAPTPTTVTLTVPTRSAFLPAPTETRPVVTVVPVPENPIKNVKPSESGDFVTVTTVAPATVTKTLEYNNPVDSDVNVQPTGGSSPVEFEGGAMTVRSMDVVAKALITAGAAVLGLFLGL

SEQ ID NO: 8632 - protein, 857 aa, Ralstonia metallidurans CH34
MSARRFSLSELFSGARDRVARALGVTRTANAGNWLLRLFFRPPRPGKRDIPAEWAAQVHRRAMTRLGIGKRQGTGTWMWRLFIRPPRPRFRLAADPRKQRSMAEPERDNWLRRWLDRVLEPVWNTTSRLHHQFLSILPRPDWNRVAYSLESLAAQVGRIPFVLPISMVIAAIATVVIGTTPLTFASQMLMFAVVWAILIVVRRIPGRLATITMIAVSMLMAVRYIWWRSTQTLQFATTTEAVIGYLLYAAECYTWLVLALSYLQTAWPLHRKPKPLPADSSLWPTVDVFIPTYNESLAVVQPTVYAARSMDWPPDKLRVYILDDSHRPAMREFAEAAGVGYITRDNNRHAKAGNINQALPRTSGDYIAIFDCDHIPTRSFLQMTMGEFLDDPKCALVQTPHHFFSPDPFERNFDTFRRVPNEGSLFYGLIQDGNDLWNATFFCGSCAVIKRAPLLEIGGIAVETVTEDSHTALKLHRRGYNSAYLRTVQAAGLATESLSSHIGQRIRWARGMAQIFRLDNPLLGKGLTLFQRLCYSNAMLHFFYGIPRLIFLTMPIAYLYFGLHVINTSALMIMAYVLPYLLIANVTNSRLQGRYRHSFWAEVYESVLAWYIVLPTTVAFINPRAGKFNVTAKGGQIADDYLDWTISKPYLVLLALNVAGLVFGVLRLLFWGTDEPATVLMNMGWATFNLIMLGAAVGVAREARQVRVSHRIPMRVPATLLLPDGRTIACKTENYSMGGLGMVLPIDVPLVEGAPVGVCLSRGSRTYHFPAVVTRNINRHLGVRMDDLSVEREAQLIQCTFGRADAWIDWLDDERVDAPLRSFKEVVEMGYQGLLRLYDAFVDAVELVTARRRSRLP

SEQ ID NO: 8633 - protein, 372 aa, Kluyveromyces lactis NRRL Y-1140
MAATSDIVEKTHILQKYLELDQRGAIIAEYVWIDSEGGLRSKGRTLNKKVTSVDSLPEWNFDGSSTGQAPGHDSDIYLKPVAFYPDPFRRGDNIVVLAECWNNDGTPNKFNHRHEAAKLFEAHKDAEMWFGLEQEYTLFDQYDQVYGWPKGGFPAPQGPYYCGVGAGKVFARDVIEAHYRACLYAGVNISGINAEVMPSQWEFQVGPCEGIAMADQLWIARYFLHRVAEEFGVKVSLHPKPLKGDWNGAGCHTNVSTKLMRAPGGMKYIEDAIEKLSKRHNEHIKLYGADNEQRLTGRHETASMSTFSSGVANRGASIRIPRSVNKEGYGYFEDRRPASNIDPYLVTGIMCETVCGAIENANMTKEYERESL

SEQ ID NO: 8634 - protein, 200 aa, Xeroderris stuhlmannii
HEDDHGEVIAEVKKPGLEPYLGLHYPATDIPQATRFLFMKNKVRMIVDCRAKHVNVLQDKKVPFDLTLCGSTLRAPHSCHLQYMENMNCSASLVMAVVVNDNDEDGDSDAVQPQKRKRLWGLVVCHNTTPRFVPFPLRYACEFLAQVFAIHVNKELELEYQIVEKNILRTQTLLCDMLMRDAPLGIVTQRPNIMDLVKCD

SEQ ID NO: 8635 - protein, 117 aa, Glycine max
MDREGGSNGGSCYYSVLGIRRDASFSDIRTAYRKLAMRWHPDKWAQNPATAGEAKRRFQQIQEAYSAVLSDQSKRSMYDAGLYDPLEEEDQDFCDFMQEMISMMNNVKDEGDSLEDL

SEQ ID NO: 8636 - protein, 392 aa, Schizosaccharomyces pombe
MATPVDTEYYDLLGISTDATAVDIKKAYRKLAVKYHPDKNPDDPQGASEKFQKISEAYQVLGDEKLRSQYDQFGKEKAVPEQGFTDAYDFFTNLFGGAPFREWVGELSFVKEMFREEDSAVEQGQMNDKQQLLLESSEPTPTIKQQFNDRKKNAQIREREALAKREQEMIEDRRQRIKEVTENLEKRLDDWIAKATTEEGLNALREKYTQEANTLRIESFGVEILHAIGEVYTQKGRTVLKSSKFGIGGFWSRMKEKGKIARATWDTVSAAMDAKLSIDQMQKLEDKGEDQASAEERAKLELDITGKILRASWCGARYDIQGVLREACSNLLKKRVPTELRLKRAHALLEIGTIFSNVEADPDDPNRIFENLILENKKKRKKGSEAKPPKAT

SEQ ID NO: 8637 - protein, 207 aa, Millettia dura
VMAYKFHEDDHGEVIAEITKPGLEPYLGLHYPATDIPQAARFLFMKNKVRMIVDCHAKHVKVLQDEKIPFDLTLCGSTLRAPHSCHLQYMANMDSIASLVMAVVVNDNEEDGDSSDAVQPQKRKRLWGLVVCHNTTPRFVPFPLRYACEFLAQVFAIHVNKEIELEYQIIEKNILRTQTLLCDMLMRDAPLGIVSQSPNIMDLVKCD

SEQ ID NO: 8638 - protein, 121 aa, Zea mays
MDGASKEPLRKDYYKVLEVDYDASDDTIKLSYRRLALMWHPDKHKGNSNATTKFQEINDAYKVLSDPAKRLEYDVSGCYEIDQYTLREYLTKFKGMILTCNGLGIDHSSKWARHLRELKPH

SEQ ID NO: 8639 - protein, 193 aa, Millettia dura
MAYKFHEDDHGEVVSEIRRSDLEPYLGLHYPATDIPQASRFLFKQNRVRMICDCGAKPVKVIQSEELRQPLCLVNSTLRSPHVCHTQYMANMGSTASLVLAIIVNGNDTTRLWGLLVCHHTSPRYVPFPVRYACEFLMQAFGLQLYMEIQLASQKAEKRMLKTQTLLCDMLLRDAPLGIVTQSPNIMDLVKCD

SEQ ID NO: 8640 - protein, 392 aa, Cespedesia bonplandii
DLEPVNPADVPVTAAVALKSYKLAAKAISGLQSLSSGNISMLCNVLVKEVCDLTGYDRVMVYKFHEDEHGEVIAEYHRPDLEPYIGLHYPATDIPQASRFLFMKNKVRMICDCMAPAVKVVQEKKLAQPLSLGGSTLRAPHGCHSQYMANMGSIASLVMSVMINDDDYNEMESDRQKPRKLWGLVVCHHTSPRLVPFPLRYACEFLIQVFGVQINKEVELTAQMKEKQILQTQTVLCDMLLRDTPVAIVTQSPNVMDLVKCDGAALFYKNKFWLIGITPPEDQIRDIACWLNEYHDGSTGLSTDSLMEAGYHGASILSGAVCGMAAIRVSLKDFLFWFRSQAAKEIKWGGAKHDPNEKDNGRNMHPRSSFNAFLEVVKWRSLPWEDMEMDAI

SEQ ID NO: 8641 - protein, 392 aa, Clusia gundlachii
DLEPVNPADVPVTAAGALKSYKLAGKAISKLQSLPSGNILLLCDVLVKEVRELTSYDRVMMYKFHEDDHGEVIAECRRPDLEPYLGLHYPATDIPQASRFLFMKNKVRMICDCMAPPVNVIQDNGLSQPLSLGGSTLRAPHGCHAQYMANMGSIASLVMAVTINEDDDGDREGDQRKQRRLWGLVVCHHTGPRFVPYPLRYACEFLIQVFGIQINKEVELGAQMREKHILETQTVLCDMLLRDSPVAIVTQSPSVMDLVKCDEAALYYKKKFWLLGITPTETQIRDIAEWLLEYHSGSTGLSTDSLMEAGYADASLLGDAVCGMAAIKINSRDFIFWFRSHTAKEIKWGGAKHDPDDKDEGMKMHPRSSFKAFLEVVKWRSLPWEDIEMDAI

SEQ ID NO: 8642 - protein, 391 aa, Croton alabamensis
DLEPVNPADVPITAAGAMKSYKLAAKAISKLQSLPSGNMSLLHDILVKEISDLTGYDRVMVYKFHEDDHGEVVAECRRNDLEPYLGLHFPATDIPQASRFLFMQNKVRMICDCSAPPVKVIQDKSLAQPLSLCGSILRSPHGCHAQYMGNMGTIASLVMSVTINEDDDEMETDRQKGKKLWGLVVCHHTSPSFVPFPLRYACEFLIQVFGVQIIKEVKLAAQKREKHILQTQPLLCDMLLRDDPVAIVTQTPNIMDLVNCDGAALYYKKKIWLLGAAPSEERVRDIAEWPLEYHSESTGLSTDSLMEAGYPGASILGDATCGMAAIRISSRDFIFWFRSHTAKEIKWGGAKHDPGAKDDVRKMHPRSSFKAFLEVVKWRSLPWEDVEMDAI

SEQ ID NO: 8643 - protein, 395 aa, Staphylococcus epidermidis RP62A
MLDKNQLEKYNQEHLYEYEKLMSSNEKNALDEKVDQLNLAEIQDLYQDLYVNRKTIDDVSSVSEVKYEVKSRLNEEERHTYEQKGYEAIRNGEFAVLLMAGGQGTRLGYKGPKGSFEIEGTSLFELQARQLIRLKEETGHTINWYIMTSDINHKDTIEYFKQHKYFNYDANHIHFFKQDNIVALSEEGKLVLNRDGHIMETPNGNGGVFKSLKKAGYLDKMQQDHVKYIFLNNIDNVLVKVLDPLFAGFTVTQSKDITSKTIQPKDSESVGRLVNVDCKDTVLEYSELDTDIANQFNNANIGIHAFKLGFITSAVDRELPYHLAIKQLKQLDENFGVVERPTLKFELFYFDIFRYGTSFVTLQVPREEEFSPLKNKEGKDSVHTATEDLKRMDLI

SEQ ID NO: 8644 - protein, 396 aa, Denhamia celastroides
  misc_feature (75)..(78): Xaa can be any naturally occurring amino acid
  misc_feature (170)..(173): Xaa can be any naturally occurring amino acid
YLEPVNPADVPITAAGALKSYKPAAKAISRLQSLPSGNMSLLCDVLVKEVNELTGYNRVMVYRFHDDDHGEVVAXXXXELIWNLIQACNYPATDIPQASRFLFMKSKVRMICDCLAPPVRVLQDKRLAQPFSLGGSTLRSPYGCHAQYMANMGSIASLVMSVTINEDDDXXXXETNSDQQKARRLWGLVVCHHTTPRFVPFPLRYACEFLIQVFGVQINKEVELATQLKEKHILQTQTVLCDMLLRDSPVGILIQSPNVMDLVKCDGAALYYRDKFWLLGLTPTETQIKYIAEWLLEYHSESTGFSTDSLMEAGYPNASILSEAVCGMAAVKITSKDFLFWFQSHTAKEMKWGGAKYDPDYKDDGKRMHPRSSFKAFLELVKQHSLPTEDVEMDAI

SEQ ID NO: 8645 - protein, 391 aa, Dichapetalum macrocarpum
DLEPVNPADVPVTAAGALKSYKLAAKAISKLQSLPSGNISLLCDVLVKEVRDLTGYDRVMVYKFHDDEHGEVVSECHRPHLEPYLGLHYPATDIPRASRFLFMKNKVRMICDCLAAPVKVIQDNRLTQPLSLCGSTLRAPHGCHAQYMENMGSIASLVMSVMINEDDDEDRNCQQKGRKLWGLVVCHHTSPRFVPFPLRYACEFLIQVFGIQINKEVELSAQMREKHVLRIQTVLCDMLLRDAPVAIITQSPNVMDLVRCDGAALYYRKKFWLLGITPTEGQISDIAEWLLEYHRESTGLSTDSLMEAGYPGASDLGDAVCGMAAVRIASKDFLFWFRSHTAKEIKWGGAKHDPDVKDDGRKMHPRSSFKAFLEVVKWRSLPWEDIEMDAI

SEQ ID NO: 8646 - protein, 375 aa, Desulfovibrio desulfuricans subsp. desulfuricans str. G20
MSQRDYYEVLGVSRDAADDEIKRAYRKKAMEFHPDRNPDNPEAEAKFKEAAEAYDVLRDAEKRARYDRFGHAGVNGNGYGGGGGFSSTEDIFAHFGDIFGDLFGFAGMGGARGPRPQAGSDLRYNLNISFRQAARGDEVTLRIPKNVTCPDCSGSGAAPGTQPETCPQCGGSGQVVRQQGFFQMAMPCSACRGEGRIVRNPCPRCRGAGQVQDIRELSVRIPAGVDTGNRLRLRGEGEPGVHGGPPGDLYVVIRVDDDKTFRRQGQDLVVRKEISFVQAILGDKVEVPTLDDPVTVDIPRGTQSGEVFRIAGKGLPHLGSSQTGALLVEVTVRIPSSVNDEQEKLLREFERLEENRPLRKVKNMFKKAGKAMGMD

SEQ ID NO: 8647 - protein, 377 aa, Pereskia zinniiflora
TDVPAAAAGAFKSYKLAAKAISRLQSLPSRNMSLLCDVLVKEVSELTGYDRVMVYRFHEDEHGEVISEYCRPDLGPYLGLHYPATDIPQASRFLFLKNRVRMIFDCLATPVKVIQYKKLTQPLSLGGSILRAPHGCHAQYMANMGSIASLVMAVTVNEDEDEVRSDPSTGKRLWGLVVCHHTSSRFIPFPLRYACELLVQVFGIQINKEVELAAQIRESHILRIQTVLCDMLLRDSPVAIVTQSPNVMDLVKCDGAALYYKGQVWLLGTTPTEEQIKNITQWLVEYHGSTKGLSTDSLMEAGYPGASELGDAVCGMAAVRISSKDVLFWFRSHTAKEIKWGGAKHDPVDSDERRKMHPRSSFKAFLEVVKWRSQPWE

SEQ ID NO: 8648 - protein, 423 aa, Penicillium janthinellum; identical to SEQ ID NO: 5009

SEQ ID NO: 8649 - protein, 377 aa, Pereskia guamacho
TDVPVAAAGAFKSYKLAAKAISRLQSLPSRNMSLLCDVLVKEVSELTGYDRVMVYRFHEDEHGEVISEYRRPDLGPYLGLHYPATDIPQASRFLFLKNRVRMIYDCLAIPVKVIQYKKLTQPLSLGGSILRAPHGCHAQYMANMGSIASLVMAVTINEDEDEVKSDPSTGKRLWGLVVCHHTSSRFIPFPLRYACELLVQVFGIQINKEVELAAQIRESHILRIQTVLCDMLLRDSPVAIVTQSPNVMDLVKCDGAALYYKGQVWLLGVTPTEEQIKNITQWLLEYHGNTKGLSTDSLMEAGYPGASELGDAVCGTAAVRISSKDILFWFRSHTAKEIKWGGAKHDPVDSDDRRKMHPRSSFKAFLEVVKWRSQPWE

SEQ ID NO: 8650 - protein, 322 aa, Zea mays
MWRQGEKEAAAAAAAAPSARFLPPPPASPLRVRAPPGVASLHLWAAGTYVRGEPHASLSPLGMDAGGEKCGDAAAEGGDLYAVLGLKKECSEAELKVAYRKLAKKWHPDKCSSSSSVKHMEEAKEKFQEIQGAYSVLSDANKRLLYDVGVYDDEDDEESMQGMGDFIGEMAQMMSQAQPTRQESFEELQQLFVDMFQSDIDSGFCNRTAKAHQFQGPAKSRTCSTSPSSSPSPPPTTAKDAEVPSCNGFNKRGSSALDSGKPPKPVEGGAGQNQAGFCFGVSDTKETPKLPGQNPSRGGNGRKQKLSSKPDVSSEDETAAGS

SEQ ID NO: 8651 - protein, 204 aa, Candida glabrata
IRSFNQSRFPRVYKDSMLPVPETYNDPKDAWYPPGHGDLFESLHASGELDALIAQGREILFVSNGDNLGATVDLKILNHMIETGAEYIMELTDKTRADVKGGTLISYDGQVRLLEVAQVPKEHIDEFKNIRKFTNFNTNNLWINLKAVKRLVESSALEMEIIPNQKTITRGGQEINVLQLETACGAAIRHFSGAHGVVVPRSRF

SEQ ID NO: 8652 - protein, 224 aa, Zea mays
MQERRRRYSENEKSGFISLVSRYLSGEAEQIEWSKIQTPTDEVVVPYDTVASPPEDLEETKKLLDKLVVLKLNGGLGTTMGCTGPNGAFNVYGLEEYGILKLYLSSAHTVVPFHYIAVPIGLDLLPFFENEWIDEWLSVIEVRNGFTFLDLIVIQIESLNKKYGCNVPLLLMNSVNTHDDTQKIVEKYSNSNIEIHTFNQSQYPRIVTEDFLPLPSKGKSGKDG

SEQ ID NO: 8653 - protein, 465 aa, Akebia quinata
SGKPFYAIVHRVTGSLIIDFEPVKPYEVPMNAAGALQSYKLAAKAIARLQSLPNASMDRLCDTVVQEVFELTGYDRVMAYKFHDDDHGEVVSEITKPGLEPYLGLHYPATDIPQAARFLFMKNKIRMICDCNATHVKVFQDEKLPLDLTLCGSTLRAPHSCHSQYMENMGSIASLGMAVVINEGDEEDNGSGSAQPQRRKRLWGLVVCHNTTPRFVPFPLRYACEFLIQVFAIHINKELELGNQVLEKSVLRTQTLLCDMLMRNAPLGIVSQSPNIMDLVKCDGATLLYKNKIWRLGLSPSEFHIRDIASWLYEYHMDSTGLSTDSLHDAGFPGALSLGDGICGMAAVRITSKDMIFWFRSHTAAEVRWGGAKHDPCEEDDGRKMHPRSSFKAFLEVAKTRSLAWKDYEMDAIHSLQLILRNAFKDGDTADLNPSVIHSRLDNLKIEGMEELEAVTNEMVRLMET

SEQ ID NO: 8654 - protein, 191 aa, Millettia richardiana
YKFHEDDHGEVVSEIRRSDLEPYLGLHYPATDIPQASRFLFKQNRVRMICDCHAKPVKVIQSEELRQPLCLVNSTLRSPHVCHTQYMANMGSIASLVMAIIVNGNDKTRLWGLLVCHHTSPRYVPFPVRYACEFLMQAFGLQLYMEIQLASQMAEKRMLKTQTLLCDMLLRDAPLGIVTQSPNIMDLVKCD

SEQ ID NO: 8655 - protein, 167 aa, Glycine max
  misc_feature (107)..(107): Xaa can be any naturally occurring amino acid
  misc_feature (117)..(117): Xaa can be any naturally occurring amino acid
MDREGGSNGGSCYYSVLGIRRDASFSDIRTAYRKLAMRWHPDKWAQNPATAGEAKRRFQQIQEAYSAVLSDQSKRSMYDAGLYDPLEEEDQQDFCDFMQEMISMMNXNVKDEGDSLXDLQRMMFVDMVGGDHGHGIGVDLNQDRTAGKRGRVYGSKGNAPKRSNSRS

SEQ ID NO: 8656 - protein, 392 aa, Akebia quinata
DLEPVNPAEDPVTAAGALKSYKLAAKAISRLQSLPSGDISLLCDVLVHEVSDMTGYDRVMVYKFHEDEHGEAVAECLRSDLEPYLGLHYPATDIPQASRFLFLKNKVRMICDCSARSVEIVQDKRLTQPLSLGGSTLRAPHGCHAQYMENMGSVASLVMSVTINEDDDEMETNQQKGRKLWGLVVCHHSSPRFVPFPLRYACEFLIQVFGIQLNKEVELAAQLREKHILRIQTVLCDMLLRDAPVGIFTQSPNVMDLVKCDGAALYYKNKLWLLGVTPTEAQIREIAAWILEYHDRSTGLSTDSLMEAGYPGASVLGDAVCGMAAINITSKDFIFWFRSHTAKEIKWGGAKHDTVDKDDGRKMHPRSSFKAFLEVVQWRSLPWEDMEMVAIQ

SEQ ID NO: 8657 - protein, 466 aa, Aristolochia grandiflora
SGKPVYAIIHRVTGSLIIDFEPVKPYEAPMTAAGALQSYKLAAKAISRLQSLPSGSMERLVDTVVQEVYELTGYDRVMAYKFHDDDHGEVISEVTKPDLEPYLGLHYPATDIPQAARFLFMKNKVRMICDCYAKPVKVFQDEKLSFDLTLCGSTLRAPHSCHLQHMKNMSSIASLVMAVVVNEGEEDDNPDPNQQQQVPKRKRLWGLVVCHNTTPRFVPFPLRYACEFFMQVFAIHVNNEIELENQIREKNILRTQTLLCDMLLRDSPLSIVTRSPNIMDLVKCDGAALMYQNKVYTLGLSPTESQISEINRWLLEYHMDSTGLSTDSLHDAGYPNAPSLGDIVCGMAAVRITSTDMLFWFRSHTAGEVRWGGAKHDPSDKDDGRRMHPRSSFKAFLEVVKNRSLPWKDYEMDAIHSLQLILRGSTKETAAIDTKTVISSQLNNLKLDGLHELQAVTNEMVRLMET

SEQ ID NO: 8658 - protein, 201 aa, Millettia richardiana
FPEDDHGEVIAEITKPGLEPYLGLHYPATDIPQAARFLFMKNKVRMIVDCRAKHVNVLQDKKVPFDLTLCGSTLRAPHSCHLQYMENMNCSASLVMAVVVNDNDEDGDSDAVQPQKRKRLWGLVVCHNTTPRFVPFPLRYACEFLAQVFAIHVNKELELEYQIVEKNILRTQTLLCDMLMRDAPLGIVTQRPNIMDLVKCD

SEQ ID NO: 8659 - protein, 392 aa, Aristolochia grandiflora
DLEPVNLADAQVSASGALKSYKLAAKAISRLQSLPSGNIVLLCDVLVREVRDLTGYDRVMAYKFHEDEHGEVIAECKRPDLEPYLGLHYPATDIPQASRFLFMKNKVRMIYDCSATPVSVIQDKGLAQPLCLGGSTLRAPHGCHSQYMANMGSIASLVMSVTINEDDDEKGSGQRGRKLWGLVVCHHCSPRFIPFPFRYACDFLMQVFGIQINKEVELAAQVREKHILRTQTLLCDMLLRDAPMGIVNKSPNVMDLVKCDGAALYYQNKFWLLGTTPTEAQIRDLAQWLLQYHNNTTGLSTDSLVEAGYPGAQDLGDAVCGMAAVKITSRDFLFWFRSHAGKEIKWGGAKHDPKEHDGDGKKLHPRSSFNAFLEVVKWRSTPWEDVEMDAIQ

SEQ ID NO: 8660 - protein, 853 aa, Zea mays; identical to SEQ ID NO: 2105

SEQ ID NO: 8661 - protein, 431 aa, Beta vulgaris
MAQILAPNMQCQMKLSKSLTNSMIPNSWTSILLKGSQKGSIKCSTKFKVCAALKTEHGTVNRMEQLLNLDVTPFTDKIIAEYIWIGGSGIDLRSKSRTLSRPVEDPSELPKWNYDGSSTGQAPGEDSEVILYPQAIFKDPFRGGNNILVICDAYTPAGEPIPTNKRHKAAEIFSNPKVASEVPWFGIEQEYTLLQPNVQWPLGWPVGAYPGPQGPYYCGVGADKSFGRDISDAHYKACLYAGINISGTNGEVMPGQWEFQVGPSVGIEAGDHIWCARYLLERITEQAGVVLTLDPKPIEGDWNGAGCHTNYSTKTMREDGGFEVIKKAILNLSLRHKEHISAYGEGNERRLTGKHETADIDTFSWGVANRGCSIRVGRDTEKEGKGYMEDRRPASNMDPYVVTGLLAESTLLWEPTLEAEALAAQRLSLNV

SEQ ID NO: 8662 - protein, 554 aa, Asparagus falcatus
PYEVPMTAAGALQSYKLAAKAISRLESLPGGSMEKLCNAVVEEVFELTGYDRAMAYRFHEDDHGEVFSEVTKPGLEPYLGLHYPATDIPQAARFLFMKSKVRMICDCRAKPVRVLQDEKLPFDITFCGSTLRAPHSCHLQYMENMNSIASLVMAVVVNEGGEDEGEGEAGQASSPAQQQQGLRRKRLWGLVVCHNESPRFVPFPLRYACQFLMQVFAIHVNKEFELEHQIREKNILRTQTLLCDILLREAGPLGIVTARSPNVTDLVRCDGAALLYEDKIWRLGRTPTDSEIRDIAYWLVEYHADSTGLSTDSLLEAGYPGAFALGDLVCGLAAARINSRDILFWFRSHTAAEVRWGGAKHDPSDEDDGRRMHPRSSFKAFLEVVKTRSLPWSDYEMDAIHSLQLILRGSFNDVKKSEGLDSRMRSLRVEGMEELQAVTNEMVRLIETATVPILAVDVDGVINGWNLKIAELTGLPVDEAIGKHLLALVEDSSVAQVRRMLLLALQGTEEQNVEFQMKTCGDRGDDGPVILVVNACASRDLNEKVVGVCFVAIT

SEQ ID NO: 8663 - protein, 391 aa, Dillenia philippinensis
DLEPVNPTDVPVTAAGALKSYKLAAKAISRLQSLPSGNMSLLCDALVQEVSDLTGYDRVMVYKFHEDDHGEVVAECRRPDLEPYLGLHYPATDIPQASRFLFMKNKIRMICDCLAPPVQVIQDKCLAQPLSLCGSTLRSPHGLHAQYMANMGSIASLVMSVTINEDDDEVESDKQKGRKLWGLVVCHHTSPKVVPFPLRYACEFLIQVFGVQVNKEVELAAQLKEKHILKTQTVLCDMLLRDAPVGIVTQSPNVMDLVKCDGAALYYRNKFWLLGITPTEAQIRELAGWLLDCHNGSTGLSTDSLMEAGYPGASILGDALCGMAAIKITSKDFLFWFRSHTAKEIKWGGAKHDPVDKDDGKKMHPRSSFKAFLDVVKRRSFPWEDVEMDAI

SEQ ID NO: 8664 - protein, 391 aa, Dissiliaria muelleri
DLEPVNPADVPVTAAGALKSYKLAAKAISRLQSLPSGNISLLCDVLVKEVSDLTGYDRVMVYRFHEDEHGEVVAECRQPDLEPYLGLHYPATDIPQSSRFLFMKNKVRMICDCMAPPVEVVQDERLSQPLSLCGSTLRSPHGCHAQYMANMGSVASLVMSVTINEDDDEMDGDQQTGRKLWGLVVCHHTCPRFVPFPLRYACEFLVQVFGVQINKEVELAAQMREKHILRTQTVLCDMLLRDAPVGIITQSPNVMDLVKCDGAALYYRKKFWLLGVTPTEAEIRDIAEWLLECHSGSTGLSTDSLMEAGYPGASILGDAVCGMAAVRITSKDFLFWFRSHTAKEIKWGGAKHDPGDKDDGRKMHPRSSFKAFLEVVKRRSLPWEDVEMDAI

SEQ ID NO: 8665 - protein, 364 aa, Aquifex aeolicus VF5
MSQAVKDYYEILGVNRDATKEEIKKAYRKLVRIYHPDINPDPSAQEKFKEINEAYHVLIDDERRSEYDAILSRNDVGKFRDFLEYIQEFVESIIQGEKGKKRRPRKGQDIKMKLPLTLEEAGLGCEKEIIYSRWMDCPVCEGMGVKGEAETVVCHACNGEGRRVSGIFNFPRPCSVCKGKGFIVKNPCPTCYGRGRVSAQHKIKVHIPPGTEEGEVLKVPEKGHLGYFGGKPGDLYLKVVLKEHPIFKKVGKDLHMEKVVSFPLAVLGGTVKVPTLEGEEIDVFIQPGTECGATKVVKEKGYPYENGRGDLIIHIRIGVPKNLSKSERKLLEKLAESIKEEGEEVYREGGSLVEKLSSLFKKNA

SEQ ID NO: 8666 - protein, 353 aa, Lupinus luteus
MSVLSDLINLNLSDTTEKIIAEYIWVGGSGVDLRSKARTLSGPVNDPSKLPKWNYDGSSTGQAPGKDSEVILWPQAIFKDPFRRGNNILVMCDTYTPAGEPIPTNKRHAAAKIFSHPDVVAEEPWFGIEQEYTLLQKDIHWPIGWPLGGFPGPQGPYYCGTGAEKAFGRDIVDSHYKACLYAGINISGINAEVMPGQWEFQVGPSVGISAGDELWVARYILERITEIAGVVLSLDPKPIPGDWNGAGAHTNYSTKSMRNDGGYEVIKKAIEKLGKRHNEHIAAYGEGNERRLTGRHETADISTFFWGVANRGASIRVGRDTEKEGKGYFEDRRPASNMDPYVVTSMIAETTLL

SEQ ID NO: 8667 - protein, 391 aa, Dovyalis rhamnoides
DLEPVNPADVPVTAAGALKSYKLAAKAISRLQSLPSGNISLLCDVLVKEVSALTGYDRVMAYKFHEDQHGEVVAECCRPDLEPYLGLHYPATDIPQASRFLFMKNKVRMICDCLAPPVKVVEHKRLAQPLNLCGSTLRSPHGCHVQYMENMGSIASLVMSVTINEDDDEMDSDQQKGRKLWGLVVCHHTSPRFVPFPLRYACEFLLQVFGVQINKEVELAAQMREKHILETQTVLCDMLLRDAPAAIITQSPNVMDLVKCGGAALYFRKKFWLLGVTPTEAQIRDLSEWLLQYHSESTGLSTDSLLEAGYPGASALGDAVCGMAAIKISSKDFLFWFRSYTAKEIKWGGAKHDPDDKDDGRKMHPRSSFKAFLEVVKRRSLPWEDVEMDAI

SEQ ID NO: 8668 - protein, 357 aa, Pinus sylvestris
MSSVLTDLLNLDLSDVTEKVIAEYIWIGGSGMDMRSKARSLSGPVSSVKELPKWNYDGSSTGQAQGHDSEVILYPQAIFRDPFRRGKHILVICDAYSPNGTAIPSNKRAAAAKIFNEKAVSDEETWYGLEQEYTLLQKDVKWPLGWPIGGYPGPQGPYYCGVGADKAWGRDIVDAHYKACLYSGINISGINGEVMPGQWEFQVGPSVGISAADELWCARFIMERITEKAGVVLSFDPKPIEGDWNGAGCHTNYSTKSMRKEGGFEVIKKAIEKLKLRHKEHISAYGEGNERRLTGRHETADMNTFSWGVANRGASVRVGRDTEKEGKGYFEDRRPASNMDPYIVTSMIAETTILWKP

SEQ ID NO: 8669 - protein, 391 aa, Drypetes roxburghii
DLEPVNPSDVPVTAAGALKSYKLASKAISRLQSLPVANISLLCDVLVKEVRDLTGYDRVMVYRFHKDEHGEVVAECCRPDLEPYLGLHYPATDIPQASRFLFVKNKVRMICDCMAPAVKVIQDKRVARPLSLCGSTLRAPHGCHTQYMVNMGSIASLVMSVTINEDDDEMDSDQEQGRRLWGLVVCHHTSHRFVPFPLRYACEFLIQVFGVQIDKEVELARQMRKNIFCKLKLVLCDMLLRDAPMAIITQSPNVMDLVNCDGAALYYRKKIWLLGVTPTEAQIRDITEWLLEYPSGSTGLTTDSLMEAGYPGASILGGSVCGMAAIRITSNDFLFWFRSHTAKEIKWGGAKHDPGDKDDGRQMHPRSSFKAFLGVVKWRSLPWEDIEMDAI

SEQ ID NO: 8670 - protein, 342 aa, Nicotiana tabacum
MGVDYYKVLGVDKNATDDDLKKAYRKLAMKWHPDKNPNNKKAAEAKFKQISEAYDVLSDSQKRAVYDQYGEDGLKGGVPPPGAGGPGGGSPFFSTGEGPQSFRFNTRSADDIFAEFFGFSSPFGGAGGRGPRFGGMFGDDMFASFGEGGGGGGASMYQSAPRKEAPIQQNLPCNLEDLYKGTTKKMKISREVADASGKRMQVEEILTINIKPGWKKGTKITFQEKGNEQPGVIPADLVFIIDEKPHRVFSRDGNDLIVTQKISLVEALTGTTVQLTTLDGRNLTIPVNSVIQPNYEHVVPGEGMPLPKDPTKKGNLRIKFDIKFPVRLTTTQKAGIKELLGS

SEQ ID NO: 8671 - protein, 348 aa, Schizophyllum commune
TSNDLLQPFLALDQGDKVQAEYVWIDGDGGLRSKTTTVSKKVTDIGQLRIWDFDGSSTNQAPGNDSDVYLRPAAIFKDPFRGGDNILLLAECYNNDGTPNRTNHRHNAKKTMDLAKDEHPWFGIEQEYTLFGEDGRPYGWPKGGFPGPQGPYYCGAGAGKVFARDLIEAHYRCCLYAGINISGINAEVMPSQWEFQVGPCEGITMGDHLWMARYLLIRVAEQWGITVSFHPKPLAGDWNGAGGHTNYSTEGMRNPGGIQAISAAIEKLAKKHNEHIAVYGEDNDLRLTGRHETGHIGSFSSGVANRGASIRIPRNVAAQGFGYLEDRRPASNIDPYRVTDMIVQTTCL

SEQ ID NO: 8672 - protein, 392 aa, Elaeodendron orientale
DLEPVNPADVPITAAGALKSYKLAAKAISRLQSLPSGNISLLCDVLVKEVNELMGYDRVMVYRFHDDDHGEVVAEYCRPDLEPYLGLHYPATDIPQASRFLFMKNKVRMICDCLAPPVKVLQDKILAQPLSLSGSSLRSPHGCHAQYMANMGSIASLVMSVTINDDDDDETNNDQQKGRKLWGLVVCHHTTPRFVPFPLRYACEFLIQVFGVQINKEVELATQLKEKHILRTQTVLCDMILRDAPVGILTQSPNVMDLVKCDGAALYYRNKVWLLGVTPTETQIKEIVEWLLEYHSESTGLSTDSLMEAGYPDASILGEAVCGMAAVKITSKDFLFWFRSHTAKEMKWGGAKHDPDDKDDGKRMHPRSSFKAFLEVVKIRSLPWEDVEMDNH

SEQ ID NO: 8673 - protein, 377 aa, Echinocactus platyacanthus
TDVPAAAAGAFKSYKLAAKAISRLQSLPSRNMALLCDVLVKEMSELTGYDRVMVYKFHEDEHGEVISEYRRPDMEPYLGLHYPATDIPQASRFLFLKNRVRMICDCLATPVKVIQGKKWAQPLSLGGSILRAPHGCHALYMANMGSIASLVMAVTINEDEDEVKSDPSTGKRLWGLVVCHHTSSRFIPFPLRYACELLLQVFGIQINKEVELAAQIRESHILRIQTVLCDMLLRDSPVAIVTQSPNVMDLVKCDGAALHYKGQVWLLGITPTEEQIKNITQWLLKYHGSTKGLSTDSLMEAGYPGASELGDAVCGMAAVRISSKDVLFWFRSHTAKVIKWGGAKHDPVDSDDGRKMHPRSSFKAFLEVVKWRSQPWE

SEQ ID NO: 8674 - protein, 159 aa, Physcomitrella patens subsp. patens
SRKPRGRPPGSKNKPKPPVIITRENGNAMRPHILEVASGHDVWESVADFARRRQRGICVMGGSGTVTNVTLRQSTTPGATVTIHGRFEIISLSGSYLPPPSPTPPAGLTTGLTISFAGASGQVLGGCVVGALMAASPVLVVATSFTGATYDRLPLAEDE

SEQ ID NO: 8675 - protein, 132 aa, Oryza sativa
MWWEWEEDGEEAARPGEEVPVDFDFISLLCKPKDYYKILEVGYDASEEAIRSSYIRLALKWHPDKKQGEENATSRFQEINEAYQVLSNPAKRREYDKKGILYVQDHNVVDYLNRHKGLILTCNGLGIRHSVW

SEQ ID NO: 8676 - protein, 323 aa, Arabidopsis thaliana
MGVDYYKVLQVDRNAKDDDLKKAYRKLAMKWHPDKNPNNKKDAEAKFKQISEAYDVLSDPQKRAIYDQYGEEGLTSQAPPPGAGGGFSDGGASFRFNGRSADDIFSEFFGFTRPFGDSRGAGPSNGFRFAEDVFSSNVVPPRKAAPIERQLPCSLEDLYKGVSKKMKISRDVLDSSGRPTTVEEILTIEIKPGWKKGTKITFPEKGNEQRGIIPSDLVFIVDEKPHAVFKRDGNDLVMTQKIPLVEALTGYTAQVSTLDGRSVTVPINNVISPSYEEVVKGEGMPIPKDPSKKGNLRIKFTVKFPSRLTTEQKSGIKRMFSSS

SEQ ID NO: 8677 - protein, 376 aa, Escherichia coli O157:H7 EDL933
MAKQDYYEILGVSKTAEEREIKKAYKRLAMKYHPDRNQGDKEAEAKFKEIKEAYEVLTDSQKRAAYDQYGHAAFEQGGMGGGGFGGGADFSDIFGDVFGDIFGGGRGRQRAARGADLRYNMELTLEEAVRGVTKEIRIPTLEECDVCHGSGAKPGTQPQTCPTCHGSGQVQMRQGFFAVQQTCPHCQGRGTLIKDPCNKCHGHGRVERSKTLSVKIPAGVDTGDRIRLAGEGEAGEHGAPAGDLYVQVQVKQHPIFEREGNNLYCEVPINFAMAALGGEIEVPTLDGRVKLKVPGETQTGKLFRMRGKGVKSVRGGAQGDLLCRVVVETPVGLNEKQKQLLQELQESFGGPTGEHNSPRSKSFFDGVKKFFDDLTR

SEQ ID NO: 8678 - protein, 377 aa, Pereskia stenantha
TDVPAAAAGAFKSYKLAAKAISRLQSLPSRNMSLLCDVLVKEVSELTGYDRVMVYKFHEDEHGEVISEYRRPDLEPYLGLHYPATDIPQASRFLFLKNRVRMICDRLATPVKVIQDKKLAQPLSLGGSILRAPHGCHAQYMANMGSIASLVMAVTINEDEDEVKSDPSTGKRLWGLVVCHHTSSRFIPFPLRYACELLVQVFGIQINKEVELAAQIRESHILRIQTVLCDMLLRDSPVAIVTQSPNVMDLVKCDGTALYYKGQVWLLGITPTEEQIKNITRWLLEYHGSTKGLSTDSLMEAGYPGASELGDAVCGMAAVRISSKDVLFWFRSHTAKEIKWGGAKHDPVDSDDGRKMHPRSSFKAFLEVVKWRSQPWE

SEQ ID NO: 8679 - protein, 162 aa, Vitis vinifera
MKPTINLTFSLLIFLRRWFSSFRLKTTLSVELGGSVGDLGTYIPIVLTLTLVNHLDLSTTLIFTALYNISISFLFSIPMPLQPMKSIVVVAISDPLLSLPQIVVASLSTAATLFIFGATSLMSLLYLFIPLPVVRSVQLSQAWCFALFETLQLLESYLEKSV

SEQ ID NO: 8680 - protein, 547 aa, Cryptococcus neoformans var. neoformans JEC21
MPPRITSRALSTLSTAQSSAGSSSTLPPSTFSLRQHKRSPSSHSFTFRHFGPLLAHPRNPSTASLGWRRSFHSSTVHPASAKDPYNVLGVNKDASSSDIKKAYYSLAKKWHPDSSKEKDAKEKFHEIQAAYDILSDDKKRQAYDRYGSASTQEGFDPNFAHGAGGFGGFQGFGPGFGDGASDLFESLFGGAFGGGSSAFGGRQRPVRGDDLEVGVNLSFLEACNGVTRKVTVTPVIDCKTCTGSGLKPGEKKSQCPACRGSGQRTFQVQGMVMASTCQTCGGTGSTIPKNARCGECDGVGKVKEKKVLDVEIPAGVEDGMMIRVPGAGDKPLSASGPAGDLLVRVLVKPSSVFRRQGVNLYHDAKVPLHIALLGGVIRIPTLEGDVDVKVKNGTQNGEEAVLKGRGVKSVYGGRRNDRGDLIVGWKVQIPRSLTPFQRKILQAYADDIEGRNPQVHFGPLPSDPPVTNPSSPPKEPTNGEGSYPSYRSQNQPQAEHAPHRPSRPPAEPYKPYNPLSSSEEPISLANKIASAIGGAIGWVERFMRGRR

SEQ ID NO: 8681 - protein, 503 aa, Cryptococcus neoformans var. neoformans JEC21
MPPRITSRALSTLSTAQSSAGSSSTLPPSTFSLRQHKRSPSSHSFTFRHFGPLLAHPRNPSTASLGWRRSFHSSTVHPASAKDPYNVLGVNKDASSSDIKKAYYSLAKKWHPDSSKEKDAKEKFHEIQAAYDILSDDKKRQAYDRYGSASTQEGFDPNFAHGAGGFGGFQGFGPGFGDGASDLFESLFGGAFGGGSSAFGGRQRPVRGDDLEVGVNLSFLEACNGVTRKVTVTPVIDCKTCTGSGLKPGEKKSQCPACRGSGQRTFQVQGMVMASTCQTCGGTGSTIPKNARCGECDGVGKVKEKKVLDVEIPAGVEDGMMIRVPGAGDKPLSASGPAGDLLVRVLVKPSSVFRRQGVNLYHDAKVPLHIALLGGVIRIPTLEGDVDVKVKNGTQNGEEAVLKGRGVKSVYGGRRNDRGDLIVGWKVQIPRSLTPFQRKILQAYADDIEGRNPQVHFGPLPSDPPVTNPSSPPKEPTNGETKKEIGEEGRQTKSEEDEVGGKI

SEQ ID NO: 8682 - protein, 364 aa, Yarrowia lipolytica CLIB122
MVLSKYLDLPQHGAVLAEYIWIDAHFNIRSKCKTLDKKPTSIEDLPEWNFDGSSTDQAPGHDSDIYLRPAAIYPDPFRRGDNIIVLAECWNNDGTPNKFNHRHECAKLMSAHEKEVIWFGIEQEYTMFDESDNPVGWPKGGFPAPQGPYYCGVGTGKVFARDVVEAHYRACLYSGINISGINAEVMPSQWEYQVGPCEGISMADELWMSRYLLHRVAEEFGIKISFHPKPLQGDWNGAGCHTNVSTKSMREPGGMKHIEAAIEKLAARHKEHIAVYGEDNDMRLTGRHETGSIGSFSSGVANRGCSIRIPRSVAKEGYGYFEDRRPASNIDPYLVTGIMTETICGSIPDADMVEETKRGEEEGF

SEQ ID NO: 8683 - protein, 376 aa, Shigella flexneri 2a str. 301
MAKQDYYEILGVSKTAEEREIRKAYKRLAMKYHPDRNQGDKEAEAKFKEIKEAYEVLTDSQKRAAYDQYGHAAFEQGGMGGGGFGGGADFSDIFGDVFGDIFGGGRGRQRAARGADLRYNMELTLEEAVRGVTKEIRIPTLEECDVCHGSGAKPGTQPQTCPTCHGSGQVQMRQGFFAVQQTCPHCQGRGTLIKDPCNKCHGHGRVERSKTLSVKIPAGVDTGDRIRLAGEGEAGEHGAPAGDLYVQVQVKQHPIFEREGNNLYCEVPINFAMAALGGEIEVPTLDGRVKLKVPGETQTGKLFRMRGKGVKSVRGGAQGDLLCRVVVETQIGLDEKDKQLLHELHESYGGPTGEHNSPRSKSFFDGVKKFFDDLTR

SEQ ID NO: 8684 - protein, 92 aa, Oxalis spiralis
GINISGTNGEVMPGQWEYQVGPSVGIEAGDHIWASRYILERITEQAGVVLTLDPKPIDGDWNGAGCHTNYSTKSMRDEGGFEVIKKAILNLS

SEQ ID NO: 8685 - protein, 441 aa, Zea mays
MAGSRFGSFKSEKGDSASAAAAAGGAAQRRDPYEVLGVGRTATDQEIKSAFRRMALKYHPDKNGDDPVASDRFQEVTFSYNILSDPDKRRQYDTSGFDAIESDSQELELDLSSLNTVNTVFAALFSKLGVPIKTTVSATVLEEALNGSVMVSQLQLGNSVQRKVEKQSAHFYSVDITEKQAKMGLVCRVHSNDKSKFKLLYFELEENGGLSLALQEDSVKVGKVTAAGMYFLGFPVYRFEQNNLAAAAKDSDGAFFKRLDSFQPCDIHELKPGTHFFAVYGDNFFKSASYTIEVVCGESFPAEKEMLRNVEAKILTKRAELSKFESEYREVLAKFTEMTSKYTQEMQAIDGLLKERNEIHASYTNNPPLKRSSSRNKAKSPSKVAKTGTEKHHQKEKKVKDHCMEGCGSDSDNSSEKKSKERFPRKKWLNLPFKLDRRKTC

SEQ ID NO: 8686 - protein, 140 aa, Cucumis sativus
FNTHDDTQKIIEKYKGSNVDIHTFNQSQYPRLVVDDYLPLPSKGRTDKDGWYPPGHGDVFPSLKNSGKLDALIAQGKEYVSVANSDNLGAVVDLQILNHLIRNKNEYCMEVTPKTLADVKGGTLISYEGKVQLLEIAQVP

SEQ ID NO: 8687 - protein, 164 aa, Glycine max
MEHKETGCQSREGPILCVNNCGFFGSAATMNMCSKCHKEMAMKQEQAKLAASSFDSIVNGGDAAKEHLAAGSTAVAVAHVEAKTLITAQPADIAGPSEAAMENPKGPSRCSTCRKRVGLTGFNCRCGNLYCATHRSRDSPKCSLTTAPGPGRLPKANPVVRGKT

SEQ ID NO: 8688 - protein, 444 aa, Asparagus falcatus
  misc_feature (59)..(59): Xaa can be any naturally occurring amino acid
DLEPVNPADVPVTAAGALKSYKLAAKAISRLQSLPSGNISLLCDVLVREISDLTGYDRXMAYKFHDDEHGEVIAECRRSDLEPYIGLHYPATDIPQASRFLFMKSKVRMICDCSAHPVKIIQDKKLAQPLSLCGSTLRAPHGCHAQYMSNMGSVASLVMSVTINEDDDESGSDQKGRKLWGLVVCHHTNPRFVPLPLRYACEFLLQVFGIQLNKEVELAAQAREKHILRTQTVLCDMLLRDAPIGIFTQTPNVMDIVKCDGAALYYKNQIWVLGTTPAEPQIRDISAWLLECHDGSTGLSTDSLMEAGYPGALALGDAVCGMAAIKITDKDFIFWFRSHTAKEIKWGGAKHEPANRDDEGRKLQPRSSFKAFLEVVKWRSLPWEDIEMDSVHSLQLILRESLHNEIAVGESKTLVNSTLDDMKRIQGMDELRAVTNEMVRLIET

SEQ ID NO: 8689 - protein, 192 aa, Piscidia piscipula
AYKFHEDDHGEVVSEIRRSDLEPYLGLHYPATDIPQASRFLFRQNRVRMICDCHAKPVKVIQSEELRQPLCLVNSTLRSPHVCHTQYMSNMGSIASLVMAIIVNGNDKRRLWGLLVCHHTSLRYVPFPVRYACEFLMQAFGLQLYMEIQLASQMAEKRMLKTQTLLCDMLLRDAPLGIVTQSPNIMDLVKCD

SEQ ID NO: 8690 - protein, 343 aa, Glycine max
MAHRGATLFFLLFAICYSLIAIAGKSYYDILQLSKGASDEQIKRAYRKLALKYHPDKNPGNEEANKKFAEISNAYEVLSDSEKRNIYDRYGEEGLKQHAASGGRGGGMNFQDIFGSFFGGGQMEEEEKIVKGDDVVVDLDATLEDLYMGGTLKVWREKNVLKPASGKRRCNCRNEVYHKQIGPGMFQQMTEQVCEQCPNVKYVREGYFITVDIEKGMQDGQEVLFYEDGEPIIDGESGDLRFRIRTAPHDVFRREGNDLHTTVTITLVQALVGFEKTIKHLDEHLVDISTKEITKPKQVRKFKGEGMPLHMSNKKGDLYVTFEVLFPTSLREEQKTKIKAILG

SEQ ID NO: 8691 - protein, 463 aa, Ceratophyllum demersum
GKPFYAVVHRVTGSLVIDFEPVRPYEVPTTAAGALQSYKLAAKAITKLQSLPSGSMQRLCDTIVKEVYELTGYDRVMVYKFHEDDHGEVVAEVTKPNMEPYLGLHYPATDIPQASRFLFMKNKVRMICDCHAKAIKVYQDGNLPMDLTLCGSTLRAPHSCHVQYMHNMGSVASLVMAVVVNEGEDDQGESTESGQQRKKKLWGLVVCHNTSPRFVPFPLRYACEFLMQVFAIHVGKQIELENQLQEKNILRIQTLLCDMLMRDSPLGIVSKSPSIMDLVKCDGAALLYKNKVWLLGLTPSELQIHDIASWLSTHHMDSTGLSADSLYDAGYPGALSLGNAVCGMASVRITSKDMIFWFRMHTASEVRWGGAKHYPDDKDDGQKMHPRSSFKAFLEVVKTRSLPWKDYEMDAIHSLQLILQGTFKEIENGGIKNTIDSQFDGLKIDQMEELQVVANEMVRLMET

SEQ ID NO: 8692 - protein, 216 aa, Pyrus pyrifolia
CTGLSADIRTCQSKNIKVLLSIGGASGSYSLTSADDARQVADYIWNNFLGGQSASRPLGDAVLDGVDFDIEAGGGQFYDELARSLNGHNGQAKTVYLAAAPQCPIPDAHLDGAIQTGLFDYVWVQFYNNPPCQYADGNANALLNSWSQWASVPATQVFMGLPASTDAAGSGFIPADALKSQVLPTIKNSAKYGGVMLWSRWYDINSGYSASIKDSI

SEQ ID NO: 8693 - protein, 356 aa, Ceratophyllum demersum
ILHRIDAGIVIDLEPVNPSDVPVTAAGALKSYKLAAKSISRLQSIPSGNISLLCDVLVREVSELTGYDRVMAYKFHEDEHGEVIAECKRSDLEPYLGLHYPATDIPQASRFLFMKNRVRMICDCMVKPVKVIQDKRLNQSLSLCGSTLRAPHGCHAQYMANMGSIASLVMSVTINDDEEEEAPGEVQNQKTRKLWGLVVCHHTSPRFVPFPLRYACEFLIQVFGIQLNKEVELAVQLREKHILRTQTMLCDMILRDTPIGIVTRSPNVMDLVKCDGAALYYQNQFWLLGITPTEVQIRDILLWLLEYHKGTTGLSTDSLMEAGYPGALVLGDAVCGMAAIEITPKDYLFWFRSHTA

SEQ ID NO: 8694 - protein, 203 aa, Millettia grandis
MAYKFHEDDHGEVIAELKKPGLEPYLGLHYPATDIPQATRFLFMKNKVRMIVDCRAKHVKVLQDKKIPFDLTLCGSTLRAPHSCHLQYMENMNSSASLVMAVVVNDNDEDGDSSDAVQPQKRKRLWGLVVCHHTTPRFVPFPLRYACEFLAQVFAIHVNKELELEYQIVEKNILRTQTLLCDMLMRDAPLGIVSQRANIMDLV

SEQ ID NO: 8695 - protein, 540 aa, Oryza sativa Japonica Group
MQQRRKSVFASAPFAMKQAALGAGVAARRNGAPLSLAAVVFALFVFATFLYNEDIKSIADFPFGAGALRAKSPDLHVLQETVGAAHLAAGSIAKRGEEVIVRVLDAPASTAMAAAAGSSSNNSTIEVDEGQERERDVTLPSVKEGGADEARRREDEEAAEKESSAKAAAATAALRTVVSVPDTCDLYRGNWVYDEVNAPVYKESQCEFLTEQVTCMRNGRRDDSYQKWRWQPTDCDLPRFDARLLLERLRNKRLMFVGDSLNRNQWESMVCLVQSVIPKGKKTLTKFVNGGNSNIFYAHEYNATVEFYWAPFLVESNSDNPQVHSVPDRVIQWHSIAKHAHNWLGVDYLIFNTYIWWLNTLDMKVLKGSFDQGATEYVEVDRPVAYKEVLKTWAKWVDRNIDPNRTTVFFMSMSPNHITPEAWGNYGGIKCAMETLPITNRTTSLDVGTDWRLYAGAQEVLQTFRRVPVHLVDITALSELRKDAHTSVHTLRQGKLLTPEQQSDPKTYADCIHWCLPGLPDTWNQFLYARIASAPWSSDQ

SEQ ID NO: 8696 - protein, 382 aa, Pyrococcus horikoshii
MKLKRQKPKEKFSYDPQKVLKKLEDLAWKILEEAKSGKNPYFDVPTRGLNNVYFDEESRLIRLGDRLSRRYFLNVAHARKFMQTLILMAYIKRLVSEGKHASLREAYYANKHTVPGTRENTFEDQSESDPIIEDLERMLGVLREEMHITADRRGYIYGDIVIKDGEDEFNASKLGTGGWAVPGTVEHIQFPEINVDYVLVVETAAMADRLIEEKYPKRENCLIVATQGQASRGVRRLIHRLHYEEGLPIIVFTDGDPYGWYIYSTIKRGSINLAYLSEKLATPDAKFVGMTMDDIKEYNLENVTEKLKGIPPDKKGGPTGDYKRLIEELNYPWFQDKEWQRQLKLALKWGVRIEQQALANKSLEFVAKEYLPEKIREGKLLP

SEQ ID NO: 8697 - protein, 751 aa, Medicago truncatula
MANQENLPLYEKIWIKRTFQRAIDILILLLLFSLLCYRINVTFTIPWFLAFSCESWFTYTWIILLNTKWSPAVNKTYPNRLLQRVHELPRVDLFVTTADPVLEPPIITLNTVLSLLALDYPANKLACYVSDDGCSVFTFYGLLEASKFAKFWVPFCKKYNVQVRAPFRYFSQVTNSDDDSAEFKQEWLKMKDMYDNLSHKIEDVTRNSASFQFEGEFAVFSNTEKRNHPSIIKVILDGLSDGLPHLIYISREKRPKYEHNYKAGAMNVLTRVSGLMTNAPFMLNVDCDMVVNNPKIMQHAICILVDSKSGKDVAFVQCFQKFYDGIKDDPFGNQWVAAFEYMIGGMAGLQGPYYGGSNTFHRRYAIYGFYPNEIQHGNKAKLAENILIQQFGSSKKFVKSATQVMEGNDYSTHGNSPSNFIEEAIKVSDCEYEYGTCWGKQMGWLYGSISEDVPTGLNMQRKGWRSECCTPEPTAFTGCAPGGLLTTMIQQKRWSSGLTVVFFSKHSPVMGTLFGKIQFRAGLSYCWLTNWGLRSVFEVSYAALVAYCIITNTSIFPEVRYSHSISTAKGAGLWIPLTLFVIYTMHTLQEYKLKGFSLRYWWNNQRMVTIRSTSVWFIGFLSAMLKLMGISDTIFEVTQKESPTSGAAEDDANAGRFTFDESPAFVVGTTILLVQLTALVIKILGVQLEDHSGNECGIGELMCSVYLVICYWPFLKGLFARGKYGIALSTIFKSALFALIFVHFCRITCIS

SEQ ID NO: 8698 - protein, 493 aa, Zea mays
MAQAVVPAMQCRVGVKAAAGRVWSAGRTRTGRGGASPGFKVMAVSTGSTGVVPRLEQLLNMDTTPYTDKVIAEYIWVGGSGIDIRSKSRTISKPVEDPSELPKWNYDGSSTGQAPGEDSEVILYPQAIFKDPFRGGNNVLVICDTYTPQGEPLPTNKRHRAAQIFSDPKVAEQVPWFGIEQEYTLLQKDVNWPLGWPVGGFPGPQGPYYCAVGADKSFGRDISDAHYKACLYAGINISGTNGEVMPGQWEYQVGPSVGIEAGDHIWISRYILERITEQAGVVLTLDPKPIQGDWNGAGCHTNYSTKTMREDGGFEEIKRAILNLSLRHDLHISAYGEGNERRLTGKHETASIGTFSWVWMEHLSLFSFRESTECCLSGVANRGCSIRVGRDTEAKGKGYLEDRRPASNMDPYIVTGLLAETTILWQPSLEAEALAAKKLALKREAIMQGRGGEQEQQKQGLAYLQRRPAALLVQSNGTNYTASRQHKDKAGID

SEQ ID NO: 8699 - protein, 197 aa, Mesorhizobium ciceri subsp. biserrulae
EFAEFPELEQLPLWGFDGSSTQQAEGHSSDCVLKPVAVYPDPARTNGVLVMCEVMMPDGVTPHASNKRATILDDEGAWFGFEQEYFFYKDGRPLGFPESGYPAPQGPYYTGVGYSNVGSVARQIVEEHLDLCLAAGINHEGINAEVAKGQWEFQIFGKGSKKAADQMWMARYLLQRLTEKYGIDIEYHCKPLGDTDW

SEQ ID NO: 8700 - protein, 465 aa, Coptis trifolia
SGKPFYAIAHRVTGSLIIDFEPVKPYEVPMTAAGALQSYKLAAKAITRLQSLPGGSMERLCDAVVQEVYELTGYDRVMAYKFHEDDHGEVVSEVTKEGLEPYLGLHYPATDIPQAARFLFMKNKIRMICDCRAKHVRVLQDEKLSFDLTLCGSTLRAPHSCHLQYMENMDSIASLVMAVVVNDDDEDDEGTRPSQPQKRKRLWGHAVCHNTTPRFVPFPLRYACEFLIQVFAIHVSKEFELENQILEKNILRTQTLLCDMLMRNVPLGIVSQSPNIMDLVKCDGAALLYKNKIWRLGSSPNEIQIRDIASWLSDYHMDSTGLSSDSLYDAGFPGALSIADTVCGMAAVRINSKDMLFWFRSHTAAEVRWGGAKHDPGEKDDGRKMHPRSSFKAFLEVVKTRSAPWKDYEMDAIHSLQLILRSAFKDIETTDGNTKAFHSQLDNLKINGMEELEAVTNEMVRLIET

SEQ ID NO: 8701 - protein, 205 aa, Millettia grandis
AYKFHEDDHGEVIAEVKRPGLEPYLGLHYPATDIPQAARFLFMKNKVRMIVDCHAKHVKVFQDEKLPIDLTLCGSTLRAPHSCHLQYMANMDSIASLVMAVVVNDNEEDGDSSDAVQPQKRKRLWGLVVCHNTTPRFVPFPLRYACEFLAQVFAIHVNKEIELEYQIIEKNILRTQTLLCDMLMRDAPLGIVSQSPNIMDLVKCD

SEQ ID NO: 8702 - protein, 785 aa, Medicago truncatula
MANQNPLPLYDKFLLKYTFSRVMDSFTLLFLLLLLGYRILYINNYPFPWLVAFLCESWFTFIWVVTMSTKWTPAYTITHLDRLLLREHELPALDLFVTTADPGLEPPIITVNTVLSLLALDYPANKLACYVSDDGCSPLTFYALVEASKFAKLWVPFCKKYNVQVRAPFRYFCDENAVSNIEESPEFYQEWLRMKEEYGYLKSKIENASQNPLPLVGEFAIFSSTNHKNHSTIIKVIWENKENLLDALPHIIYISREKKLDHPHQYKAGAMNVLTRVSGMMTNAPFILNLDCDMHVNNPKIALHALCILLDSKGEKEVAFVQCPQQFYDGLKDDPFGNQLVALFVYLGGGFGGLQGMLYAGTNCFHRRKVIYGLSPDHDDIQNRKKGDDVVNEMEVVFGTSKRFIESATHALEGKTFTRIDNLCNTLETAKKVASCTYEYGTAWGKQVGWIYGSTSEDVLTGLDIHTRGWRSEMCSPDPLAFMGCSPQDNIVSMIQQKRWASGLFDILLSKHNPFLGFLYGKLQFREALGYFWILSWALRSVPEICYAALPAYCILTNSNFLPEKLWIHAALFVTYNISTISESLKTGLSIRTWWNNQKMMRITTMSAWFFGFLAILLKLLRISEPVFEITQKIDQSSNNGRFSFNESPIFLPSTTILFVQLTALATSLFGWATRVGSGLGYGPGEVFCSAYLVACYLPFFKGLFGTGKHGIPLSIIFKSVMLAFLFIVESTNPELNRETEKNFVELFLEDLKVREAKALKKQRHVNVVVLESKKIVIQEWERRD

SEQ ID NO: 8703 - protein, 198 aa, Mesorhizobium sp. WSM1283
EFAEFPELEQLPLWGFDGSSTQQAEGHSSDCVLKPVAVYPDPARTNGVLVMCEVMMPDGVTPHASNKRATILDDEGAWFGFEQEYFFYKDGRPLGFPESGYPAPQGPYYTGVGYSNVGSVARQIVEEHLDLCLAAGINHEGINAEVAKGQWEFQIFGKGSKKAADQMWMARYLLQRLTEKYGIDIEYHCKPLGDTDWN

SEQ ID NO: 8704 - protein, 203 aa, Echinacea atrorubens
DARRDDLNAAIFNLKEIESYDDYERSLLISQMSFEKTFGMSSVFIESTLMENGGLAESANPATMINEAIHVISCGYEEKTAWGKEIGWIYGSVTEDILTGFKMHCRGWRSIYCMPLRPAFKGSAPINLSDRLHQVLRWALGSVEIFLSRHCPLWYGWGGGRLKLLQRFAYINTIVYPFTSLPLVAYCTLPAICLLTGKFIIPT

SEQ ID NO: 8705 - protein, 391 aa, Coptis trifolia
DLEPVNPADVPVTAAGAMKSYKLAAKAISRLQSLPSGNIAVLCDVLVQEVSDLTGYDRVMVYKFHEDDHGEVIAECRVPELEPYLGLHYPATDIPQASRFLFMRNKVRMICDCSAAPVKVIQDNKLEQPLSLGGSALRAPHGCHAQYMANMGSVASLVMSVTINENDDQMETDQQKGRKLWGLLVCHHTSPRFVPYPLRYACEFLIQVFGMQINKEVELATQVRERHILQTQTVLCDMLLRDAPIGIVTQSPNIMDLVKCNGAALYYRSRFWLLGVTPTEAQIRDIAEWLLQYHNASTGLSTDSLMEAGFPGASVLGTAVCGMAAIKITLKDFLFWFRSHTAKEIKWGGAKHNPTEKDDGWKMHPRSSFKAFLEVVKHRSLPWEDVEMDAI

SEQ ID NO: 8706 - protein, 391 aa, Elatine triandra
DLEPVNPADVPVTAAGALKSYKLAAKAISRLQSFPSGNIPLLCDVLVKEVSDLTGYDRVMVYKFHEDEHGEVIAECRKPDLEPYLGLHYPATDIPQASRFLFMKNKVRMICNCMVTPVKVIQDKRLPQPLSLSGSTLRSPHGCHAQYMANMGSIASLVLSVTINEEDDKIDGDQLLGRKLWGLVVCHHTNPRFVPFPLRYACEFLIQVFGVQINKEVELATQVKEKHILRTQSVLCDMLLRDAPVAIVTQSPNVMDLVNCDGAALYYKKKFWLLGVTPSEAQIRDIGDWILECHSSNTSLSTDSLMEAGFPGASVLGEAVCGMAAIKITSKDFLFWFRSHTAKEIKWGGAKHDPDDKDDGRKMHPRSSFRAFLEVVKWRSLPWEDVEMDAI

SEQ ID NO: 8707 - protein, 174 aa, Triticum aestivum
  misc_feature (162)..(162): Xaa can be any naturally occurring amino acid
MLQGSGISNQKTLYEVLSVPEDATYDEIRAAYKCAALNTHPDKAQATVESSVCTGEQHGFFGVQKAWETLRYPKCRAEYDKQLQSSRQSIDIIASDIEIEDMTVESSDDGVELLYACRCGDYFSITACELGEMGISVSEDGEIVAQAPDSLPTSIVLGCGSXCSLKTRLVINKT

SEQ ID NO: 8708 - protein, 263 aa, Arabidopsis thaliana
MVKMTLIARVTDGLPLAEGLDDGRDLPDSDMYKQQVKALFKNLSRGQNDASRMSVETGPYVFHFCCKSLLIDRYNKDCRKFTLIYLRFTLLTSLYIFTSFWLSTQNFSYIIEGRVCYLTMCDRSYPKKLAFQYLEDLKNEFERVNGPNIETAARPYAFIKFDTFIQKTKKLYQDTRTQRNIAKLNDELYEVHQIMTRNVQEVLGVGEKLDQVSEMSSRLTSESRIYADKAKDLNRQALIRKWAPVAIVFGVVFLLFWVKNKLW

SEQ ID NO: 8709 - protein, 391 aa, Elatine triandra
DLEPVNPADVPVTAAGALKSYKLAAKAISRLQSLPSGNIPLLCDILVKEVRDLTGYDRVMVYKFHEDEHGEVIAECRKHDLEPYLGLHYPATDIPQASRFLFMKNKVRMICDCMATPVKVIQDKRLPQPLSLSGSTLRSPHGCHAQYMANMGSIASLVLSVTINEEDDKIDGDQLLGRKLWGLVVCHHTNPRFVPFPLRYACEFLIQVFGVQINKEVELATQVKEKHILRTQSVLCDMLLRDAPVAIITQSPNVMDLVNCDGAALYYKKKFWLLGVTPSEAQIRDISDWLLECHSGNTGLSTDSLMEAGFPGASVLGEAVCGMAAIKITSKDFLFWFRSHTAKEIKWGGAKHDPDDNDDGRKMHPRSSFRAFLEVVKWRSLPWEDVEMDAI

SEQ ID NO: 8710 - protein, 391 aa, Endospermum moluccanum
DLEPVNPVDVPTTAAGALKSYKLAAKAISKLQSLPSGNISMLCDVLVTEVRDLTGYDRVMVYKFHEDEHGEVIAECHKPDLEPYLGLHYPATDIPQASRFLFMKNKVRMIYDCFASPVKVIQDKSLSQPLSLCGSTLRSPHGCHAQYMANMGSIASLVMSVTINVDGDEMDNDQQKGIKLWGLVVCHHTSTRFVPFPLRYACEFLIQVFGVQIHKEVGLAKQMREKHILQTQTLLCDMLLRDAPVAIITQSPNLMDLVKCDGAALYFENKFWLLGVTPTEEQIRDIAEWLLKYHSENTGLSIDSLVEAGYPGASVLGDAICGMAAIRIASKDFLFWFRSHTAKEIKWGGAKHDPEEKDDGRKMHPRSSFKAFLEVVKWRSSPWEDVEMDAI

SEQ ID NO: 8711 - protein, 196 aa, Mesorhizobium sp. WSM2073
FAEFPTLEQLPLWGFDGSSTQQAEGHSSDCVLKPVAVYPDPARTNGVLVMCEVMMPDGVTPHASNKRATILDDEGAWFGFEQEYFFYKDGRPLGFPESGYPAPQGPYYTGVGYSNVGSVARQIVEEHLDLCLAAGINHEGINAEVAKGQWEFQIFGKGSKKAADQMWMARYLMQRLTEKYGIDIEYHCKPLGDTDW

SEQ ID NO: 8712 - protein, 307 aa, Deinococcus proteolyticus
MAYKDYYEVLGVSRSASDSDIKSAYRKLAKQYHPDKNAGDESAAEKFKEIGEAYAVLSDPQKRQAYDQFGHTGQVPPALPRRRLSGRRLRRVRPQPVQRLFPGDVRGPGRWHGSRGGFTSPDGRPIDLEDLFGGLGGMGGALRAEAGRFVQNVEGELQVSLSEAFEGSDEIINVDGRRLSLRVPAGTRDGARLRLAGQGPGGGDVLLTIRVLEDARFELDGDDLTTSVDVPAPVALGGAVTVQTITGSGQLNVPAGSSGGPMRLKGQGWPKKSGGRGDLYVRLNVTVPKELSEEERQLYEHVRDLQR

SEQ ID NO: 8713 - protein, 391 aa, Galearia filiformis
DLEPVNPADVPVTAAGQLKSYKLAAKAISRLQSLPSGNISLMCDVLVKEVSDLTGYDRVMVYRFHEDEHGEVVAECCRPDLEPYLGLHYPATDIPQASRFLFMKNKVRMICDCQAPAVKVIQDKRLVQPLSLCGSTLRSPHGCHAQYMANMGSVASLVMSVTINGDDDEMHSDQQKRRKLWGLVVCHHTSPRFVPFPLRYACEFLIQVFGVQINKEVELAAQMREKHILQIQTMLCDMLLRDSPLAIITQSPNVMDLVKCDGAALYYKKKFQLLGVTPTEAQIKDIADWLLEYHSGSTGLSTDSLMEAGYQGASILGDAVCGMAAVRITSNDFLFWFRSHTAKEIKWGGAKHDPNDKDDGRKMHPRSSFKAFLEVVKWRSLPWEDVEMDAI

SEQ ID NO: 8714 - protein, 301 aa, Glycine max
MAKSKNSHALPLLLPTLFFTLLGTSHAGGIAIYWGQNRNEGTLSEACATGKYSHINIAFLNKFGNGKTPEMNLAGHCNPTTNSCTKFSSEIKDCQSKGIKVLLSIGGGIGSYTLASVEDARNVSTFLWNTFLGGKSSSRPLGDAVLDGIDFDIELGSTQNYEHLARFLKAYSGVGNKRVYLGAAPQCPIPDRFLGTALNTGLFDFVWVQFYNNPPCQYANGNINKLVSSWKRWTSTVPAGKIFLGLPAARAAAGSGFVPAKVLTSRILPVIKQSPKYGGVMLWSRFFDVQNGYSTSIVASV

SEQ ID NO: 8715 - protein, 391 aa, Goupia glabra
DLEPVNPADVPVTAAGALKSYKLAAKAISRLQSLPSGNISLLCDVLVKEVSDLTGYDRVMAYRFHDDEHGEVVAERRRPDLEPYLGLHYPATDIPQASRFLFMKNKVRLICDCLAPPVKVIQDKRLAQPLSPCGSTLRSPHGCHAQYMANMGSIASLVMSVTINDDDDEMNSDQQKGRKLWGLVVCHHTSPRFVPFPLRYACEFLIQVFGVHISKEVELAAQMRKSIFCEFKLVLCDMLLRDAPVAIITQSPNVMDLVKCDGAALYYKKKFWLLGVTPTEAQIRDIAEWLLEYHNESTGLSTDSLMEAGYPGASILGDAICGMAAARITSKDFLFWFRSHTAKEIKWGGAEHDPGDQDDGRNMHPRSSFKAFLEVVKQRSLPWEDVEMDAI

SEQ ID NO: 8716 - protein, 506 aa, Picea sitchensis
MALELTQAASAADSNLSSSSSIDTSSHSSFSTITSLSSGISSINVSDVAKTAENDSNFNKSGKSSCSSDETTSCSAPLSNGCFKKPHKASNDPGWEAIQAVKKREGGIGLNHFSLLKRLGRGDIGSVYLVELKGTGCFFAMKVMDRGSLASRKKMLRAMTEREILSSLDHPFLPTLYTHFETEQFSCLVMEYCSGGDLHTFRQRQPAKRFSEEAVRFYASEVLLALEYLHMMGVVYRDLKPENVLVREDGHIMLSDFDLSLRCVVRPTLVKPVPLDLGPSCSVPTLCVKPTCIEPACVMPACIQPSCFVPSLFAQRLRKSRKTNKDVIKQVISLPELIAEPTNARSMSFVGTHEYLAPEIIKGEGHGSAVDWWTFGIFLYELLHGKTPFKGAGNHATLSNVAGQPLKFPEAPAISSGARNLIKGLLAKGPQHRLGSRRGATEIKQHPFFEGVNWALIRSITPPEVPKPTGLDFYTNKVGVSDPSVDKKIADSEASSSGPNLGFDLY

SEQ ID NO: 8717 - protein, 156 aa, Physcomitrella patens subsp. patens
RKPRGRPPGSKNKPKPPIIITRENGQAMRPHILEIAGGCDVGDSVASFSRRRQRGVHVLGASGIVSNVTLRQPTTPGATVTFHGRFEIISLSGAFLPHLTSQPTTGLTVTLAGAAGQVLGGSVVGTLMAAGPVLVIAASFLGPTYERLPLDPDDEG

SEQ ID NO: 8718 - protein, 377 aa, Blossfeldia liliputana
TDVPAAAAGAFKSYKLAAKAISRLQSLPSRNMALLCDVLVKEVSELTGYDRVMVYKFHEDEHGEVISEYLRPDMEPYLGLHYPATDIPQASRFLFLKNRVRLICDCLATPVKVIQGTKWAQPLSLGGSILRAPHGCHALYMANMGSIASLVMAVTVNDDEDEVKSDPSTGRRLWGLVVCHHTSSRFIPFPLRYACELLVQVFGIQINKEVELAAQIRESHILRIQTVLCDMLLRDSPVAIVTQSPNVMDLVKCDGAALFYEGQVWLLGITPTEEQIKNITQWLLKYHGSTKGLSTDSLMEAGYPGASELGDAVCGMAAVRISSKDVLFWFRSHTAKEIKWGGAKHDPVDGDDGRKMRPRSSFKAFLEVVKWRSQPWE

SEQ ID NO: 8719 - protein, 62 aa, Gentiana lutea
GEVMLGQWEFQVGPSVGISAGDELWVARYILERITEIAGVVVSFDPKPIEGDWNGAGAHTNY

SEQ ID NO: 8720 - protein, 293 aa, Ananas comosus [sequence omitted]

SEQ ID NO: 8721 - protein, 241 aa, Noctiluca scintillans
MSANGSGEDPTASHPNDFYELLEIQRDAGEIDIKKGYRQQALKWHPDKQDVNNRAYAEERFKLVSEAYQVLSDPQKRAAYDRYGKDGGPSAGMPSSPFGQGGFSGFSGFGGPGVRVVIRTGPNGTTFTQSSTTSSGHGFGGGFPDSFPHRAQDPMDLFREFFSVRDPFGGNGPFGFMRGRFPDDEVQRAVEASLIEEEQAQHRRNQEELQPPMSEEEALEMALRLSMEEQQRAHPRHGRVQ

SEQ ID NO: 8722 - protein, 68 aa, Alstonia scholaris
GEVMPGQWEFQVGPSVGIEAGDHIWCARYILERITEQTGVVLSLDPKPIEGDWNGAGCHTNYSTKSMR

SEQ ID NO: 8723 - protein, 350 aa, Arabidopsis thaliana
MGVDYYNILKVNHNATEDDLKKAYKRLAMIWHPDKNPSTRRDEAEAKFKRISEAYDVLSDPQKRQIYDLYGEEGLKSGKIPNSSSSEASSSSSSSSSRYPHFHQHRPQHPPNASSFRFNPRDAEDIYAEFFGSENGGGSNNAGGRGNRAFRNGHFNTGGANGYSGEMRKVPAMENPLPVSLEDLYKGVVKKMRITRNVYDASGRMMVEAEILPIEIKPGWKKGTKLTFPKKGNEEPGIIPADIVFVVEEKPHPVYKRDGNDLLVSQEITLLEALTGKTVNLITLDGRTLMIPLTEIIKPDHEIVVPNEGMPISKEPGKKGNLKLKLSVKYPSRLTSDQKFELKRVLGGVS

SEQ ID NO: 8724 - protein, 270 aa, Zea mays
MAHFAPWIRPCLVELLWRERKVFSLGDSSLQQQHATSSDAREEGVPNGDYNEDQTTKDMSEKWHPDKCSSSSISVKHMEEAKEKFQEIQGAYSVLSDANKRLLYDVGVYDDEDDEDSMQGMGDFIGEMTQMMSQVRPMRQESFEELQQLFVDMFQSDIDSGFCNGTAKGHQVQGQAKSRTCSPRSPPTTIVKEAEVSSCNGFNKRGSSAMDSGKPPRPVECGAGQSQAGFCFGASVDSLEKYEVPRWLLKEVSSYVKVSYSGESLSADIP

SEQ ID NO: 8725 - protein, 304 aa, Glycine max
MAKSKNCHALPLLLALILFFTLLGTSHAGGIAIYWGQNGNEGTLSEACATGKYTHINIAFLNKFGNGQTPEMNLAGHCNPATNSCTKFSSEIKDCQSKGIKVLLSIGGGIGSYTLASVEDARNVSTFLWNTFLGGKSSSSSRPLGDAVLDGIDFDIELGSTQNYEHLARFLKAYSGVGGKRVYLGAAPQCPIPDRFLGTALNTGLFDFVWVQFYNNPPCQYANGNITNLVSSWNRWTSTVPAGKIFLGLPADPAAAGSGFIPADTLTSEILPVIKESPKYGGVMLWSRFFDVQNGYGTSIIGSV

SEQ ID NO: 8726 - protein, 404 aa, Blastocladiella emersonii
APAPASPSSPSTAAGAGSASSTASSTTTAAASGNLSIPSPLVAGSTTSSSISHAQKMATAAHTNSDYSPSPAATPSAPLDAVAERRRRKTTLADLELRQTLGTGSFGRVHLVRLRSTGKYYAMKVLKKAEVVKHKQVEHTLNEKGILEQIDHPFLVALHSSFQDSANLYMVMEYVTGGELFTYLRRSQRFSNNVAKFYAAEVVLAFEYLHSKDIIYRDLKPENLLLDAQGHVKITDFGFAKHVPDITWTLCGTPDYLAPEIIQSRGYGRAVDWYALGVLIFEMLAGYPPFYDEDHVRMYEKILQGKVKWPSHFDPAAKDLLKRLLTTDLTKRYGNLKGGSKDIKMHKWFAGLDWTKLFNKQIPPPYTPPNRGDGDTSNFDAYPEETEPYGKVQPDPYAQLFKDF

SEQ ID NO: 8727 - protein, 252 aa, Platanus x acerifolia; identical to SEQ ID NO: 5087

SEQ ID NO: 8728 - protein, 378 aa, marine gamma proteobacterium HTCC2143
MSKRDYYEILGVARDSAGKDIKKAYRRVAMKFHPDRNPDDKDSEEKFKEASEAYEVLSDSQKRAAYDQYGHDAVNGNAGAGGFGGGNGNFGDIFGDVFGDIFGGGGGGGGRSRGPARGSDLRYNLDVDLEAAVKGTEVKIRIPTLVSCEPCSGSGAKKGSAPVTCTTCGGIGQVRMQQGFFSVQQACPNCRGKGKMISDPCNSCHGQGLKEETKTLSVKVPPGVDTGDRIRLSGEGEAGPDGGPSGDLFVQINVRSHSIFERDGKNLYCEVPISITDASLGGELEVPTLDGRVKLKIPEETQTGKLFRLRGKGVAPVRGGSTGDLLCRVVLETPVNLTKSQKDLLQQLQESFEKEGNQSPKKSSWFAGVKSFFDDMKV

SEQ ID NO: 8729 - protein, 196 aa, Tephrosia villosa
DRVMAYKFHEDDHGEVIAEIRRSDLEPYLGLHYPATDIPQASRFLFKQNRVRMICDCHAKPVKVIQSEELRQSLCLVNSTLRSPHVCHTQYMANMGSIASLVMAIIVNGNDTTRLWGLLVCHHTSPRYVPFPVRYACEFLMQAFGLQLYMEIQLASQMAEKRILKTQTLLCDMLLRDAPLGIVTQSPNIMDLVKCD

SEQ ID NO: 8730 - protein, 921 aa, Oryza sativa Japonica Group; identical to SEQ ID NO: 7687

SEQ ID NO: 8731 - protein, 327 aa, Hibiscus cannabinus
CYVQFPQRFDGIDRSDRYANRNTVFFDVNMKGLDGIQGPVYVGTGCVFNRQALYGYGPPSMPSLPKSSSSSCSWCGCCSCCCPGKKEPKDPSELYRDAKREELDAAIFNLREIENYGEYERSMLISQTSFEKTFGLSSVFIESTLMENGGVAESANPSTLIKEAIHVISCGYEEKTAWGKEIGWIYGSVTEDILTGFKMHCRGWRSIYCMPLRPAFKGSAPINLSDRLHQVLRWALGSVEIFLSRHCPLWYGFGGRRLKWLQRLAYINTIVYPFTSLPLIAYCSLPAICLLTGKFIIPTLSNLASVLFLGLFLSIILTAVLELRWSG

SEQ ID NO: 8732 - protein, 197 aa, Mesorhizobium sp. WSM2074
EFAEFPTLEQLPLWGFDGSSTQQAEGHSSDCVLKPVAVYPDPARTNGVLVMCEVMMPDGVTPHASNKRATILDDEGAWFGFEQEYFFYKDGRPLGFPESGYPAPQGPYYTGVGYSNVGSVARQIVEEHLDLCLAAGINHEGINAEVAKGQWEFQIFGKGSKKAADQMWMARYLMQRLTEKYGIDIEYHCKPLGDTDW

SEQ ID NO: 8733 - protein, 377 aa, Shewanella sp. MR-4
MSKRDYYEVLGVGRDASEREIKKAYKRLAMKFHPDRNPGDKAAEASFKEVKEAYEILTDANKKAAYDQFGHAGVDPNRGGGGGYGGAGDFGDIFGDVFGDIFGGGRRGGQRQAARGSDLRYNLELSLEEAVKGLTKELRIPTLASCDVCDGSGAKKGTSATTCGTCHGQGQVQMRQGFFTVQQACPTCHGRGKIIKDPCTKCHGDGRVEKTKTLSVKIPAGVDTGDRIRLAGEGEAGEFGAPPGDLYVQVTVREHAIFVRDGNNLYCEVPISFSKAALGGEIEVPTLDGKVSLKIPAETQTGRMFRLRGKGVKSVRSHAVGDLLCKVVMETPVNLNERQKELLREFEATLTGESKKHSPKAEGFFDGVKKFFQDLNS

SEQ ID NO: 8734 - protein, 197 aa, Mesorhizobium sp. WSM2075
EFAEFPTLDQLPLWGFDGSSTMQAEGHSSDCVLKPVAVYPDPTRTNGVLVMCEVMMPDGVTPHASNKRATILDDEGAWFGFEQEYFFYKDGRPLGFPETGYPAPQGPYYTGVGYKNVGDVARQIVEEHLDLCLAAGINHEGINAEVAKGQWEFQIFGKGSKKAADQMWIARYLLLRLTEKYRIDIEFHCKPLGDTDW

SEQ ID NO: 8735 - protein, 166 aa, Zea mays
MDGGSGNASSGGAAVCCYYALLGVRKSASATDIRTAYRRLAMKWHPDRWASDPGAAGEAKRRFQRIQEAYSVLSDKGKKAMYDAGLFDPLDDDDQDFSDFMQEMLVMMDNVKNEKPDTLEDLQKMLADIVNGDGGDGVGGRVPPAPPDVARRTRVAPHPQPQQARR

SEQ ID NO: 8736 - protein, 388 aa, Arabidopsis thaliana
MPGHRSKSEKKDADKQLRRDPYEVLGVLRNSTDQEIKSAYRKLALKYHPDKTANDPVAADMFKEVTFSYNILSDPEKRRQFDSAGFEAVEAESQELELDLSSLGAVNTVFAALFSKLGVPIKTSVSATILEEALNGRVSVDPLVLGQAVSKKVEKQCAHFYAVTISEEELLYFDQEANSGLSLALQMAQAKDPETAFFKKLDGFQQCEVTELKAGTHVFAVYGDNFFKNVSYTIQVLCAAAFTQEKEDLRSVEAQILTKRAELAKFETEYREVLVQFTDMTSRYAQEMQSIDELLKQRNEIHSAYTTIPLMKRSSSKNRMRKSSFKKAAAKAPAPTEQEEEEEEEEEEEEESSRQKNKKPSTCDKSETLKKKSKWFNLHLKLDKKKPC

SEQ ID NO: 8737 - protein, 206 aa, Lonchocarpus phaseolifolius
RVMAYKFHEDDHGRVIAEVKKPGLEPYLGLHYPATDIPQATRFLFMKNKVRMIVDCRAKHVKVLQDKKVPFDLTLCGSTLRAPHSCHLQYMENMNCSASLVMAVVVNDNEEDGDSDAVQPQKRKRLWGLVVCHNSIPRFVPFPLRYACEFLAQVFAIHVNKELELEYQIVEKNILRTQTLLCDMLMRDAPLGIVTQRPNIMDLVKC

SEQ ID NO: 8738 - protein, 344 aa, Sinorhizobium meliloti 1021
MTKYKLEYIWLDGYTPVPNLRGKTQIKEFDAFPTLEQLPLWGFDGSSTQQAEGRSSDCVLKPVAVYPDPVRTNGALVMCEVMMPDGKTPHPSNTRATVLDDESAWFGFEQEYFFYKNGRPLGFPEQGYPAPQGPYYTGVGYKNVGDIARQIVEEHLDICLAAGINHEGINAEVAKGQWEFQVFGKGSKKAADEVWLARYLLLRLTEKYGIDVEFHCKPLGDTDWNGSGMHANFSTAYLREVGGKDYFEALMAAFEKNLHDHINVYGPDNHLRLTGKHETAPWDKFSYGVADRGASIRVPHSFVNNGYRGYLEDRRPNSQGDPYQIASVILKTISSVPTAVAKVA

SEQ ID NO: 8739 - protein, 391 aa, Hirtella bicornis
DLEPVNPADVPVTAAGALKSYKLAAKAISRLQSLPSGNISLLCDVLVKEVSDLTGYDRVMVYRFHEDEHGEVIAECCMPDLEPYLGLHYPATDIPQASRFLFMKNKVRMICDCLAPPVKVIQDKRLAQPLSLCGSTLRAPHGCHSQYMANMGAIASLVMSVTINEDDEEMETGQQKARKLWGLVVCHHSSPRFIPFPLRYACEFLIQVFGIQINKEVELAAQTREKHILRTQTVLCDMLLRDAPVAIITQSPNIMNLVKCDGAALYYRKKFWLLGITPTDTQIKDIVEWLLQYHGESTGLSTDSLMEAGYPGASVLGDAVCGMAAVKITSKDFLFWFRSHTAKEIKWGGAKHDPDDKDDGRKMHPRSSFKAFLEVVKRRSLHWEDVEMDAI

SEQ ID NO: 8740 - protein, 349 aa, Oryza sativa Japonica Group
MGVDYYKLLQVERGATEEELKKAYRKLAMKWHPDKNPNSKKEAEAKFKQISEAYEVLSDSQKRAVYDQYGEEGLKGQVPPPGAGGPGGSSYYGGDGSTFRFNPRSADDIFAEFFGFSSPFSSMGGMGGMGGGVDRGMRGSKFGMYDNDIFGSFSQFPGEASMHAPQRPQKAAPIENRLPCNLADLYKGTTKKMKISREILDSSGRTMVVEEILTIDIKPGWKKGTKITFPEKGNESPHVIPADIVFVIDEKPHDLFTREGNDLVMTQKISLAEALTGCTVQVTALDGRNLTVPINNVVYPGYEEVVLREGMPIPKDPSKKGNLRIKFNIKFPSRLTSEQKSEIKRLLAS

SEQ ID NO: 8741 - protein, 391 aa, Homalanthus populneus
DLEPVNPADVPITAAGALKSYKLVAKAISKLQSLPSGNISRLCDVLVKEVSDLTDYDRVMVYRFHNDEHGEVIAENCRPDLDPYHGLHYPATDIPQASRFLFMKNKVRMICDCLAPPVKVIQDQSLGQSINLCGSALRSPHGCHAQYMENMGSIASLVISVTINEDGSEMDDDQQKARKLWGLVVCHHTSPMFIPFPLRYACEFLIQVFGVQINKEVEMAAQMREKRILQTQTVLCDMLLRDAPVAIITQSPNVMDLVKCDGAALFYRKKFWLLGVTPTEAQVEDIVEWLLEFHSESTGLSTDSLMEAGYPGASTLGHAICGMAAVRISSKDFLFWFRSHTAKEIKWGGAKHDPEDKDDGRKMHPRSSFNAFLEVVKWRSLPWDDVEMDAI

SEQ ID NO: 8742 - protein, 210 aa, Millettia pinnata
YDRVMAYKFHEDDHGEVIAEITKPGLEPYMGLHYPATDIPQAALFLFMKNKYRMIVDCHAKHVKVLQDEKLPFDLTLCGSTLRAPHSCHLQYMANMDSIASLVMAVVVNDNEEDGSSSDAVQPQKRKRLWGLVVCHNTTPRFVPFPLRYACEFLSQVFAIHVNKEIELEYQIIEKNILRTQTLLCDMLMRDAPLGIVSQSPNIMDLVKCD

SEQ ID NO: 8743 - protein, 391 aa, Hugonia platysepala
DLEPVNLADVPMTATGALTSYKIAAKAISRLQTVPSGSINLLCDVLVKELRELTGYDRVMVYRFHEDDHGEVVAECRSSDLESYLGLHYPATDIPQASRFLFMKNKVRMICDCLASSVKVMQDKSLAEPVSLSGSILRSPHGCHAQYMANMGSIASLVMSVTINEDCNEMESDQQRGRKLWGLVVCHHTSPRFVPFPLRYACEFLIQVFSIQISKEVELEAQRREKHIMQTQTVLCDMLLRDAPLAIMTQSPNVMDLVKCDGAALCCRKNCWLLGLTPTEQQIADIAEWLLEYHGESTGLTTDSLMEAGYPGASVLGNAICGMAAIRITSKDFLFWFRSHTAKEIMWGGAKHDPGDKDGGRKMHPRSSFKAFLEVVKWRSLTWEDVEMDAI

SEQ ID NO: 8744 - protein, 295 aa, Brassica napus
MSSKKVEGSSAPANRRDPYEVLSVARDATDQEIKSAYRKLALKYHPDKNANNPEASDLFKEVAFSYSILSDPEKRRQYDNAGFEALDADGMEMEIDLSNLGTVNTMFAALFSKLGVPIKTTVSANVLEEAMNGTVTVRPLPIGTSVSGKVEKQCAHFFGVTISEQQAESGVVVRVTSTAQSKFKLLYFEQDSSGGYGLALQEESEKTGKVTSAGMYFLHFQVYRMDSTVNALAAAKDPESAFFKRLEGLQPCEVSELRAGTHIFAVYGDNFFKTASYTIEALCAKTYEETTEKLK

SEQ ID NO: 8745 - protein, 331 aa, Arabidopsis thaliana
MGVDYYNVLNVNPSATEDDLKKSYRRLAMKWHPDKNPTSIKQEAEAKFKQISEAYDVLSDPNKRQIYDQYGEDGLTATEATASSQQHNYSSGNNNNYNAGFRYYPRDAEDIFAEFFGASEKVFDGGVGGGGRFKSAEAGSQTNRKTPVNRKAPAIESKLACTLEELYKGGRRKMKISRVVPDGLGKSKPVEEILKIDITPGWKKGTKITFPEKGNQEPGVTPADLIFVIDEKPHSVYKRDGNDLIVDKKVSLLEALTGITLSLTTLDGRNLTIPVLDIVKPGQEIVIPSEGMPISKEGSKRGDLRINFEICFPSRLTSEQKTDLKRVLGGS

SEQ ID NO: 8746 - protein, 377 aa, Maihuenia patagonica
TDVPVVAAGAFKSYKLAAKAISRLQSLPSRNMSLLCDVLVKEVSELTGYDRVMVYKFHEDEHGEVISEYRRPDLEPYLGLHYPATDIPQASRFLFLKNRVRMICDCLATPVKVIQGKKWAQPLGLGGSILRAPHGCHALYMANMGSIASLVMAVTINEDEDEVKSDPSTGKRLWGLVVCHHTSSRFIPFPLRYACELLVQVFGIQINKEVELAAQIRESHILRIQTVLCDMLLRDSPVAIVTQSPNVMDLVKCDGAALYYKGQVWLLGITPTEEQIKNITQWLLEYHGSTKGLSTDSLMEAGYPGASELGDAVCGIAAVRISSKDVLFWFRSHTAKEIKWGGAKHDPVDGDDRRKMHPRSSFKAFLEVVKWRSQPWE

SEQ ID NO: 8747 - protein, 391 aa, Hymenanthera alpina
DLEPVNPADVPVTAAGALKSYKLAATAISRLQSLPSGNISLLCDTLVKEVSDLITYDRVMVYRFHDDEHGEVIAESCKPGLEPYLGLHYPATDIPQASRFLFMKNKIRMICDCLAPPVKVVQDKRLEQPLSLCGSTLRSPHGCHSQYMANMGSIASLVMSVTINEDDDEMDSDQQKGRKLWGLVVCHHSSPRFVPFPLRYACEFLIQVFSVQISKEVEVAAQMKEKHIFKTQTVLCDMLLRDAPEAIITHSPNVMDLVKCDGAALYYRKKVCLLGVTPTEAQIRDIAEWLLEYHSGSTGLSTDSLMEAGYPNASILGDLVCGMAAVRITSKDFLFWFRSQTDKEVKWGGAKHDATDKDDLRKMHPRSSFKAFLEVVKWRSLPWEDVEMDAI

SEQ ID NO: 8748 - protein, 392 aa, Hypericum empetrifolium
DLEPVNPADVPVTAAGALKSYKLAAKAISKLQSLPSANISLLCDVLVKEVSDLTGYDRVMVYKFHEDDHGEVVAECHRPDLEPFLGLHYPATDIPQASRFLFLKNKVRMICDCYAQPVKVVQYSGLSQSLSLCGSSLRAPHGCHAQYMVNMGSIASLVMAVTINDDDDDEAEADRRKGRKLWGLVVCHHRAPRFVPFPLRYACEFLIQVFGIQINKKVKLEAQMREKHILETQTVLCDMLLRESPVAIVTQSPTVMNLVKCDGAALCYQNTFWLLGVSPTEAQVRDITEWLLEYHAGSTGLSTDSLMEAGYPGASVLGDAVCGMAAIRINSKDFLFWFRSHAAKEIKWGGAKHDPDDKDEGRKMHPRSSFKAFLEVVKWRSLPWEDVEMDAI

SEQ ID NO: 8749 - protein, 68 aa, Gelsemium sempervirens
GEVMPGQWEYQVGPSVGIEAGDHIWCSRYLLERITEQAGVVLSLDPKPIEGDWNGAGCHTNYSTKSMR

SEQ ID NO: 8750 - protein, 559 aa, Arabidopsis thaliana
MEKKENGLDGKQSGRVINGPTNPMVTPLLNDLYQFTMAYAYWKAGKQSERSVFDLYFRKNPFGGEYTIFAGLEECIKFLANFNLTDEEIDFVRDSLPGCEEAFCDYLRGLDCSDIEVYAISEGSVVFPKVPLLRIEGPVAVVQLLETPFLNLINYASLVATNAARHRFVAGKSKLLLEFGARRAQGPDGAISASKYCYLGGFDATSNVAAGKLFGIPLRGTHSHAFVSSFMSLDEIVDKVLRSSDGKSTCKDFICLVQTCLTKIQNSSSLQGIFSETNQSELAAFISYALAFPNSFLALVDTYDVMKSGIPNFCAVALALNELGYKAVGIRLDSGDLAYLSTEVRKFFCAIERDLKVPDFGKMIVTASNDLNEETVDALNKQGHEVDAFGIGTNLVTCYAQAALGCVFKLVEINNQPRIKLSEDVTKVSIPCKKRTYRLFGKEGYPLVDIMTGENEPPPKVGERLLCRHPFNESKRAYVVPQRVEELLKCYWRGNADEAREELEPLKELRNRCIKQLENMRPDHMRRLNPTPYKVSVSAKLYDFIHFLWLNEAPVGELH

SEQ ID NO: 8751 - protein, 335 aa, Debaryomyces hansenii
MRYRSPLQKLIGVWNQIQSNIGGDIVFVFHKPYCRSRKRTFGGNSKSYEVGQLGGCELEARRFAAVIKVLKTMIVNLVQDRTTTKRDVYYQDVGLFQKSQPFANELIECIVGSLGMCAERDLKIFASQKGLMFGNMRFRRAGVAWDLDEPVLIPRTNDLEAMEPPKGIVVIEKEAIFKSFCKYIQNIDVNLIAVTGKGFPDNLTKRFVGNLGQLYPDVPILAFMDSDVYGLSICKNYKYAKNFDAMLCPSLTFAGVFLTEYASGWLDISVRDWRMMSNFIRDIKLLQRPVSEAKELDKWHRELTRGLVLFKKSEMNIVDSCPNEYILRKIKQHIQ

SEQ ID NO: 8752 - protein, 502 aa, Arabidopsis thaliana; identical to SEQ ID NO: 4069

SEQ ID NO: 8753 - protein, 377 aa, Austrocylindropuntia subulata
TDVPAAAAGAFKSYKLAAKAISRLQSLPSRNMSLLCDVLVKEVSELTGYDRVMVYKFHEDEHGEVISEYRTPFLESYLGLHYPATDIPQASRFLFLKNRVRMICDCLAAPVKVIQDKKLAQPLSLGGSILRAPHGCHAQYMENMGSIASLVMAVMINEDEDEVKSDPSTGKRLWGLVVCHHTSSRFIPFPLRYACELLVQVFGIQINKEVELAAQIRESHILRIQTVLCDMLLRDSPVAIVTQSPNVMDLVKCDGVALYYKGQVWLLGITPTEEQIKNITQWLLEYHGTTKGLSTDSLMEAGYPGASELGDAVCGMAAVRISSIDVLFWFRSHSAREIKWGGAKHDPVDSDDRRKLHPRSSFKAFLEVVKWRSQPWE

SEQ ID NO: 8754 - protein, 293 aa, Glycine max
  misc_feature (6)..(6): Xaa can be any naturally occurring amino acid
LLHPLXLFLLISLALFAKSDAGSLVVYWGQNAGEGQLTKTCKTGLFHIVNIAFLSTFGNGSQPQINLAGHCSPASKGCKRLGKDIKNCQRRGIKVMLSIGGGTNTYSLSSPDDARQVADYIWANFLGGKSNSRPFGNAILDGVDFNIESGELHYAALAYRLHDHYAGSKKKFYLTASPQCSFQNNLLHGALTAGLFDHVWIQFYNNPQCEFTSKDPTGFKSAWNQWTTSINAGKFFVGLPSSHAAARTGFVSSHALINHLLPIVRSPKYGGVMLWDRYHDLQSRYSGKISGSV

SEQ ID NO: 8755 - protein, 68 aa, Luculia pinceana
GEVMPGQWEFQVGPSVGIEAGDHIWCARYLLERITEQAGVVLTLDPKPIEGDWNGAGCHTNYSTKSMR

SEQ ID NO: 8756 - protein, 348 aa, Oryza sativa
  misc_feature (71)..(71): Xaa can be any naturally occurring amino acid
MRSMDYYEILHVDRSATDDDIRRAYRRLAMRWHPDKNHTGKKDAEAKFKDITEAYNVLSDAGKRALYDQYXGEEGLRAGGAPPQPGGGGGGADDIFAEFFGSTPFTYCNTGAGTTARAKQQAAWDAGGGGAYFGRGGFARDHGGGGAAASPQPPPVESKLACTLEELYVGVTKNMKISRNVVDASGRMKTESEILSIEVKPGWKKGTKITFPGKGNQQWSQLPADLVFVVDEKPHDVYRRDGNDLVAEARVTLADALGGTVVVLATLDGRELLVEVSGGGVAAGDEDDDDEDPVVYPGYELVVPSEGMPIAREPGRHGSLRIRFDVAFPERLTRRQRAQIKRILDAAG

SEQ ID NO: 8757 - protein, 299 aa, Malus x domestica
MASKTQTLALTLSLLILISSCKSSQAAGIATYWGQNGNEGTLAEACNSGNYQFVNIAFLSTFGNNQAPVLNLAGHCNPASGTCTGQSADIRTCQSKNIKVLLSIGGATETYSLTSADEARQVADYIWNNFLGGQSDSRPLGDAVLDGVDFDIELGGTQFYDELARSLKGHNGQGKTVYLAAAPQCPFPDTHLDGAIQTGLFDYVWVQFYNNPLAQCQYADGNADALLSSWNRWASVSATQVFMGLPAAPEAAPSGGFIPADALKSQVLPTIKNSPKYGGVMLWSRFYDNGYSASIKDSI

SEQ ID NO: 8758 - protein, 62 aa, Coptosapelta diffusa
PGQWEFQVGPSVGIEAADHIWCARYLLERITEQAGVVLSLDPKPIEGDWNGAGCHTNYSTKS

SEQ ID NO: 8759 - protein, 375 aa, Pereskiopsis porteri
TDVPAAAAGAFKSYKLAAKAISRLRSLPSRNMSLLCDVLVKEVSELTGYDRVMVYKFHEDEHGEVISEYRTPDLEPYLGLHYPATDIPQASRFLFLKNRVRMICDCLAAPVKVIQDKKLAQPLSLGGSILRAPHGCHAQYMANMGTIASLVMAVTINEDEVKSDPSTGKRLWGLVVCHHTSSKFIPFPLQYACELLVQVFGIQINKEVELAAQIRESHILRIQTVLCDMLLRDSPVAIVTQSPNVMDLVKCDGAALYYKGQVWLLGITPTDEQIKNITQWLLEYHGSTKGLSTDSLMEAGYPGASELGDAVCGMAAVRISSKDVLFWFRSHSAREIKWGGAKHDPVDSDDRSKMHPRSSFKAFLEVVKWRSQPWE

SEQ ID NO: 8760 - protein, 389 aa, Blastopirellula marina DSM 3645
MAKKKSVKKQADLPLRSDTSEKVKLTLRDKKTIGSLTNLADTVVASAQKTKDPRLEIPTRSLSNVRYNKSQRILEMGKNTTARQLFNLNQAKSYMQTMLAAAGCKRLVESGKTTSIRGLYYLMKHTIAGTKEETFSDQAESDPIIEDLEVLLESLREELHLYAQQRGSMVGNIILNDKGDTIDCSRMGSGGYGIPSIVEADVIQFRECGADFVLHVEKDTVWQRFNEDKFWKKHNCILTHGSGQPPRGVRRLLHRLHNELKLPIYCVFDNDPWGYYIYSVIKQGSINLAYESKRMAVPEAKFLGLRAIDYERCNLNPSVQIALNDTDRKRAKQIAKYPWFEQKKTWQKEIQKLLDNGFKLEVEALISQGLSYVTDVYVPERLEDRTWLD

SEQ ID NO: 8761 - protein, 295 aa, Zea mays
MAANLKWAPVLALVVVVAAMVGTTSAGNIAVYWGQNGNEGSLADACNSGLYAYVNIAFLTTFGNGQTPVLNLAGHCDPGSGSCTGQSSDIQTCQSLGIKVLLSIGGASGSYGLSSTDDANSVADYLWDNFLGGSGSSRPLGAAVLDGIDFDIENGQSAHYDDLANALKGKGSVLLTAAPQCPYPDASLGPALQTGQFDNVWIQFYNNPGCAYANGDDTNLVNAWNTWTSSITAGSFYLGVPASPQAAGSGYIDPGTLTGTVIPAIRGIGNYGGIMVWDRFNDVQNNYSSQVKGSV

SEQ ID NO: 8762 - protein, 146 aa, Arabidopsis thaliana
MEGGIRQTYYEILGVAVDSSAEQIRRAYHKLAKIWHPDRWTKDPFRSGEAKRRFQQIQEAYSVLSDERKRSSYDVGLYDSGEDEEKQYSLEELQTMVDDMVYEFQSEPLFQNQSMQMNFDLNQTPDWHSQMSLPLSSFEFYSQSSY

SEQ ID NO: 8763 - protein, 204 aa, Candida glabrata
IRSFNQSRFPRVYKDSMLPVPETYNDPKDAWYPPGHGDLFESLHASGELDALIAQGREVLFVSNGDNLGATVDLKILNHMIETGAEYIMELTDKTRADVKGGTLISYDGQVRLLEVAQVPKEHIDEFKNIRKFTNFNTNNLWINLKAVKRLVESSALEMEIIPNQKTITRGGQEINVLQLETACGAAIRHFSGAHGVVVPRSRF

SEQ ID NO: 8764 - protein, 318 aa, Quassia amara
AKAISRLQSLPSGNLSLLCDVLVKEVSELTGYDRVMVYKFHEDEHGEVVAECRRPDLEPYLGLHYPATDIPQASRFLIMRNKVRMIYDCLAPSVQVIQDKRLDEPVSLCGSTLRAPHGCHAQYMANMGSIASLVMSVTINEEDDELDNDQQQVRKLWGLVVCHHTSPRFVPFPLRYACEFLIQVFGVQVNKEVELAAQLREKHILRTQTVLCDMLLRDSPIGIVTKSPNVMDLVKCDGAALYYGGKLWPLGVTPTEAQIKDIAEWLLEDHRGSTGLNTDSLVEAGYPGASVLGDAVCGMAAVKITSKDFLFWFRSHTA

SEQ ID NO: 8765 - protein, 497 aa, Yarrowia lipolytica CLIB122; identical to SEQ ID NO: 391

SEQ ID NO: 8766 - protein, 313 aa, Synechococcus sp. WH 5701
MQGSNGDKRSAGKNLIHELSGALGDIGTLLPLSLGAIGVAGLAPVPVLLGFAVFYIATGLYYRLPVPVQPMKAVAALLLTTQVSAQSLIASGVLIGAILLLLGSTGWINRAARLVPGSVLSGLQLGLGLLLASMSLELMATSLPLGLVILALLAITLKLFPSWPAALLGLALAMVLGALLGSPGLPLPAHPAIFSMPQLPSMDEWQQGFSILVLPQLALTITNAIVLTALVVGDYFGDQSHRVSPARLSVTTGLANLFLVPFGALPMCHGAGGVAAHYRFGARTGLAPVLLGTGLLLIAFVPGGLSFIAAVPR

SEQ ID NO: 8767 - protein, 353 aa, Methanothermobacter thermautotrophicus str. Delta H
MNRREIAINKLKSLGDVILDDVTQGRIPRIKVPSRGTSNIIYDEDKRHYVLGDRYGTRSMGNVKQIKKIGQMLYTANFCKDLVAREKTATLRELYYISEGWEVDFADQQESNIVGEDLEVTLGMTREELGLMPEEDGASVYGALTVREGDIEIDALRSGKSGYNISPTIDEVEFVDHDVERVIAVETMGMFHRLVQEKAYKKFDALIVGLKGQAARATRRFIKRVNEELNLPVYICNDGDPWGFHIAMVIISGSAKLAHVNHQLATPDAKFLGVTASDIINYDLPTDPLKDVDVVRLKELLQDPRYRGDFWKTEIKKMLTIGKKAEQQSFSKYGLEYVVDTYLPEKLEAVENQ

SEQ ID NO: 8768 - protein, 207 aa, Pongamiopsis amygdalina
RVMAYKFHEDDHGEVIAEVKKPGLEPYLGLHYPATDIPQATRFLFMKNKVRMIVDCRAKHVNVLQDKKVPFDLTLCGSTLRAPHSCHLQYMENMNCSASLVMAVVVNDNDEDGDSDAVQPQKRKRLWGLVVCHNTTPRFVPFPLRYACEFLAQVFAIHVNKEIELEYQIIEKNILRTQTLLCDMLMRDAPLGIVSQSPNIMDLVKCD

SEQ ID NO: 8769 - protein, 326 aa, Cyanothece sp. ATCC 51142
MDYKDYYATLGINKNASADEIKKAFRKLAVKYHPDRNPDDKQAEERFKEISEAYEVLSDPEKRKKYDQFGQYWKQAGQSTWPGAGTNVDMGGFDFSQYGNFEEFINELLGRFSTPGGARTRSYSYSSPGAGYSTNFNDFGGGFGTQTPAPDREATLKLTFSEAFRGVQKRLNLGNEIIDVRIPPGAKNGSRIRVRGKGSSSPYSQNRGDLYLNVELTPHNFFKFEEDNLVCEVPITPDEAVLGTTIDVPTPDGMVTVKVPPGIRSGQSLRLRGKGWVKPKDGRGDQFVKVTIDTPQNLSETERNYYEKIRDSRTYEPRKHLQQISL

SEQ ID NO: 8770 - protein, 230 aa, Arabidopsis thaliana; identical to SEQ ID NO: 7041

SEQ ID NO: 8771 - protein, 500 aa, Kluyveromyces lactis NRRL Y-1140
MSTVKKHTKTHSTYAFESNTNSVAASQMRNALNKLVDSVNDDTVRSKFENEMDSFFSLFRRYLAEKSSGNTLDWDKIKSPSADEVVDYKVVESSQAENVSNLDKLAVLKLNGGLGTSMGCVGPKSVIEVRDGNTFLDLSVRQIEYLNRQYDSDVPLLLMNSFNTDADTEHLIKKYSANRIRIRSFNQSKFPRVLRDSLLPVPQSFNDALDSWYPPGHGDLFESLHSSGELDALLAQGREILFVSNGDNLGATVDLKILNHMIETGAEYIMELTDKTRADVKGGTLISYDGQVRLLEVAQVPKEHVDEFKNIRKFKNFNTNNLWINLRAIKRLIESQALSMEIIPNQKTITRNGHEINVLQLETACGAAIRHFKGAHGVVVPRSRFLPVKTCSDLLMVKSDLFFLEHGALKIDPTRFGANPLIKLGSHFKKVSGFNCHIPHIPKIIELDHLTITGNVYLGKNVTLKGTVIIVCSEGQRIDIPNGSVLENVVITGNLQILEH

SEQ ID NO: 8772 - protein, 462 aa, Candida albicans SC5314
MILNLIILLAISIVASASNIAAYWGQNAGGDQQTLGDYCSSSPASIIILSFLDGFPNLSLNFANQCSGTFSSGLAHCSQIGSDIKSCQQQGKTILLSLGGATGNYGFSSDSEAVQFAGTLWNKFGGGKDSERPFDDAIVDGFDFDIENKDQTGYAALATQLRKYFSTGTKSYYLSAAPQCPYPDESVGDLMSQVDLDFAFIQFYNNYCSLNQQFNWNSWSNYARGKSIKLYLGLPGSSSSAGSGFVGLSTVQRVVASIKGDSSFGGISIWDISSAENGGYLNQLHQALSGSGSPAAPSNSYQPNTPLTRTYGGSTATASAYISVGFTAGATHGSTTTNDLLAWIDSLFGSSQSSVQQYATPVQSVTATPQPVAATTTSAPKPTASAFNWFGWFDGTTTSTTLQTVYSTVPADQTVYVTLTTTVGSQMLQSLFDKRDVIAEAKSTNLQICWLLFIPLLALICS

SEQ ID NO: 8773 - protein, 609 aa, Ustilago maydis 521; identical to SEQ ID NO: 406

SEQ ID NO: 8774 - protein, 323 aa, Zea mays
  misc_feature (199)..(199): Xaa can be any naturally occurring amino acid
MSSFGRNSWCILVLASVLLLSCLAETALANRTGELTVFWGRNKEEGTLREACDTGLYNTVIISFYSVFGHGRYALDLSGHPLDGVGADIKHCQSQGIPVFLSIGGGGNHYSIPSSASAEAVADNLWNAFLGGGNSDVPRPFGDAAVNGIDFYIDDHGAPGDHYDELARRLDYFNSMYYHATTKHVRLTATPRCAFPPDXPMARALRTGLFERIHVRFYGDADKCSYKNGDVSGVVDQWSKWTARYPKSQLYVGLAAAESGVPDHAPPPVEVYLKYLYYDLLPKVQKAPNYGGVMVWNRFTDNRTGYSGAVKGWAACSFAGCVN

SEQ ID NO: 8775 - protein, 392 aa, Chlamydophila caviae GPIC
MDYYDVLGVSKTASPEEIKKSYRKLAVKYHPDKNPGDAEAEKRFKEVSEAYEVLSDPQKRESYDRYGKNGPFAGAGGFGGMGGMGNMEDALRTFMGAFGGEFGGGGSFFEGLFGGLGEAFGMRGDPAGARQGASKKVHITLTFEEAARGVEKELLVSGYKTCETCLGSGAASEQGIKCCDRCKGSGQIVQSRGFFSMASTCPECGGEGRVITDPCSNCRGQGRIKDKRNVHVQIPAGVDSGMRLKMEGYGDAGQNGAPSGDLYVFIDVEAHPVFERRGDDLILELPIGFVDAALGMKKEIPTLLKEGMCRLTVPEGIQSGTILKVKNQGFPNVHGRGRGDLLVRVSVETPQNLSEEQKELLRKFATTEKAENFPKKRGFLDKIKGFFSDFAV

SEQ ID NO: 8776 - protein, 391 aa, Lachnostylis bilocularis
DLEPVNPADVPVTTAGALKSYKLAAKAISRLQSLPSGNISLLCDVLVKEISDLTGYDRVMVYRFHDDEHGEVIAECRRPDLEPYLGLHYPAIDIPQASRFLFMKNKVRMICDCLAPPVKVIQDKRLSQQLSLGGSTLRSPHGCHAQYMANMGSIASLVMSVTINEDDDEMDSDRERGIRLWGLVVCHHTSPRFVPYPLRYACEFLIQVFGVQVSKEVQLAAQMREKHILQTQTVLCDMLLRDAPVAIITQSPNVMDLVKCDGAALYYRKKFWLLGVTPTEAQIKDIAEWLLECHGGSTGLSTDSLMEAGYPGAAVLDDAVCGMAAVRITSKDFLFWFRSHTAKEIKWGGAKHDPEDKDDGRKMHPVSSFKAFLDVVKQRSLPWEDIEMDAI

SEQ ID NO: 8777 - protein, 391 aa, Leonia glycycarpa
DLEPVNPIDVPVTAAGALKSYKLAAKAISRLQSLPSGNISLLCDVLVKEVSELTGYDRVMVYRFHEDEHGEVIAESCKPGLEPYLGLHYPATDIPQASRFLFMKNKIRMICDCLAPPVKVVQDKRLDQPLSLCGSALRSPHGCHSQYMTNMGSIASLVMSVTINEDDDEMDSDQQKGRKLWGLVVCHHTSLRFVPFPLRYACEFLIQVFGVQINKEVKLAAQMKEKHILQTQTVLCDMLLRDAPVAIITQSPNVMDLVKCDGAALYYGKKFWLLGVTPTEAQIRDIAEWLLEYHSGSTGLSTDSLMEAGYPNASILGDPVCGMAAVRITSKDFLFWFRSHTAKEVKWGGAKHDPDDKDDGRKMHPRSSFKAFLEVVKQRSLPWEDVEMDAI

SEQ ID NO: 8778 - protein, 369 aa, Helicobacter pylori J99
MELSYYEILEVEKHSNQETIKKSYRKLALKYHPDRNAGDKEAEEKFKLINEAYGVLGDEKKRALYDRYGKKGLNQAGTSQSDFSDFFEDLGSFFEDAFGFGARGSKRQKSSIAPDYLQMIELSFKEAVFGCKKTIKAQYQSVCESCDGTGAKDKALENCKQCNGQGQVFMRQGFMSFAQTCGACQGKGKIIKTPCQACKGKTYILKDEEIDAIIPEGIDDQNRMVLKNKGNEYEKGKRGDLYLEARVKEDEHFKREGCDLFIKAPVFFTTIALGHTIKVPSLRGDELELKIPRNAKDRQAFAFRNEGVKHPESSYRGSLIVELQVIYPKSLNKEQQGLLEKLHASFGYEGEPHKSVLETCVSKIKDWFK

SEQ ID NO: 8779 - protein, 391 aa, Gymnosporia arbutifolia
DLEPVNPADVPITAAGALKSYKLAAKAISRLQSLPSGNMSLLCDVLVKEVSELTGYDRVMVYRFHDDDHGEVVGECCRPDLEPYLGLHYPATDIPQASRFLFMKNKVRMICDCLAPPVKVLQDKRLAQPLSLGGSTLRSPHGCHAQYMSNMGSIASLVMSVTINEDDDETTSDQQKGRKLWGLVVCHHSTPRFVPFPLRYACEFLIQVFGVQINKEVELATQLKEKHILRTQTVLCDMLLRDAPVGILTQSPNVMDLVKCDGAALYYRNKFWLLGVTPTETQITDIAEWLLEYHSESTGLSTDSLMEAGYPDASILGEAVCGMAAIKITSKDFLFWFRSHTAKEMKWGGAKHNPDDKDDGKRMHPRSSFKAFLVVVKRRSLPWEDIEMDAI

SEQ ID NO: 8780 - protein, 134 aa, Zea mays
  misc_feature (25)..(25): Xaa can be any naturally occurring amino acid
  misc_feature (58)..(58): Xaa can be any naturally occurring amino acid
  misc_feature (67)..(67): Xaa can be any naturally occurring amino acid
  misc_feature (78)..(78): Xaa can be any naturally occurring amino acid
  misc_feature (87)..(87): Xaa can be any naturally occurring amino acid
  misc_feature (100)..(100): Xaa can be any naturally occurring amino acid
STSRPSFPTKPEEYCMEVLQELADXGRTLISYEGRVQLLEIAQGPYEHVNEFESIEKXEIFNTNYLXVILKAIKRLVXVEALNMEIXPNRKDVDGVKDLXLTTAAGADIKSLDKATGVNVRRSRALKMKDTSDL

SEQ ID NO: 8781 - protein, 377 aa, Grahamia bracteata
TDVPVAAAGAFKSYKLAAKAISRLQSLPSRNMLLLCDVLVKEVGELTGYDRVMVYKFHEDEHGEVISEYRRPNLEPYLGLHYPATDIPQASRFLFLKNRVRMICDCLATPVKVIQDKKLTQALSLGGSILRAPHGCHAQYMANMGSIASLVMAVTINEDEDEVKSDPSSGKRLWGLVVCHHASSRFISFPLRYACELLVQVFGIQINKEVELAAQIRESHILRIQTVLCDMLLRDSPVAIVTQSPNVMDLVKCDGAALYYKGQVWLLGSTPTQEQIKNITQWLLEYHGSTKGLSTDSLMEAGYPRASELGDPVCGMAAVRISSKDFLFWFRSHTAKEVKWGGAKHDPIDNDDERKMHPRSSFKAFLEVVKWRSQPWE

SEQ ID NO: 8782 - protein, 392 aa, Gymnosporia senegalensis
DLEPVNPADVPITAAGALKSYKLAAKAISRLQSLPSGNMSLLCDVLVKEVSELTGYDRVMVYRFHDDDHGEVVAECCCRPDLEPYLGLHYPATDIPQASRFLFMKNKVRMICDCLAPPVKVLQDKRLAQPLSLGGSTLRSPHGCHAQYMTNMGSIASLVMSVTINEDEDETNSDQQKGRKLWGLVVCHHSTPRFVPFPLRYACEFLIQVFGVQINKEVELATQLKEKHILRTQTVLCDMLLRDAPVGILTQSPNVMDLVKCDGAALYYRNKFWLLGVTPTETQVKDIAEWLLEYHSESTGLSTDSLMEAGYLDASILGEAVCGMAAIKITSKDFLFWFRSHTAKEMKWGGAKHDPDDKDDGKRMHPRSSFKAFLVVVKRRSLPWEDVEMDAI

SEQ ID NO: 8783 - protein, 197 aa, Mesorhizobium ciceri subsp. biserrulae
FAEFPELEQLPLWGFDGSSTQQAEGHSSDCVLKPVAVYPDPPRTNGVLVMCEVMMPDGVTPHASNKRATILDDEGAWFGFEQEYFFYKDGRPLGFPESGYPAPQGPYYTGVGYSNVGSVARQIVEEHLDLCLAAGINHEGINAEVAKGQWEFQIFGKGSKKAADQMWMARYLLQRLTEKYGIDIEYHCKPLGDTDWN

SEQ ID NO: 8784 - protein, 821 aa, Aspergillus nidulans FGSC A4
MGNSQTKETRPSHSQSSRRSHQWGSGSSHGRSPYGDRHNSEGSRSHRSSRPDLSILGLGGSSDRDVATILEHRRETKQEREARRLEKERAARIKERERSMREEHVDGGYLVTQGVYTGTEDFNKAIVRQLMIERRLAPFWRGLNDFSDSWTEHQLMAAARGLPIPPPDEIPPELEYRNPPKVVEEAKEASNIQSVQHLMVPITSRSASNGSDVSHSSQPAHSLPSPSSPIASGTSSSPLFRSRAKTLASLTTSRHNSQVDSTPQEIQLPRDPFVNGQPIEAYLYKDAIECPICFLYYPPYLNRTRCCDQPICSECFVQIKRPDPHPPEHADSDSNAPNPAGETERQDVQDIQLVSEPAACPFCVQPEFGVAYVPPPFRRGLAYASDSSGRPNIGTPVSSTSSLSSATTPTTGRRRATSLSATDPSVITTDKVRPDWAQKLANARAHAARRSAAATALHTAAYLMNSNGSGGDTRGFSMRRGVMRRNNGGQDSPGTPGRSGSPALQAFAFLTDRRAPSGQETDSAEEGTSNLAPPRNSSRRSRMDDLEEMMMMEAIRLSLASEEERRKREEKELRKEAKRREKEAKKAEKMARKAGLYSNNASSSALESPSDSRLPKVTSSSSSIIGEERTPPGKGKAVERVTPSQSNVDLTETASSGDVPSSFLEPQQPQSSSSLGPPVPKEPSKPSHLRHVSSASSSFSSLVESMSEEPGLSAQPHEGTSSSAEPLFNFRSLAAVIGDEDKSDEAAEHVEDTAPHTTSEGSTSSAANLTTAPAGESAVSTSSTAVEKGPTVEESQECSVNKEIETRSMEVTDSRNSETTS

SEQ ID NO: 8785 - protein, 377 aa, Maihuenia poeppigii
TDVPVAAAGAFKSYKLAAKAISRLQSLPSRNMSLLCDVLVKEVRELTGYDRVMVYKFHEDEHGEVISEYRRPDLEPYLGLHYPATDIPQASRFLFLKNRVRMICDCLATPVKVIQGKKWAQPLSLGGSILRAPHGCHALYMANMGSIASLVMAVTINEDEDEVKSDPSTGKRLWGLVVCHHTSSRFIPFPLRYACELLVQVFGIQINKEVELAAQIRESHILRIQTVLCDMLLRDSPVAIVTQSPNVMDLVKCDGAALYYKGQVWLLGITPTEEQIKNITQWLLEYHGSTKGLSTDSLMEAGYPGASELGDAVCGIAAVRISSKDVLFWFRSHTAKEIKWAGAKHDPVDGDDRRKMHPRSSFKAFLEVVKWRSQPWE

SEQ ID NO: 8786 - protein, 391 aa, Mesua sp. Coode 7884
DLEPVNPADVPVTAAGALKSYKLAAKAISKLQSLPSGNISLLCDVLVKEVCELTGYDRVMVYKFHEDDHGEVVAECRRPDLEPYLGLHYPATDIPQASRFLFMKDKVRMICDCLAPPAKVIQDNGLTQALSLCGSTLRAPHGCHAQYMENMGSIASLVMSVTINDDDDEMASDRQKGRKLWGLVVCHHTGPRFVPFPLRYACEFLIQVFGIQITKEAELAAQIREKHILETQTVLCDMLLRDSPMAIVIQSPNVMDLVKCDGAALYFKEKFWLLGITPTEAQIRDISEWLLDYHNGSTGLSTDSLMEAGYPGASILGDAVCGMAAIRVNSKDFLFWFRSHTAKEIKWGGAKHDPGDKDEGRKMHPRSSFKAFLEVVKWRSLPWEDMEMDAI

SEQ ID NO: 8787 - protein, 834 aa, Debaryomyces hansenii
MVNLSSSKFHITEPADEDIQSTSVNGNQKGHEDSCNRSSTPKFGSISRFFFNKEQSVSSDVSNADSTVSSNTDSLNHNHGSKSGVTNSEAREDEHDDAKQQPGLSKLKSFLRLSSNSLLLSNNGPNDNGEQNGPKGTDVITPNAESVTPVRSNEEKTKLKHESDRNEEGHNGNKDGSNVSTKQEASAGMMKKFMLGRKRSVSSPTSPATGNRKPQQSNLSINTESPKDIPEIITENTESPVISSNLYFAHQGLPPHMNNHNKNNHTLAASAANEDDISVALRHNDSVFSLNDGGPLKPPNVYQSKLSASDESGSEHEPIPEHTTESGLKTPEESTLQNKNKLEVPPHTLPHPGQASPFQKTLRRVASAPLVHRLLNDSNTRLPQTRAYVSNDDDFDITEHIGELKSGRPRTLSRGRMYSSASTKIMDAQVNQNSFKKIRLLGKGDVGKVYLVKENLSNRLYAMKILSKKEMIERNKIKRALAEQDILATSNHPFIVTLYHSFQSNDYLYLCMEYCMGGEFFRALQTRETKTISETDAKFYAAEVTAALEYLHLMGFIYRDLKPENILLHQSGHIMLSDFDLSKQSESTKNPEIFFSKTSHGLSSSNNHNGPTLDTKACIDGFRTNSFVGTEEYIAPEVIRGKGHTSAVDWWTLGIFIYEMLFGTTPFKGRDRKKTFGNVLKKEVKFLETRSISSSCKSLIKKLLIKDEAKRLGSKTGASDIKNHAFFKNTQWALLRHQKPPMIPVLSKNKRADKVERYDSEEDQITDSTTDVSENKDILNDPFANFSSVTLHYNELDSGDDQMVYNEADNTVYTSVAYTMTNDSSPKPKHFLKR

SEQ ID NO: 8788 - protein, 68 aa, Rubia tinctorum
GEVMPGQWEFQVGPSVGIEAGDHIWCARYLLERITEQAGVVLTLDPKPISGDWNGAGAHTNYSTKSMR

SEQ ID NO: 8789 - protein, 313 aa, Arabidopsis thaliana
MGVDYYNVLNVNPSATEDDLKKSYRRLAMKWHPDKNPTSIKQEAEAKFKQISEAYDVLSDPNKRQIYDQYGEDGLTATEATASSQQHNYSSGNNNNYNAGFRYYPRDAEDIFAEFFGASEKVFDGGVGGGGRKAPAIESKLACTLEELYKGGRRKMKISRVVPDGLGKSKPVEEILKIDITPGWKKGTKITFPEKGNQEPGVTPADLIFVIDEKPHSVYKRDGNDLIVDKKVSLLEALTGITLSLTTLDGRNLTIPVLDIVKPGQEIVIPSEGMPISKEGSKRGDLRINFEICFPSRLTSEQKTDLKRVLGGS

SEQ ID NO: 8790 - protein, 68 aa, Calycophyllum candidissimum
GEVMPGQWEFQVGPSVGIEGGDHIWCARYLLERITEQAGVVLTLDPKPIQGDWNGAGCHTNYSTKSMR

SEQ ID NO: 8791 - protein, 313 aa, Samadera baileyana
AKAISRLQSLPSGNLSLLCDVLVKEVSELTRYDRVMVYKFHEDEHGEVVAECRRPDLEPYLGLHYPATDIPQASRFLIMRNKVRMICDCLAPSVQVIQDKKLDQPLSLCGSTLRAPHACHAQYMENMGSIASLVMSVTINEEDDELDNDQLQGRKLWGLVVCHHTSPRFVSFPLRYACEFLIQVFGVQVNKEVKLAAQLREKHILRTQTILCDMLLRGSPIGIVTQSPNVMDLVKCDGAALYYGGKLWLLGVTPTEAQIKDIAEWLLKYHRGSTGLSTDSLTEAGYPDASVLGDAVCGMAAVKITSKDFLFWF

SEQ ID NO: 8792 - protein, 307 aa, Triticum aestivum
TRVTISKRPASSLLPAVAALVAVAGLLSLAGPAAATGKTGQVTVFWGRNKAEGTLREACDTGTYTIVVISFLSVFGQGGNKPPTLDLSGHPIAGIGDDIKHCQSKSIMVFLSIGGFGDHYSLPSAKAATDLADYLWYAYFPAPTPRAGVHRPFGDAYVDGLDFFLDRGSPAYYDVLAKRLWSYNRQFRARTPVQLSATPRCAFPDRQVQRVLATGLVTRINVRFYGDAHCAAYWQQEWDKWTAAFPEDSIYVGLPASEQTVGYVHPKNLYYGVVPVVQKAANYGGFMIWDRYADKQTNYSSYAIQYA

SEQ ID NO: 8793 - protein, 489 aa, Physcomitrella patens subsp. patens
MATTLETVQEARPLGPIQSYFKELRENVRYRSLWEEVNGCLGDLGTFVPIVIALTLVNGLDLGTTLIFTGICNIVTGLMFGTPLPVQPMKSIAAAAITPGDILTIPQIMAAGISTGALLVGLGATGLMTLVNFLVPLPVVRGIQLSQGLAFGITAVKYILNEQKFSTGKTGGARPWLGLDSKLLAICALAFIILVSGSGEYTVHAFPKDSIESSNEGNNPNEERGSKRSWSRKLLLIPTALSVFVLGVVLAFIRQPSIVKHLNFGPSTPQVVRITASDWKTGFVRGTIPQLPLSVLNSVIAVCKLSNDLFPTKLQVTPVKVSVGLMNVIGCWFGAMPACHGCGGLAGQYRFGARSGASVVFLGTAKLLLSLLLGSSLVQILRFFPVALLGVLLLFSGLELAMTCRDQSTRTEVFILLSVTAVSLTNSNAALGFGAGMCIVVLLKMRERETWVKLRNLLPCLKNRNPTPEPFPSETDDKTGISGPHSHIV

SEQ ID NO: 8794 - protein, 872 aa, Escherichia coli O157:H7 EDL933
  misc_feature (565)..(565): Xaa can be any naturally occurring amino acid
MSILTRWLLIPPVNARLIGRYRDYRRHGASAFSATLGCFWMILAWIFIPLEHPRWQRIRAEHKNLYPHINASRPRPLDPVRYLIQTCWLLIGASRKETPKPRRRAFSGLQNIRGRYHQWMNELPERVSHKTQHLDEKKELGHLSAGARRLILGIIVTFSLILALICVTQPFNPLAQFIFLMLLWGGALIVRRMPGRFSALMLIVLSLTVSCRYIWWRYTSTLNWDDPVSLVCGLILLFAETYAWIVLVLGYFQVVWPLNRQPVPLPKDMSLWPSVDIFVPTYNEDLNVVKNTIYASLGIDWPKDKLNIWILDDGGREEFRQFAQNVGVKYIARTTHEHAKAGNINNALKYAKGEFVSIFDCDHVPTRSFLQMTVGWFLKEKQLAMMQTPHHFFSPDPFERNLGRFRKTPNEGTLFYGLVQDGNDMWDATFFCGSCAVIRRKPLDEIGGIAVETVTEDAHTSLRLHRRGYTSAYMRIPQAAGLATESLSAHIGQRIRWARGMVQIFRLDNPLTGKGLKFAQRLCYVNAMFHFLSGIPRLIFLTAPLAFLLLHAYIIYAPALMIALXVLPHMIHASLTNSKIQGKYRHSFWSEIYETVLAWYIAPPTLVALINPHKGKFNVTAKGGLVEEEYVDWVISRPYIFLVLLNLVGVAVGIWRYFYGPPTEMLTVVVSMVWVFYNLIVLGGAVAVSVESKQVRRSHRVEMTMPAAIAREDGHLFSCTVQDFSDGGLGIKINGQAQILEGQKVNLLLKRGQQEYVFPTQVARVMGNEVGLKLMPLTTQQHIDFVQCTFARADTWALWQDSYPEDKPLESLLDILKLGFRGYRHLAEFAPSSVKGIFRVLTSLVSWVVSFIPRRPERSETAQPSDQALAQQ

SEQ ID NO: 8795 - protein, 337 aa, Glycine max
MGVDYYKLLQVDRNVSDEDLKKAYRKLAMKWHPDKNPNNKRDAEAKFKQISEAYDVLSDPQKRGVYDQYGEEGLKGQVPPPGAGGFSGGSDGGPTMFRFNPRSADDIFSEFFGFSSPYGMGDMGGRAGPSGYPRFADDLFASFSRSAAGEGPGNVLRKSAPIEKTLQCSLEDLYKGTTKKMKISRDVIDASGRPITVEEILTIEIKPGWKRGTKVTFPEKGNEQRGVIPSDLVFIIDEKPHGVFKRDGNDLVVTQKISLVEALTSYTGQLTTLDGRNLTVSTNSVISPIYEEVIKGEGMPIPKEPSKKGNLRIKFNIKFPSRLTSEQKTGIKRLLTS

SEQ ID NO: 8796 - protein, 308 aa, Samadera bidwillii
AKAISRLQSLPSGNLSLLCDVLVKEVSELTGYDRVMVYKFHEDEHGEVVAECRRPDLEPYLGLHYPATDIPQASRFLIMRNKIRMICDCLAPSVQVIQDKRLDQPLSLCGSTLRAPHACHAQYMENMGSIASLVMSVTINDEDDKLDNDQQQGRKLWGLVVCHHTSPRFVSFPLRYACEFLIQVFGVQVNKEVKLAAQLREKHILRTQTVLCDMLLRGSPIGIVTQSPNVMDLVKCDGAVLYYGRKLWLLGVTPTEAQIKDIAEWLLKYHRGSTGLSTDSLTEAGYPDASVLGDAVCGMAAVKITSKD

SEQ ID NO: 8797 - protein, 66 aa, Ixora parviflora
GEVMPGQWEFQVGPSVGIEAADHIWCARYLLERITEQAGVVLTLDPKPIEGDWNGAGCHTNYSTKS

SEQ ID NO: 8798 - protein, 218 aa, Picea sitchensis
MVKLTMIARVTDGLPLAEGLDDGREQKDLEFYKQQAKSLFKKLSQGQHEPSRMSYETGPFVFHYIIEARVCYLTMCDRSYPKKLAFQYLEELKNEFEKLYQSQVETVARPYAFIKFDTFIQKTRKLYLDTRTQRNLAKLNDDLYEVQQIMTRNVQEVLGVGEKLDQVSQMSSRLSSESRKYADKAKDLSRQAFIKKWAPVAIVLGVVFVLLWMRRYIW

SEQ ID NO: 8799 - protein, 50 aa, Chiococca alba
GEVMLGQWEFQVGPSVGIEAADHIWCARYLLERITEQAGVVLSLDPKPIE

SEQ ID NO: 8800 - protein, 500 aa, Debaryomyces hansenii
MSATAPKKHTKTQSTYAFDNTATNIAASQMRNALNNLADTVQDSEKQSRFENEMDSFFALFRRYLTDKAAGSTLDWEKVKSPSPDEVVQYKSLSENGANNLDKLAVLKLNGGLGTSMGCVGPKSVIEVRDGNTFLDLSVRQIEHLNRKYDADVPLLLMNSFNTDADTEKIIKKYQGHRIRVKTFNQSRFPRIFKDSLLPVPQSFDDDLDSWYPPGHGDLFESLISSGELDSLLEQGREVLFVSNGDNLGATVDSKILDHMIDTGAEYIMELTDKTRADVKGGTLINYEGQVRLLEIAQVAKEHVEDFKSIKKFKYFNTNNLWINLRAIKKLVEADGIQAEIIPNQKTISKGSSDINVLQLETAVGAAIKHFNKAHGVVVPRSRFLPVKTCSDLLLVKSDLFFLEHGALKLDPVRDGFANPLIKLGSHFKKVSGFQSRIGHMPRILELDHLTITGNVTLGKNVTLKGTVIIVCNDGDKIDIPNGSILENVVVTGNLTILEH

SEQ ID NO: 8801 - protein, 1018 aa, Solanum lycopersicum
MEEENKQSPLIPPLPRDPRGSLEVFNPSTYSSRSTNPVFRSQPSWKNWTAADPITRSTIPETEEKTEQIAIPQIRVTKMNKSLLHGWQLLRLQRNWLLRLLKNQLPVVRRFNSKAAVDEVGAAAQRAAEWGLVLKTDDETGKLQGVKVRTSGDDTNGKTETSRRDSGNSGRSSGEFSDDGAGKERGIPRVSEDLRDALSTFQQTFVVSDATKPDYPILYASAGFFKMTGYTSKEVIGRNCRFMQGSGTDPEDVATIREALQSGSTYCGRLLNYKKDGTPFWNLLTIAPIKDDAGKVLKFIGMQVEVSKHTEGSKEKTVRPNGLPESLIRYDVRQKEMASNSVNELLEEIKNPRRARALSESTNNRPTFMRKSEGDQVEQDKQDTHKLNLVNKAPARRHSHAGTRTTTMKMEKINEVPEKKPKKSARLSFMGIMKKKRSSTTMTTDDDDFEARMTMDNDDDDDDESDNDGRPVSVDDKVRKKEMRKGIDLATTLERIEKNFVITDPRLPDNPIIFASDSFLELTEYSREEILGRNCRFLQGPETDPATVKKIRQAIDNQTDVTVQLINYTKTGKKFWNLFHLQPMRDQKGEVQYFIGVQLDGSQHVEPLQNSIPEDKATESAKLIKETAGNVDEAVRELPDANSKPEDLWRNHSKVVQPKPHRKDSPSWKAIQKILESGEPIGLKHFKPIKPLGSGDTGSVHLVELCGTDQHFAMKAMDKSIMLNRNKVHRACAEREILDMLDHPFLPALYASFQTKTHICLITDYYPGGELFMLLDRQQTKVLKEDAARFYAAEVVVALEYLHCQGIIYRDLKPENVLLQSGGHVSLTDFDLSCLTSCKPQLLVPEINEKKKHQKGQHNPIFMAEPMRASNSFVGTEEYIAPEIITGAGHTSAVDWWALGILLYEMLYGYTPFRGKTRQKTFSNILHKDLKFPGSIQSSLHAKQLMYRLLHRDPKNRLGSREGANEIKQHPFFRGVNWALIRCMNPPKLDSAPFLGTESEKEGKDINPEMEDLQTNVF

SEQ ID NO: 8802 - protein, 275 aa, Triticum aestivum
  misc_feature (258)..(258): Xaa can be any naturally occurring amino acid
AYLGDTIEQVCTKKQAGTGPEFPGYRRPTRPRIVTEDFLPLPSKGQTGKDGWYPPGHGDVFPSLNNSGKLDTLLSQGKEYVFVANSDNLGAIVDIKILNHLITNQNEYCMEVTPKTLADVKGGTLISYEGRVQLLEIAQVPDEHVNEFKSIEKFKIFNTNNLWVNLKAIKRLVDAEALKMEIIPNPKEVDGVKVLQLETAAGAAIRFFEKAIGIYVPRSRFLPVKATSDLLLVQSDLYTLADGYVIRNPARVKPSKPXSIELGPEFKKVANSLAR

SEQ ID NO: 8803 - protein, 976 aa, Pisum sativum
MEHLKKSPSSSSSSSMRPSFPRDPRGSLEVFNPTSNSSSPVRSPSNLKNWTEIEEPRNELSEQHNEFSDEVTNTSWMAIKEGETGAAVQRAAEWGLMLTTDAETGKPQGVAVRNSGGDEPSVKLETKRNSNNTVRTSGESSDGDDPRGFPRVSEDLKDALSAFQQTFVVSDATKPDYPILYASAGFFKMTGYTSKEVIGRNCRFLQGADTDPDDVARIREALEGGKSFCGRLLNYKKDGTPFWNLLTISPIKDDDGNVLKLIGMLVEVNKHTEGSKEKKLRPNGLPESLIRYDARQKEKATSSVSELLEAMKRPRALSESGQRPFIRKSGGGGGSEEDEEAVENKSRRKSDSVASFRPKPQGKIRHSMERISELPENKQKNSRRGSFMGFMRKSDSIDESIDNEVIVDVSSGSEDDERDDSFEFDDKEKLREKRKGLDLATTLERIEKNFVITDPRLPDNPIIFASDSFLELTEYSREEILGKNCRFLQGPETDPATVRKIREAIDNQTEVTVQLINYTKSGKKFWNLFHLQPMRDHKGEVQYFIGVQLDGSQHVEPLHNCIAEDTAKEGELLVKETAENVGEAVKELPDANQKPDDLWMNHSKVVRPKPHRKDDDAWRAIQKVLENGEQVGLKHFRPIKPLGSGDTGSVHLVELEGTGQYFAMKAMDKGVMLNRNKVHRACTEREILDMLDHPFLPALYASFQTKTHVCLITDYYSGGELFLLLDQQPTKVLKEDSVRFYAAEVVIALEYLHCLGIIYRDLKPENVLIQSNGHVSLTDFDLSCLTSCKPQLILPAIEEKKKRKKKKNKGQQKNQQVPMFMAEPMRASNSFVGTEEYIAPEIITGSGHTSAVDWWALGILLYEMLYGYTPFRGKTRQKTFANILHKDLKFPKSKPVSPHGKQLIYWLLHRDPKNRLGSLEGANEIKNHPFFKNINWALVRCTKPPELDGPILLDNDEKKEAKEIDPGLDDLQKNIF

SEQ ID NO: 8804 - protein, 963 aa, Vicia faba
MEPFTRDHRGSLEVFNPSSSETNGTPNPNPNPNPSNSWNTGTSSRGTEAPPLRDSIISDEVPTATSWMALKETTPSPKSGESGSVAEQRAAEWGLVLKTDSETGKPQGVGVRGSGGGGGSRRDSNNSVRSSGESSDDGREGGRGIPRVSEDLRDALSAFQQTFVVSDATKPDYPIMYASAGFFSMTGYTSKEVIGRNCRFMQGADTDPNDVAKIREALAAGTSYCGRLLNYKKDGTTFWNLLTIAPIKDEHGKILKLIGMQVEVSKHTEGTKEKMLRPNGLPESLIRYDARQKEKANSSVTELVEAVSKRPRSLSESANRLPFNKKPTNGSNDHATPPNSESSSRKSGSTLRSFRRKSHSGAGNSNSMHPITELPENNNKSRRRSFMGFMRKSLSNNERFNHEQVIDRNSSEDEDRLDSFDEQNIAQKREKRKGFDLATTLERIEKNFVITDPRLPDNPIIFASDSFLELTEYSREEILGRNCRFLQGPETDPATVKKIRYAIDNQTEVTVQLINYTKTGKKFWNLFHLQPMRDQKGEVQYFIGVQLDGSQHVEPLHNGIAEDTAKEGENLVKKTAENVDDALRELPDANMKPEDLWMNHSKVVHPKPHRREDSAWRAIQKIMESGEQIGLKHFKPIKPLGSGDTGSVHLVELCGTDHHFAMKAMDKGVMPNRNKVHRACTEREILDMLDHPFLPALYASFQTKTHICLITDYCPGGELFMLLDRQPAKVLKEDAVRFYATEVVVALEYLHCQGIIYRDLKPENVLLQSTGHVSLTDFDLSCLTSCKPELIVPSTNDKKKGQHGPIFMAEPMRASNSFVGTEEYIAPEIITGSGHTCAVDWWALGILLYEMFYGYTPFRGKNRQRTFANILHKDLKLPKSKQVSLSAKQLIYHLLQRDPTSRLGSKGGANDIKHHSFFKGINWALVRCTKPPELDAPLFDTNKEEKEKDDKYVDNGQEDMSVF

SEQ ID NO: 8805 - protein, 473 aa, Zea mays
MATTAVSVDEKLDKLRAEVAKLDQISENEKSGFISLVSRYLSGEAEQIEWSKIQTPTDEVVVPYDTVASPPEDLEETKKLLDKLVVLKLNGGLGTTMGCTGPKSVIEVRNGFTFLDLIVIQIESLNKKYGCNVPLLLMNSFNTHDDTQKIVEKYSNSNIEIHTFNQSQYPRIVTEDFLPLPSKGKSGKDGWYPPGHGDVFPSLNNSGKLDILLAQGKEYVFVANSDNLGAIVDIKILNHLINNQNEYCMEVTPKTLADVKGGTLISYEGRVQLLEIAQVPDEHVNEFKSIEKFKIFNTNNLWVNLKAIKRLVEAEALKMEIIPNPKEVDGVKVLQLETAAGAAIRFFDKAIGINVPRSRFLPVKATSDLLLVQSDLYTLVDGFVIRNPSRANPANPSIELGPEFKKVANFLARFKSIPSIVELDSLKVSGDVWFGSGITLKGKVTIIAKPGVKLEIPDGDVLENKDVNGPEDL

SEQ ID NO: 8806 - protein, 297 aa, Vitis vinifera
MARTPQSTPLLISLSVLAFLQTTYAGGIAIYWGQNGNEGTLTQTCNTGKYSYVNIAFLNKFGNGQTPEINLAGHCDSASNGCTSVSTDISNCQSQGVKVMLSIGGAIGSYSLSSSDDAQNVANYLWNNFLGGRSSSRPLGDAVLDGIDFVILLGSTQYWDDLARALSGFSQRGRKVYLTAAPQCPFPDKFMGTALNTGRFDNVWVQFYNNPPCQYTSGNTTNLLNSWNRWTSSINSRIFLGLPAASAAAGSGFILPNVLTSQILPVIKTSPKYGGVMLWSKYYDDQSGYSSTIKSSV

SEQ ID NO: 8807 - protein, 377 aa, Cupriavidus taiwanensis
MAKRDYYEVLGVGKNASDDEIKKAYRKLAMKFHPDRNPDSKDAEEKFKEAKEAYEMLSDPEKKAAYDQYGHAGVDPNMAGGFGGAQGYGGFAEAFGDIFGDIFGQGGGGRRGGGPQAYRGADLRYSMEISLEQAAHGHEAQIRVPHWDDCDHCHGNGAEPGSSVETCPTCHGAGQVRVSQGFFTMQQTCPKCHGSGKFIPKPCTKCHGQGKLKSQKTLEVKIPAGIDEGMRIRSSGNGEPGINGGPPGDLYVEVHIKPHAVFERDGDDLHCQMPISFATAALGGDLEVPTLSGKATFPVPEATQSGKTFRLRGKGIKGVRSGYPGDLYVHVNVETPVKLTEAQKEMLRQFDRSVHEGGSRHSPQETSWLDKVKSFFS

SEQ ID NO: 8808 - protein, 327 aa, Vigna unguiculata
MAPQRLALIILLLSLFTFSSSRAENGGIAVYWGQDAREGNLIATCDSGKYAIVLLAFLHQFGAGRTPTLNFAGHCGDSSGRSCGLLQPQINYCQAKGIKVLLSIGGPTGGYWLSSAEDAKDVANYLFINFLSGEFGPLGSVMLDGVDFHVETSEDYWDDLARELDLLRQTTGRYFYLSAAPQCPTDPIPYLGKAIATNLFDYIFVQFYDNPSCSYTDGTSALLESWDKWVDSVASNNSLFVGVPAAPSAGDGYIPPEVLNDEVLPHAKEASNYGGVMLWDRYRDVQNGYSDSIMSNVIKSKLKVSVVSVSDAIYRGVSKALRRLLVY

SEQ ID NO: 8809 - protein, 425 aa, Oryza sativa; identical to SEQ ID NO: 431

SEQ ID NO: 8810 - protein, 191 aa, Solanum lycopersicum
AGINISGTNGEVMPGQWESQVGPSVGIEGGDHIWCARYLLERITEQAGVVLSLDPKPIEGDWNGAGCHTNYSTLSMRGEGGFEVIKKAILNLSLRHKEHISAYGEGNERRLTGKHETASIDQFSWGVANRGCSIRVGRDTEKEGKGYLEDRRPASNMDPIVVTGLLAETTILWEPTLEAEALAAQKISLKV

SEQ ID NO: 8811 - protein, 218 aa, Oryza sativa Japonica Group
MVKLTMVARVTDGLPLAEGLDDGRDQKDADFYKQQAKLLFKNLSKGQHEASRMSIETGPYFFHYIIEGRVCYLTMCDRSYPKKLAFQYLEDLKNEFERVNGSQIETAARPYAFIKFDTFIQKTKKLYLDTRTQRNLAKLNDELYEVHQIMTRNVQEVLGVGEKLDQVTEMSTRLTSDTRMYADKAKDLNRQALIRKYAPVAIVIGVVLMLFWLKNKIW

SEQ ID NO: 8812 - protein, 165 aa, Physcomitrella patens subsp. patens
GRKPRGRPPGSKNKPKPPVIITRENGNAMRPHILEVAGGCDVSDSVASFSRRRQRGVCVMGASGTVSNVTLRQPTTPGATVTFHGRFEIISLSGAFLPHPSSAPTTGLTVSLAGAAGQVLGGSVVGTLMAAGPVLVIAASFIGPTFERLPLDNDDEGLTMGGGSS

SEQ ID NO: 8813 - protein, 391 aa, Micrantheum hexandrum
DLEPVNPADVPVTAAGALKSYKLAAKAISRLQSLPSGNISLLCDVLVKEVSELTGYDRVMVYRFHEDEHGEVIAECCQPDLEPYLGLHYPATDIPQASRFLFMKNKVRMICDCMALPVKVLQDERLSQPLSLSGSTLRSPHGCHAQYMANMGSVASLVMSVTINDDDDGLDSDQQAGRKLWGLVVCHHTCPRFVPFPLRYACEFLIQVFGVQINKEVELAVQMREKHILQIQTVLCDMLLRDAPVAIITQSPNVMDLVKCDGAALYYRKKIWLLRVTPTEAQIRDIAEWLLESHSGSTGLSTDSLMEAGYPGASVLGDAVCGMAAVRITSKDFLFWFRSHAAKEIKWGGAKHDPDDKDDGRKMHPRSSFKAFLEVVKRRSLPWEDIEMDAI

SEQ ID NO: 8814 - protein, 433 aa, Vitis vinifera
MAHITAPSVQCQVRVVPTSSFTARPMTAKLWNSLLLNQRKKGTSRSSARFRVLALQSESSTVNRLKDLLNLDITPYTDKIIAEYIWIGGSGIDLRSKSRTISKPVKHPSELPKWNYDGSSTGQAPGEDSEVILYPQAIFKDPFRGGNNILVICDSYTPAGEPIPTNKRHGAAEIFSSQKVINEVPWYGIEQEYTLLQTNVKWPLGWPVGGYPGPQGPYYCGAGADKSFGRDISDAHYKACLYAGINISGTNGEVMPGQWEYQVGPSVGIEAGDHIWCSRYILERITEQAGVVLSLDPKPIEGDWNGAGCHTNYSTKSMREDGGFEVIKKAILNLSLRHEVHISAYGEGNERRLTGKHETASIDTFSWGVANRGCSIRVGRDTEKNGKGYLEDRRPASNMDPYVVTSLLAETTILWEPTLEAEALAAQKLSLKV

SEQ ID NO: 8815 - protein, 391 aa, Microdesmis puberula
DLEPVNPADVPVTAAGALKSYKLAAKAISRLQSLPSRNISLLCDVLVKEVSDLTGYDRVMVYRFHEDEHGEVVAECCRTELEPYLGLHYPATDIPQASRFLFMKNKVRMICDCQAPPVKVLQDRRLAQPLSLCGSTLRSPHGCHAQYMANMGSVASLVMSVTINEDDDEMHSDQQKGRKLWGLVVCHHTSPRFVPFPLRYACEFLIQVFGVQINKEVELAAQMREKHILRIQTLLCDMLLRDSPVAIITQSPNVMDLVKCDGAALYYNNKFWLLGVTPTEAQIRDISEWLLEYHSGSTGLSTDSLMEAGYHRASILGDAVCGVAAVRITSNDFLFWFRSHTAKEMKWGGAKHDPVDKDDGKKMHPRSSFKAFLEVVKWRSLPWEDVEMDAI

SEQ ID NO: 8816 - protein, 292 aa, Vitis vinifera
  misc_feature (69)..(69): Xaa can be any naturally occurring amino acid
  misc_feature (173)..(173): Xaa can be any naturally occurring amino acid
MITNILPFFLILAMISGRSYSGSISIYWGQNSKEGTLADTCGTGRFAFVNIAFLPVFGNNQTPALDLDXHCDPSTKNGCTGLATDIRSCQSRGVKVMLSIGGGDGSYFLASSEDAKQVAAYLWDNYLGGTSPSRPFGDAVLDGIDFDIEDGIITSSFDRYSYLRSYSFAKKLXLTAAPQCPFPDVYMGQALSSGLFDYVWMQFYNNYCEYKGNAAELKATWDTWTSNVTATGFFLGLPAAPSAASSGYIPADVLISQVLPLVKNTSKYGGVMLWSKYYDDLTGYSSSIKSHV

SEQ ID NO: 8817 - protein, 947 aa, Hordeum vulgare
MAPAVAGGGRVRSNEPVAAAAAAPAASGKPCVCGFQVCACTGSAAVASAASSLDMDIVAMGQIGAVNDESWVGVELGEDGETDESGAAVDDRPVFRTEKIKGVLLHPYRVLIFVRLIAFTLFVIWRISHKNPDAMWLWVTSICGEFWFGFSWLLDQLPKLNPINRVPDLAVLRQRFDRPDGTSTLPGLDIFVTTADPIKEPILSTANSVLSILAADYPVDRNTCYVSDDSGMLLTYEALAESSKFATLWVPFCRKHGIEPRGPESYFELKSHPYMGRAQDEFVNDRRRVRKEYDEFKARINSLEHDIKQRNDGYNAAIAHSQGVPRPTWMADGTQWEGTWVDASENHRRGDHAGIVLVLLNHPSHRRQTGPPASADNPLDLSGVDVRLPMLVYVSREKRPGHDHQKKAGAMNALTRASALLSNSPFILNLDCDHYINNSQALRAGICFMVGRDSDTVAFVQFPQRFEGVDPTDLYANHNRIFFDGTLRALDGMQGPIYVGTGCLFRRITVYGFDPPRINVGGPCFPRLAGLFAKTKYEKPGLEMTTAKAKAAPVPAKGKHGFLPLPKKTYGKSDAFVDTIPRASHPSPYAAAAEGIVADEATIVEAVNVTAAAFEKKTGWGKEIGWVYDTVTEDVVTGYRMHIKGWRSRYCSIYPHAFIGTAPINLTERLFQVLRWSTGSLEIFFSKNNPLFGSTYLHPLQRVAYINITTYPFTAIFLIFYTTVPALSFVTGHFIVQRPTTMFYVYLGIVLSTLLVIAVLEVKWAGVTVFEWFRNGQFWMTASCSAYLAAVCQVLTKVIFRRDISFKLTSKLPSGDEKKDPYADLYVVRWTPLMITPIIIIFVNIIGSAVAFAKVLDGEWTHWLKVAGGVFFNFWVLFHLYPFAKGILGKHGKTPVVVLVWWAFTFVITAVLYINIPHMHTSGGKHTTVHGHHGKKLVDTGLYGWLH

SEQ ID NO: 8818 - protein, 391 aa, Neoscortechinia kingii
DLEPVNPADVPVTAAGALKSYKLAAKAISRLHSLPSGNISLLCDVLVKEVSDLTGYDRVMVYKFHEDEHGEVVAEFRRPDLEPYLGLHYPATDIPQASRFLFMKNKVRMICDCLAPPVKVIQDKSLAEPLSLWGSTLRSPHGCHAQYMANMGSIASLVMSVTINEDDDRMDSDQQKGRKLWGLVVCHHTCPRFVSFPLRYACEFLIQVFGIQINKEVQLAAQMREKHILQIQTMLCDMLLRDAPVAIITQSPNVMDLVKCDGAALYYKKKFWLLGVTPTEAQIRDIVEWLLDVHSESTGLSTDSLMEAGYLGASILGDAVCGMAAIRISSKDFLFWFRSHTAKEIMWGGAKHDPDDKDHVRKMHPGSSFKAFLEVVKWRSLPWEDMEMDAI

SEQ ID NO: 8819 - protein, 392 aa, Ochna multiflora
DLEPVNPADVPVTAAGALKSYKLAAKAISRLQSLPSGKISMLCDVLVKEVHDLTGYDRVMVYKFHEDEHGEVVAECHRPDLEPYIGLHYPATDIPQASRFLFMKNKVRMICDCMESPVKVIQDKKLAQPLSLSGSILRAPHGCHSQYMANMGSIASLVMSIMINDDDDNEMESNHQKPRKLWGLVVCHHTSPKVCPFPLRYACEFLIQVFGVQINKEVEVPAQVKEKHILRTQNVLCDMLLRDTPVAIVTQSPNVMDLVKCDGAALFYKNKFWLLGITPTADQIRDIASWLNEYHNGSTGLSTDSLMEAGYHGASILGGAVCGMAAIRISSKDFLFWFRSQTAKEIKWGGAKHDPNEKDDGRKMHPRSSFNAFLEVVKWCSLPWEDMEMDAI

SEQ ID NO: 8820 - protein, 196 aa, Mesorhizobium ciceri subsp. biserrulae
FAEFPELEQLPLWGFDGSSTQQAEGHSSDCVLKPVAVYPDPARTNGVLVMCEVMMPDGVTPHASNKRATILDDEGAWFGFEQEYFFYKDGRPLGFPESGYPAPQGPYYTGVGYSNVGSVARQIVEEHLDLCLAAGINHEGINAEVAKGQWEFQIFGKGSKKAADQMWMARYLLQRLTEKYGIDIEYHCKPLGDTDW

SEQ ID NO: 8821 - protein, 66 aa, Guettarda uruguensis
GEVMLGQWEFQVGPSVGIEAGDHIWCARYLLERITEQAGVVLTLDPKPIEGDWNGAGCHTNYSTKS

SEQ ID NO: 8822 - protein, 392 aa, Ochna sp. Davis 31-01
DLEPVNPADVPVTASGALKSYKLAAKAISRLQSLSSGNISMLCDVLVKEVHDLTGYDRVMVYKFHEDEHGEVVAEYHRPGLEPYIGLHYPATDIPQASRFLFMKNKVRMICNCMEPAVKVIQDKKLAQPLSLAGSTLRAPHGCHSQYMANMGSVASLVMSVMINDDDDNEMESNHQKPRKLWGLVVCHHTSPRFVPFPLRYACEFLIQVFGVQINKEVELTAQLKEKHILRTQSVLCDMLLRDTPVAIVTQSPNVMDLVKCDGAALFYKNKFWLLGITPTEDQIRHIASWLNEYHNGSTGLSTDSLMEAGYHGASILGGAVCGMAAIRISSKDFLFWFRSQTAKEIKWGGAKHDPSEKDDGGKMHPRSSFNAFLEVVKWCSLPWEDMEMDAI

SEQ ID NO: 8823 - protein, 177 aa, Zea mays
MVLTSNISVQKTLYEVLSVSEDATYDEIRAAYRSAALNTHPDKAQTTLESSSVPSTEQQEFSSVQKAWEVLRHPTSRADYDKQLQSSRQSIEITASEIQVGDMIVESAAGALELLYPCRCGDYFSITSGELSGMGIVVTGDGEEVEGLQASDSGSASVVLGCGSCSLKIRLVIDGTS

SEQ ID NO: 8824 - protein, 68 aa, Cephalanthus occidentalis
GEVMPGQWEFQVGPSVGIEAGDHIWCARYLLERITEQAGVVLSLDPKPIEGDWNGAGCHTNYSTKSMR

SEQ ID NO: 8825 - protein, 573 aa, Saccharomyces bayanus
MLSKSEKHIDLLAGNMSNLSFDGPGTPSSTGLFNVNQNNTNRRMRPTGFNDSPSPIKSSLFPHEDSSNMDIDEVSQSDMDITNSPKKLPPKFYERATSNKTQRVVSVCKMYFLEYYCDMFDYVISRRQRTKQVLEYLQQQSQLPTADQAKLNEEWSSYLQKEHQVLRKRRLKPKNRDFEVITQVGQGGYGQVYLARKKDTKEVCALKILNKKLLFKLNETKHVLTERDILTTTRSEWLVKLLYAFQDLQSLYLAMEFVPGGDFRTLLINTRCLKSGHARFYISEMFCAVNALHDLGYTHRDLKPENFLIDAKGHIKLTDFGLAAGTISNERIESMKIRLEKIKDLEFPAFTEKSIEDRRKMYNQLREKEVNYANSMVGSPDYMALEVLEGKKYDFTVDYWSLGCMLFESLVGYTPFSGSSTNETYDNLRRWKQTLRRPRQSDGRAAFSDRTWDLITRLIADPINRLRSFEHVKRMSYFADINFSTLRSMIPPFTPQLDSETDAGYFDDFTSEADMAKYADVFKRQDKLTAMVDDSAVSSKLVGFTFRHRNGKQGSSGILFNGSEHSDPFATFY

SEQ ID NO: 8826 - protein, 264 aa, Oryza sativa Japonica Group
MGFLGRHSGDSEKLTDGLYSTVIISFLTDFGGGNYKLNLAGHAWSAVGPDVKYCRSKGVLVLLSIGGGVGRYSLASQADAKAVADHLWNFYLGGTSTMSWPFGDAVLDGVDFDIELGSNAHYGDLARYLKAYSGRKPGGRKVWLTAAPQCPFPDRMLGEALRTGLFDRVHVQFYNNPVCNYRASNVAAFTSAWNKWAASLPGSSVYLGLPAVSGAANNGYVAPATLKENVLPIVQKSKNYGGIMLWSRNWDKQTGYSKSVKSAV

SEQ ID NO: 8827 - protein, 398 aa, Oryza sativa Japonica Group
MAGSRFGSFKSEKGDPAATAAQRRDPYEVLGVGRNATDQEIKSAFRRMALKYHPDKNGDDPVASDMFQEVTFSYNILSDPDKRRQYDTSGFEAIEADSQELELDLSSLNTVNTVFAALFSKLGVPIKTTVSATVLEEALNGSVMVSQLQLGNSVHRKVEKQSAHFYSVDITEKEAKMGLVCRVKSTDRSKFKLLYFELEENGGLSLALQEDSVKTGKVTSAGMYFLGFPVYRFEQNNLCQLLKTVRIPLNSTLHSGDNFFRSVNYTIEVVCGESFPAEKEKLQSVEAKILTKRAELSKFETEYREIDNLLKERNEIHASYTNNSPLKRSSSRSKAKSPSKFSKGEEENSQRKEKKVKDQPTGGCRSADEDSNEKKTKERFPKKKWLNIPFKIDRRKPC

SEQ ID NO: 8828 - protein, 120 aa, Platanus x acerifolia
LLQTNVKWPLGWPVGGYPGPQGPYYCGAGADKSFGRDISDAHYKACLYAGINISGTNGEVMPGQWEYQVGPSVGIEAGDHIWCSRYILERITEQAGVVLTLDPKPIEGDWNGAGCHTNYS

SEQ ID NO: 8829 - protein, 242 aa, Brassica napus
MDGGYDQSGHSRYFHNLFRPELQHQLQPQPQPQPQPQPQPQPQSDDESDSNNKYPGQPDSDQVTSGSTSGKRPRGRPPGSKNKPKPPVIVTRDSPNVLRSHVLEVSSGADIIESVNNYARRRGRGVSILSGNGTVANLTLRQPVTTHGNNGGTEAGAGGVVTLRGRFEILSITGTVLPPPAPPGCGGLSIFVAGEQGRMIGGRVVAPLVASGPVILMAASFSNATFERLPLEDEGGEGGGDV

SEQ ID NO: 8830 - protein, 970 aa, Vicia faba
MEKHLKKSPSSSSSSSMRPSFPRDPRGSLEVFNPTSNTSSPVRSPSNLKNWTETEEPRNEFPDKVTNTSWMAIKEGETGAAVQRAAEWGLVLTTDAETGKPQGVAVRHSGGDEPNAVELESKRNSNNTVRTSGESSDGGDPRGFPRVSDDLKDALSAFQQTFVVSDATKPDYPILYASAGFFKMTGYTSKEVIGRNCRFLQGADTDPNDVARIREALEGGKSFCGRLLNYKKDGTPFWNLLTISPIKDDDGNVLKLIGMLVEVNKHTEGSKEKKLRPNGLPESLIRYDARQKEKATSSVSELLEAMKRPRAMSESGHRPFIRKSGGGGSSEEDERLENKSRRKSDSVASFRPKPQGKIRHSMERISELPENKQKNSRRGSFMGFMRKSHSIDESIDNEVIVDVSSGSEDDERDDSFEFDDKEKLKEKRKGLDLATTLERIEKNFVITDPRLPDNPIIFASDSFLELTEYSREEILGKNCRFLQGQETDPATVRKIREAIDNQTEVTVQLINYTKSGKKFWNLFHLQPMRDHKGEVQYFIGVQLDGSQHVEPLHNCIAEESAKEGELLVKETAENVGEAVKELPDANQKPDDLWKNHSKVVRPKPHRKDDDAWRAIQNVVGNGEQVGLKHFRPIKPLGSGDTGSVHLVELEGTGHYFAMKAMDKGVMLNRNKVHRACTEREILDMLDHPFLPALYASFQTKTHVCLITDYYPGGELFLLLDQQPTKVLKEDSVRFYAAEVVIALEYLHCLGIIYRDLKPENVLIQRNGHVSLTDFDLSCLTSCKPQLILPATEEKKKRKNKKKKGQPKNQEVPMFMAEPMRASNSFVGTEEYIAPEIITGSGHTSAVDWWALGILLYEMLYGYTPFRGKTRQKTFGNILHKDLKFPKSKPVSPHGKQLIYWLLHRDPKNRLGSLEGANEIKNHPFFKNVNWALVRCMKPPELDAPILLDNDEKKEAKDIDPGLDDLQKNIF

SEQ ID NO: 8831 - protein, 215 aa, Aspergillus oryzae
MVKSTQIARLDGLMLAASVDDEQAEVELSEIKTQAKMIFRRLSRNSAPQASIESGQYNLHYLIQDDICFLCICDRSYPRKLAFTYLADLATEFTTTYSSAQYQSPTLRPYAFVEFDTFIQRTKKLYQDSRASQNLDRLNDELRDVTKVMTKNIEDLLYRGDSLERMGELSGRLREDSKKYRRAAVRINWELVIKQYGPIAGVGLLFLFLIWLRFF

SEQ ID NO: 8832 - protein, 1168 aa, Arabidopsis thaliana
MVSGVGGSGGGRGGKEEPSSSHTPNNRRGGEQAQSSGTKSLRPRSNTESMSKAIQQYTVDARLHAVFEQSGESGKSFDYSQSLKTTTYGSSVPEQQITAYLSRIQRGGYIQPFGCMIAVDESSFRIIGYSENAREMLGLMPQSVPTLEKPEILAMGTDVRSLFTSSSSILLERAFVAREITLLNPVWIHSKNTGKPFYAILHRIDVGVVIDLEPARTEDPALSIAGAVQSQKLAVRAISQLQALPGGDIKLLCDTVVESVRDLTGYDRVMVYKFHEDEHGEVVAESKRDDLEPYIGLHYPATDIPQASRFLFKQNRVRMIVDCNATPVLVVQDDRLTQSMCLVGSTLRAPHGCHSQYMANMGSIASLAMAVIINGNEDDGSNVASGRSSMRLWGLVVCHHTSSRCIPFPLRYACEFLMQAFGLQLNMELQLALQMSEKRVLRTQTLLCDMLLRDSPAGIVTQSPSIMDLVKCDGAAFLYHGKYYPLGVAPSEVQIKDVVEWLLANHADSTGLSTDSLGDAGYPGAAALGDAVCGMAVAYITKRDFLFWFRSHTAKEIKWGGAKHHPEDKDDGQRMHPRSSFQAFLEVVKSRSQPWETAEMDAIHSLQLILRDSFKESEAAMNSKVVDGVVQPCRDMAGEQGIDELGAVAREMVRLIETATVPIFAVDAGGCINGWNAKIAELTGLSVEEAMGKSLVSDLIYKENEATVNKLLSRALRGDEEKNVEVKLKTFSPELQGKAVFVVVNACSSKDYLNNIVGVCFVGQDVTSQKIVMDKFINIQGDYKAIVHSPNPLIPPIFAADENTCCLEWNMAMEKLTGWSRSEVIGKMIVGEVFGSCCMLKGPDALTKFMIVLHNAIGGQDTDKFPFPFFDRNGKFVQALLTANKRVSLEGKVIGAFCFLQIPSPELQQALAVQRRQDTECFTKAKELAYICQVIKNPLSGMRFANSLLEATDLNEDQKQLLETSVSCEKQISRIIGDMDLESIEDGSFVLKREEFFLGSVINAIVSQAMFLLRDRGLQLIRDIPEEIKSIEVFGDQIRIQQLLAEFLLSIIRYAPSQEWVEIHLSQVSKQMADGFAAIRTEFRMACPGEGLPPELVRDMFHSSRWTSPEGLGLSVCRKILKLMNGEVQYIRESERSYFLIILELPVPRKRPLSTASGSGDMMLMMPY

SEQ ID NO: 8833 - protein, 1112 aa, Arabidopsis thaliana
MGFESSSSAASNMKPQPQKSNTAQYSVDAALFADFAQSIYTGKSFNYSKSVISPPNHVPDEHITAYLSNIQRGGLVQPFGCLIAVEEPSFRILGLSDNSSDFLGLLSLPSTSHSGEFDKVKGLIGIDARTLFTPSSGASLSKAASFTEISLLNPVLVHSRTTQKPFYAILHRIDAGIVMDLEPAKSGDPALTLAGAVQSQKLAVRAISRLQSLPGGDIGALCDTVVEDVQRLTGYDRVMVYQFHEDDHGEVVSEIRRSDLEPYLGLHYPATDIPQAARFLFKQNRVRMICDCNATPVKVVQSEELKRPLCLVNSTLRAPHGCHTQYMANMGSVASLALAIVVKGKDSSKLWGLVVGHHCSPRYVPFPLRYACEFLMQAFGLQLQMELQLASQLAEKKAMRTQTLLCDMLLRDTVSAIVTQSPGIMDLVKCDGAALYYKGKCWLVGVTPNESQVKDLVNWLVENHGDDSTGLTTDSLVDAGYPGAISLGDAVCGVAAAEFSSKDYLLWFRSNTASAIKWGGAKHHPKDKDDAGRMHPRSSFTAFLEVAKSRSLPWEISEIDAIHSLRLIMRESFTSSRPVLSGNGVARDANELTSFVCEMVRVIETATAPIFGVDSSGCINGWNKKTAEMTGLLASEAMGKSLADEIVQEESRAALESLLCKALQGEEEKSVMLKLRKFGQNNHPDYSSDVCVLVNSCTSRDYTENIIGVCFVGQDITSEKAITDRFIRLQGDYKTIVQSLNPLIPPIFASDENACCSEWNAAMEKLTGWSKHEVIGKMLPGEVFGVFCKVKCQDSLTKFLISLYQGIAGDNVPESSLVEFFNKEGKYIEASLTANKSTNIEGKVIRCFFFLQIINKESGLSCPELKESAQSLNELTYVRQEIKNPLNGIRFAHKLLESSEISASQRQFLETSDACEKQITTIIESTDLKSIEEGKLQLETEEFRLENILDTIISQVMIILRERNSQLRVEVAEEIKTLPLNGDRVKLQLILADLLRNIVNHAPFPNSWVGISISPGQELSRDNGRYIHLQFRMIHPGKGLPSEMLSDMFETRDGWVTPDGLGLKLSRKLLEQMNGRVSYVREDERCFFQVDLQVKTMLGVESRGTEGSSSIK

SEQ ID NO: 8834 - protein, 335 aa, Arabidopsis thaliana; identical to SEQ ID NO: 459

SEQ ID NO: 8835 - protein, 357 aa, Pinus sylvestris
MSSVLTDLLNLDLSDVTEKVIAEYIWIGGSGMDMRSKARSLSGPVSSVKELPKWNYDGSSTGQAQGHDSEVILYPQAIFRDPFRRGKHILVICDAYSPNGTAIPSNKRAAAAKIFNEKAVSDEETWYGLEQEYTLLQKDVKWPLGWPIGGYPGPQGPYYCGVGADKAWGRDIVDAHYKACLYAGINISGINGEVMPGQWEFQVGPSVGISAADELWCARFIMERITEKAGVVLSFDPKPIEGDWNGAGCHTNYSTKSMRKEGGFEVIKKAIEKLKLRHKEHISAYGEGNERRLTGRHETADMNTFSRGVANRGASVRVGRDTEKEGKGYFEDRRPASNMDPYIVTSMIAETTILWKP

SEQ ID NO: 8836 - protein, 563 aa, Oryza sativa; identical to SEQ ID NO: 7219

SEQ ID NO: 8837 - protein, 206 aa, Mundulea sericea
MAYKFHEDDHGEVIAEITKPGLEPYLGLHYPATDIPQASRFLFMKNKVRMIVDCHAKHVKVLQDEKLPFDLTLCGSTLRAPHSCHLQYMANMDSIASLVMAVVVNDNEEDGDSSDAVQPQKRKRLWGLVVCHNTSPRFVPFPLRYACEFLAQVFAIHVNKEIELENQIIEKNILRTQTLLCDMLMRDAPLGIVSQSPNIMDLVKCD

SEQ ID NO: 8838 - protein, 72 aa, Arabidopsis thaliana
MNKLAGDAGTKNRVLMEKRGRGLDGKQSGRVINGPTNSMVTPLVKDFLQFTMGYAYWETGKQSERFVVDLYF

SEQ ID NO: 8839 - protein, 391 aa, Pera bicolor
DLEPVNPSDVPVTAAGALKSYKLAAKAISKLQSLPSGNISLLCDVLVKEVGDLTGYDRVMVYRFHEDEHGEVVAECRRPDLEPYLGLHYPATDIPQASRFLFMKNKVRMICDCLAPPVKVIQDSSLCQPVKSLWIYTEIPSWLHAQYMANMGSVASLVMSVTINEDDDEIDTDQRKGRKLWGLVGCHHTSPRFVPFPLKDACEFLIQVFGVQINKEVELAAQMREKHILRTQTMLCDMLLRDDPAAIVTQSPNVMDLVKCDGAALYYRKKFWFLGVTPTEAQTRDIAEWLLEYHSDSIGLISDSLMEAGYPGASVLGNAICGMAAVRITSKDLLFWFRFHTAKEIKWGGAKHDPGDKDDGRKMHPRSSFKAFLETVKWRSLPWEDVEMDAI

SEQ ID NO: 8840 - protein, 376 aa, Acidovorax sp. JS42
MSKRDFYEVLGVPKNASDDEIKKAYRKLAMKYHPDRNQGDAAKPAEEKFKEAKEAYEILSDAQKRAAYDQYGHAGVDPNMRGGMGGAEGFGGFAEAFGDIFGDMFGGARGRGGRQVYRGNDLSYAMEITLEEAAKGKEAQIRIPSWESCETCHGSGAKPGTSAKTCGTCQGSGTVQMRQGFFSVQQTCPHCRGTGKIIPEPCTACHGQGRVKKQKTLEVKIPAGIDDGMRIRSTGNGEPGTNGGPPGDLYIEIRIKKHDIFERDGDDLHCQVPVSFITAALGGEIEVPTLQGKAAIDIPEGTQAGKQFRLRGKGIKGVRSSYPGDLYCHIIVETPVKLTEHQRKLLKELDESLKKGGAKHSPSTESWTDRLKSFFS

SEQ ID NO: 8841 - protein, 391 aa, Peridiscus lucidus
DLEPVNPADVPVTAAGALKSYKLAAKAISRLQSLPSGNISLLCDVLVKEVSDLTGYDRVMVYKFHEDEHGEVVAECCRPDLEPYLGLHYPATDIPQASRFLFMKNKVRMICDCLALPVKVIQDKRLAQPLSLCGSTLRSPHGCHAQYMANMGSIASLVISVTINEEDEEMESSQQRGRKLWGLVVCHHASPRFVPFPLRYACEFLIQVFGVQINKEVELAAQLKEKHILQTQTVLCDMLLRDAPVGILTQSPNVMDLVKCDGAALYYREKFWLLGVTPTEVQIKTIAEWLLEYHSGSTGLSTDSLTEAGYPGASILGDAVCGMAAVKITSKDFLFWFRSHTAKEIKWGGAKHDPSDKDDGRKMHPRSSFKAFLEVVKRRSLPWEDMEMDAI

SEQ ID NO: 8842 - protein, 391 aa, Petalostigma pubescens
DLEPVNPADVPVTAAGALKSYKLAAKAISRLQSLPSGNISLLCDVLVKEVSELTGYDRVMVYRFHEDEHGEVVAECCRPDLEPYLGLHYPATDIPQASRFLFMKNKVRMICDCMAPPVEVVQDERLSQPLSLCGSTLRSPHGCHAQYMANMGLIASLVMSVTINEDNDEMDGDQQTGRKLWGLVVCHHTSPRFVPFPLRYACEFLIQVFGVQINKEVELAVQMREKHILRTQTVLCDMLLRDAPVAIITQSPNVMDLVKCDGAALYYRKKFWLLGVTPTEAQVRDIAEWLLECHSGSTGLSTDSLMEAGYPGASILGDAVCGMAAVRITSKDFLFWFRSHTAKEIKWGGAKHDPGDKDDGRKIHPRSSFNAFLEVVKRRSLPWEDVEMDAI

SEQ ID NO: 8843 - protein, 299 aa, Fragaria x ananassa
MASVSAAALLSLATLLLLAVGSNAGGIAIYWGQNGNEGTLAQTCASGNYQFVNIAFHSSFGNGRTPTLNLAGHCDPSSNTCTKFSSQIKSCQAEGIKVILSVGGGWGGQYSLASSEDARQVGAYLWNNFLGGHSTSRPLGDAVLDGVDFDIEGGNDQYWDDLARYLSAHSKKGGKKVYLTAAPQCPFPDANIGNALKTGLFDNVWVQFYNNPPCQYTSGNVTNLEDAWKQWTSAIPAQQVFLGLPAAPEAAGSGFIPAAALTTTVLPGIKTSDKYGGVMLWSKYYDDLYGYSSSIKNHV

SEQ ID NO: 8844 - protein, 391 aa, Phyllanthus epiphyllanthus
DLEPVNPDDVPVTAAGALKSYKLAAKAISKLQSLPSGNISLLCDVLVKEVSELTGYDRVMVYKFHQDEHGEVVAESCRPDLEPYLGLHYPATDIPQASRFLFMKNKVRMICDCQAPPVKVVQDKQIAQLLSLCGSTLRSPHGCHAQYMANMGTIASLVMSVTINEDDEETDNDQQIGRKLWGLVVCHHTNPKFVPFPLRYACEFLIQVLGVQVHREVELAAQTTEKHILQTQTVLCDMLLRDAPVAIVTQSPNVMDLVKCNGAALFYRKKFWMLGVTPTEAQIKDITEWLLEYHGESTGLSTDSLMEAGYPGAAILRYAVCGMAAIKITSKDFLFWFRSHSAKEIKWGGAKHDPGDKDDGRKMHPRSSFKAFLEVVKWRSIAWEDVEMDAI

SEQ ID NO: 8845 - protein, 432 aa, Vitis vinifera
MAQILAPSTQWQMRMTKNPANASPFTTKMWGSLFLKQKTKGTAKFSTKFRVCASKSESSTVNRLDDLLNMDIRPYTDKIIAEYVWIGGTGIDLRSKSRTISKPVEHPSELPKWNYDGSSTGQAPGEDSEVILYPQAIFKDPFRGGNNILVICDSYTPAGEPIPTNKRHRAAEIFGNKKVIDEVPWFGIEQEYTLLQPNVKWPLGWPVGAYPGPQGPYYCAAGADKSFGRDISDAHYKACLYAGINISGTNGEVMPGQWEYQVGPSVGIEAGDHIWCSRYILERITEQAGVVLTLDPKPIEGDWNGAGCHTNYSTKSMREDGGYELIKKAILNLSLRHKEHISAYGEGNERRLTGKHETANINTFSWGVANRGCSVRVGRDTEKQGKGYLEDRRPASNMDPYIVTSLLAETTILWEPTLEAEALAAQKLALKV

SEQ ID NO: 8846 - protein, 161 aa, Zea mays
  misc_feature (130)..(130): Xaa can be any naturally occurring amino acid
MDGGGSGNASGGSGGASTCCYYALLGIRKNASATDIRAAYRRLAMKWHPDRWASDPSAAGEANQRFQRIQEAYSVLSDKGKKAMYDAGLFDPLDDDDQEMLVMMDSVKNEKPDTLEDLQKMLEDIVKGDXGAGSGAGGRAPTDGARRTRVAPYPQPQRARR

SEQ ID NO: 8847 - protein, 391 aa, Pimelodendron zoanthogyne
DLEPVNPADVPVTAAGALKSYKLAAKAISKSQSLPSGNISLLCDVLVKEVSDLTGYDRVMVYKFHEDEHGEVIAEYHRPDLEPYLGLHYPATDIPQASRFLFMKNKVRMICDCLAPPVKVIQDRSLAQSLSLCGSTLRSPHGCHAMYMTNMGSIASLVMSVAINEDGSEMDDDQQKGRKLWGLVVCHHTSPRFIPFPLGYACEFLIQVFGVQINKEVEMAAQMREKHILQTQTVLCDMLLRDSPMAIITRSPNVMDLVKCDGAALYYRKKFWLLGVTPTETQIKDIAEWLLECHRESTGLSTDSLIEAGYPGASIIGKAICGMAAVRINSKDFLFWFRSHTAKEIKWGGAKHDPDDKDDGRRMHPRSSFEAFLDVVKWRSLPWEDVEMDAI

SEQ ID NO: 8848 - protein, 1172 aa, Arabidopsis thaliana; identical to SEQ ID NO: 8555

SEQ ID NO: 8849 - protein, 431 aa, Chlamydomonas reinhardtii
MPGGGRGGPAAGPKKSNNSRYYELLGVSKDADPDEIKKAHRKLALKLHPDKGGDPDKFKEINEAYDVLKDPKKREIYDQYGEDAIKEGMGNAGGHGGGMSDLFEQMFGMGGGGGGRRQRERKSEDVVHKLQVPLEDLYAGGTKKLSMSRQLPCDGCKGSGSKSGKRYECNTCQGTGVQVHLRPLGPGMMQQIQSRCSGCAGSGYNCPPSDSCTACKGKCLVSDKKTFEVHIEPGMKHGSRIVLRGEAGCTEPGLAPGDIILVIVQKEHDVFQRAGVDLVMERHISLREALTGCTFNFKHLDGRLLRVTIPEGEVIKPGTFKCLPDEGMPFQGRPFMKGNMYVRFNVDFPESVTSAQAAAIRGALPAAASQNNGAAMDTDEAEEVHRITNVADIEQELKSRVNVGKSAGASYESDDDDDDMPRGQRVQCAQQ

SEQ ID NO: 8850 - protein, 431 aa, Triticum aestivum
  misc_feature (23)..(23): Xaa can be any naturally occurring amino acid
VSSGDGAGGGAGDAVPGGRAGQXAVPARQPAGRVWGVRRTARATSGFKVLALGPETTGVIQRMQQLLDMDTTPFTDKIIAEYIWVGGSGIDLRSKSRTISKPVEDPSELPKWNYDGSSTGQAPGEDSEVILYPQAIFKDPFRGGNNILVICDTYTPQGEPIPTNKRHMAAQIFSDPKVTAQVPWFGIEQEYTLMQRDVNWPLGWPVGGYPGPQGPYYCAVGSDKSFGRDISDAHYKACLYAGIEISGTNGEVMPGQWEYQVGPSVGIDAGDHIWASRYILERITEQAGVVLTLDPKPIQGDWNGAGCHTNYSTLSMREDGGFDVIKKAILNLSLRHDLHIAAYGEGNERRLTGLHETASISDFSWGVANRGCSIRVGRETEAKGKGYLEDRRPASNMDPYTVTALLAETTILWEPTLEAEALAAKKLALKV

SEQ ID NO: 8851 - protein, 312 aa, Zea mays
MTAKNQNMAARELTRLHLQLVAIVLVAILATCHAGSIAVYWGQNDGESSLSDTCASGNYKFVVIAFVYKFGKGQTPELNLAGHCDPSSGGCKCLSKDIRSCQRRGVKVLLSIGGADGSYGLASERDAREVAEYLWNNYLGGNSSSRPLGDAVLDGVDFDIERGGAKYWDVLARELKDMGKEKDGNAVLLSAAPQCPFPDEWDDGAIKTGLFDFVWVQFYNNPPCQVSAGPRAFLHAWKRWQSVPAGQIFLGLPASKSAAGTGFVPAGKLTSQVLPLIRRSRKYGGVMLWAKFYDDRTGYSDAIKRHFLGRDP

SEQ ID NO: 8852 - protein, 171 aa, Citrus hybrid cultivar
MESHDETGCQAPEGPILCVNNCGFFGSAATMNMCSKCHKAMILNQEQAQLAASSIGSIVHGSSGGTGKEPIIAGSVDLQVGPVEIKKFSMEPSSGSSFGFAGVKAKEGPKRCTTCNKRVGLTGFNCRCGNLFCAVHRYSDKHGCPFDYRTAAREAIAKANPVVKAEKLDKI

SEQ ID NO: 8853 - protein, 388 aa, Banksia serrata
PYEVPMTAAGALQSYKLAAKAIARLQSLPSGSMDRLCDTVVQEVYELTGYDRVMAYKFHEDDHGEVVSEITKPGLEPYLGLHYPATDIPQAARFLFMKCKVRMICDCHAKHVKVLQDEKLTFDLTLCGSTLRAPHSCHLQYMENMGSIASLVMAVVINEGNEESESSGSLQPQKRKRLWGLVVCHNTTPRFVPFPLRYACEFLIQVFAIHVNKEIELENQILEKNILRTQTLLCDMLMRDAPLGIVSQSPNIMDLVKCDGAVLLYKNKIWLLGLTPTESQIHEIATWLSNFHMDSTGLSTDSLYDAGFPGSLSLADVVCGMAAVRINSNDMLFWFRSPTAAEVQWGGAKHDPNDKDDGRRMHPRSSFKAFLEVVKTRSLPWKDYEMDA

SEQ ID NO: 8854 - protein, 302 aa, Glycine max
GNKTAKVSILFLLNFLGLVCSSNGGDIVVYWGQDESEGTLSETCNSGLYKIVNIGFLAKFGGGREPEINLAGHCDPASNGCKSLSKDIKNCQKRGIKVILSIGGGETGYSLSSANDATKVADYIWNNFLGGKSSKTRPLGDAVLDGVDFDIEVGGGESFYAVLARRLSQHSKGGGRKVYLTAAPQCPFPDEHQNGALSTGLFDFVWVQFYNNGPCQFESSDPTKFQKSWNQWISSIRARKIYVGLPASPSPATAGSGFVPTRTLITQVLPFVKRSPKYGGVMLWDRAADKQTGYSTNIKPSV

SEQ ID NO: 8855 - protein, 388 aa, Cardwellia sublimis
PYEVPMTAAGALQSYKLAARAIARLQSLPSGSMDRLCDTVVQEVYELTGYDRVMAYKFHEDDHGEVVSEITKPGLEPYLGLHYPATDIPQAARFLFMKCKVRMICDCRAKHVKVLQDEKLTFDLTLCGSTLRAPHSCHLQYMENMSSIASLVMAVVINEGNEESESSGSLQPQKRKRLWGLVVCHNTTPRFVPFPLRYACEFLIQVFAIHVNKEIELENQILEKNILRTQTLLCDMLMRDAPLGIVSQRPNIMDLVKCDGAALLYKNKIWLLGLTPTESQIHEIASWLSNSHMDSTGLSTDSLYDAGFQGSLSLADVVCGMAAVRINSNDMLFWFRSPTAAEVQWGGAKHDPNDKDDGRRMHPRSSFKAFLEVVKTRSLPWKDYEMDA

SEQ ID NO: 8856 - protein, 387 aa, Euplassa inaequalis
YEVPMTAAGALQSYKLAAKAISRLQSLPSGSMDRLCDMVVQEVYELTGYDRVMTYKFHEDDHGEVVSEVTKPGLESYLGLHYPATDIPQAARFLFMKCKVRMVCDCRAKHVKVLQDEKLTFDLTLCGSTLRAPHSCHLQYMENMSSIASLVMAVVINEGNEESESSGSLQPQKRKRLWGLVVCHNTTPRFVPFPLRYACEFLIQVFAIHVNKEIELENQILEKNILRTQTLLCDMLMRDAPLGIVSQSPNIMDLVKCDGAALLYKNKIWLLGLTPTESQMHEIAAWLSNSHMDSTGLSTDSLYDAGFPGYLSLADVVCGMAAVRINSNDMLFWFRSPTAAEIQWGGAKHDPNDKDDGRRMHPRSSFKAFLEVVKTRSLPWKDYEMDA

SEQ ID NO: 8857 - protein, 295 aa, Digitalis lanata
GEVFTEITKPGLEPYVGLHYPATDIPQAARFLFMKNKVRMICDCRAKHVKVVQDEKLPLDLTLCGSTLRAPHTCHLQYMENMDSIASLVMSIVINEGDEEGSEPVQVQNRKRLWGLVVCHNTTPRFVPFPLRYACEFLAQVFSIHVNKELELENQMFEKNILRTQTLLCDMLLRDAPLGIVSQSPNVMDLVKCDGAALLYKDKKYKLGLTPTDFQIRDIVSWLDEYHRDSTGLSTDSLYDAGFPGALSLGGSISGMAAVKISEKDWLFWFRSHTAAEVRWGGAKHEPGEKDDGSR

SEQ ID NO: 8858 - protein, 381 aa, Chlamydomonas reinhardtii
MGKDYYKVLGVAKDADESALKKAYYKLAQKWHPDKNKGSAAATEKFKEISEAYDVLSDPEKRQIYDQFGEEGLKGGPPPPGGGGAGAGGFPGRSGGSYQFDDAAAERLFRAFFGAVGGMDGGMGGGMGGGMGGMPGGLGGMFGGMFGGGGMGGGGMDDVHMEDQDGMGGMGGMGGFPGMGGRSFSGTRARRPSAPTQPAQCEVPLKVSLEDLYRGCTKKLRITRHIHDAASNQMVPVQEEVTIDVRPGWKAGTKVTFSGKGDERPGRPADDLVFVIKEAPNAVFKRAGDDLETVVKLPLATALCGGTIQVPAIDGSRVPMTLTSVIPPGAERTVAGQGMPINKGPKAGQRGDMRVKFEVVFPTSLTEAQKTALRPILSGAR

SEQ ID NO: 8859 - protein, 190 aa, Mundulea sericea
  misc_feature (68)..(68): Xaa can be any naturally occurring amino acid
EVVAESKRPDLEPYIGLHYPATDIPQASRFLFKQNRVRMIVDCHASPVRVVQDEALVQPLCLVGSTLXAPHGCHAQYMANMGSIASLVMAVIINGNDEEGVGGRSSMRLWGLVVCHHTSARCIPFPLRYACEFLMQAFGLQLNMELQLAAQALEKRVLRTQTLLCDMLLRDSPTGIVTQSPNIMDLVKCD

SEQ ID NO: 8860 - protein, 175 aa, Glycine max
ARGLVPLGGKSKSRPFGDAILDGVDFDIESGELHYAALAYKLHDHYAGSSKKFYLTAAPQCPFRNNLLHGALTTGLFDHVWIKFYTNPQCEFTPKDPTGFKSAWNQWTTSINAAGKFFVGLPASHAAARTGFVSSHALINHLLPIVRSPKYGGVMLWDRFHDLQSGYSGKIRRSV

SEQ ID NO: 8861 - protein, 200 aa, Dalbergiella nyasae
EDDHGEVIAEITKPGLEPYLGLHYPATDIPQAARFLFMKNKVRMIVDCHAKHVKVLQDEKLPLDLTLCGSTLRAPHSCHLQYMANMDSIASLVMAVVVNDNEEDGDSSDAVQPQKRKRLWGLVVCHNTTPRFVPFPLRYACEFLAQVFAIHVNKEIELEYQIIEKNILRTQTLLCDMLMRDAPLGIVSQSPNIMDLVKCD

SEQ ID NO: 8862 - protein, 231 aa, Oryza sativa Indica Group
MARGGGADADLYAVLGLSRECTDADLRLAYRKLAMIWHPDRCSVAGGSASAAGVDEAKERFQEIQGAYSVLSDSNKRFLYDVGVYDGNDGDDDDDEADLSGMGDFLGEMAQMMSQATPAESFEELQQLFVDMFQDDIDAGLCQSTPPPPSWPSPPAAANARSPAAAATSRKGVNKRCSPAAMDMDSGLSSLLGISGFCFEAPWTSQDASTAAGGGGGKRRKQRPPPASHNV

SEQ ID NO: 8863 - protein, 171 aa, Oryza sativa Indica Group
MEHKETGCQQPKGPILCINNCGFFGSAATMNMCSKCHKEMIMKQEQAKLAASSIDSIVNGGDSGKEPIIAGHAEVAVAQVEVKTLVAQPAEIAGPSEGVTVNPKGREGPNRCSTCRKRVGLTGFNCRCGNLYCAMHRYSDKHDCQFDYRTAARDAIAKANPVVKAEKLDKI

SEQ ID NO: 8864 - protein, 480 aa, Picea sitchensis
MAAAAAVASPAVETDQISKLQAEVTKLNQISDNEKIGFVRLVSRHLSGEEERIEWEKIKTPTDEVVVPYDTMAAVGEDPLETKQLLDKLVVLKLNGGLGTTMGCTGPKSVIEVRNGLTFLDLIVKQIESLNNKYDSRVPLVLMNSFNTHDDTIKIVEKYSRSNIDIHIFNQSQYPRLVEEDLTPWPTKGRTDKEGWYPPGHGDVFPALLNSGKLGELLSQGKEYVFIANSDNLGAIVDLKILNHMVKNKNEYCMEVTPKTLADVKGGTLISYEGRVQLLEIAQVPKEHVGEFKSIEKFKIFNTNNLWVNLKAIKRLVEADALKMEIIPNPKEVDGVKVLQLETAAGAAIRFFYRAIGVNVPRSRFLPVKATSDLLLVQSDLYTVEEGFVIRNPARVNPANPSIELGPEFKKVGNFLKRFKSIPSIIDLDSLKVSGDVWFGSEIILKGKVTVEAKQGGKLEIPDESVIENKVVSNLEDIAN

SEQ ID NO: 8865 - protein, 196 aa, Dalbergiella nyasae
DHGEVVAEVKKPGLEPYLGLHYPATDIPQATRFSFMKNKVRMIVDCHAKHVKVLQDKKIPFDLTLCGSTLRAPHSCHLQYMENMNSSASLVMAVVVNDNDEDGDSSDAIQPQKRKRLWGLVVCHHTTPRFVPFPLRYACEFLAQVFAIHVNKELELEYQIVEKNILRTQTLLCDMLMRDAPLGIVSQSPNIMDLVK

SEQ ID NO: 8866 - protein, 391 aa, Podostemum ceratophyllum
DLEPVNPSDVPASAAGALKSYKLAAKAISKLQSLPSGNIGLLCDVLVKEVTDLTGYDRVMIYKFHEDDHGEVVSEWHAPELEPYLGLHFPATDIPQASRFLFMKNKIRMICDCMAAPVNVVQDAGLTQALNLSGSTLRAPHGCHAQYMANMGSIASLIMSVTINEDDEELEQQQQAGDELWGLVVCHHTVPRFRAVPAAVRCEFLIQVFGIQINKEVEMAAQMHEKRVLETQAVLCDMLLRDSPVAIMTRTPNVMDLVKCDGAALYHEKRFWLLGITPKETQIRHLMTWLNENHRETTGLSTASLLEAGFPDAMALGDAVCGMVAIRVNSKDFLFWFRSHTAKEIKWGGAKHDADEKDEERKMHPRSSFKAFLEVVKWQSLPWEDMEMDAI

SEQ ID NO: 8867 - protein, 81 aa, Physcomitrella patens subsp. patens
EKGMKIDYYKVLGVARDATANEIKQAFRKLALECHPDRHAQESIQSQESAGRRFRQVSEAYDVLGDNLKRIAYNKGAYNVG

SEQ ID NO: 8868 - protein, 132 aa, Zea mays
  misc_feature (58)..(58): Xaa can be any naturally occurring amino acid
  misc_feature (101)..(101): Xaa can be any naturally occurring amino acid
RGRCNTHDDTQKIGEKYSNSNIEIHTFNQSQYPRIGTEDFLPLPSKGKSGKEGGDPPXHGDVCPSLSNRGKLDILLGQGKGGVFVANSDNWGAIGDIKILXHLINNQNEYCVGVTPKTLGEVKGRALISYGG

SEQ ID NO: 8869 - protein, 395 aa, Quiina pteridophylla
DFEPVKPYEVPMTAAGALQSYKLAAKAITRLQALPSGSMERLCDTMVQEVFELTGYDRVMTYKFHDDDHGEVISEITKPGLEPYLGLHYPATDIPQAARFLFMKNKVRMIVDCRAKHVKVLQDDKLPFDLTLCGSTLRAPHSCHLQYMENMDSIASLVMAVVVNEGNEDSDGPDPVHPQKRKRLWGLVVCHNTTPRFVPFPLRYACEFLAQVFAIHVNKELELENQIVEKNILRTQTLLCDMLMRDAPLGIVTQSPNIMDLVKCDGAALLYKSKIWRLGVTPTDLQLQEIALWLSDYHMDSTGLSTDSLYDAGYPGALALGDVVCGMAAVRITSKDLLFWFRSQTAAEVRWGGAKHEPGEKDDGRRMHPRSSFKAFLEVVKTRSLPWKDVEMDAI

SEQ ID NO: 8870 - protein, 210 aa, Sophora affinis
YDRVMAYKFHEDDHGEVIAEITKPGLEPYLGLHYPATDIPQAARFLFMKNKVRMIVDCHAKHVKVLQDEKLPFDLTLCGSTLRAPHSCHLQYMANMDSIASLVMAVVVNDSDEDGDSSDAVQPQKRKRLWGLVVCHNTTPRFVPFPLRYACEFLAQVFAIHVNKEIELEYQLIEKNILRTQTLLCDMLMRDAPLGIVSQSPNIMDLVKCD

SEQ ID NO: 8871 - protein, 360 aa, Stackhousia minima
DLEPVNPADVPITAAGALKSYKLAAKAITRLQSLPSGNISLLCDVLVKEVSELTGYDRVMVYRFHDDDHGEVVAECCRPDLEPYLGLHYPATEIPQASRFLFMKNKVRMICDCLAPPVKVLQDKRLTQPLSLGGSTLRSPHGCHAQYMVNMGSIASLVISVTINDDEDEANSEQHRGRKLWGLVVCHHTTPRSVPFPLRYACEFLIQIFGVQINKEVELSAQKKEKHILRIQTVLCDMLLRNAPEGILAQSPNVMDLVKCDGAALYYRNDVRLVGITPTEKQIRDIAEWLLEHHSESTGLTTDSLMEAGYADASILGEAVCGMAAVKITSKDFLFWFRSHTAKEMKWGGAKHDPDDKDGG

SEQ ID NO: 8872 - protein, 2052 aa, Aspergillus nidulans FGSC A4
MARSRLSSSWTLLVTLAILLGCFIVPGVTVKHENFKKCSQSGFCKRNRALADEVAAKGSSWSSPYELDPSNIQFKDGYLRGTILKTISPTEKVRLPLLISFLESGVARVTVDEEKRMTGDIEIRHGSQARKERYNDAQSWVLVGGLDSSKSAILSPESEDGYTKVLYGPNNAYQAVIRHSPFSVDFQRDGQTHVQFNNKGYMNMEHWRPRVDAPSESEQDVLGSQEDESTWWEETFGGNTDSKPRGPESVGLDISFPGYTHVFGIPEHADSLSLRETRGGPGNHEEPYRLYNSDVFEYELNSPMTLYGAIPLMQAHRKDSTVGVFWLNAAETWIDIVKSKTDTHSHWFSEAGQLDVFVFLGPTPGEISKKYGELTGYTQLPQQFAIAYHQCRWNYVTDEDVKEVDRNFDKYQIPYDIIWLDIEYLDDRKYFTWDPLTFPDPISMEKQLDESERKLVVIIDPHIKKQDKFEISKELNSKGLATLNKDGNVYEGWCWPGASNWIDCFNPAAIKWWVGLFKYDRFKGTLPNVFIWNDMNEPSVFNGPETTMPKDNLHHGNWEHRDVHNVNGITFVNATYQAMLERKKGEIRRPFILTRSFYAGAQRMSAMWTGDNQATWEHLAISLPMVLNNGISGFPFAGADVGGFFHNPSKELLTRWYQTGIWYPFFRAHAHIDTRRREPYLIQEPFRSIITQAIRLRYQLLPAWYTAFHEASVNGTPIVRPQFYVHPTDEAGFTIDDQIYLGSTGILAKPVVTEGATSVDIYIADDEKYYDYFDYTVYQGAGKRHSVPAPMEKVPVLMQGGHIIPRKDRPRRSSGLMKYDPYTLVVVLDKNGQAEGTLYVDDGETFDYQRGGHIHRRFHFQDSSLVSEDIATHGPQTAAYLKTMASVSVERIVVIDPPKELQDRSTVTVIEDGAKTSSSAQLEYHAQEGGKAPYAVVKNPRQLKSACGRSHSLNMELQSSTESFSGFGDYYSLALLAQAILTIGVQAILLKVALDNRPAPGQRSGIEHIPFTGADDKGFARPYEFWQWKNPRPYWLFLAYFTGVLSFIHIFLTPISSSPTYISFLGYWGLAVEAVLPLPQVLANHRSRSCKGFRLSVVAAWILGDIMKLSYFFSSEQVIPWAFLIMASGQTIRIGYVPEHYLAPLHLAFRNPSVSSLPFKIALTPFPSGTGHMITSLRSGEIDVAIGLTEGWIAGLAGKQAPLDEKERGYKLVGQWVDTPLRWAIVTGRNRDELTGVEELEGSRVGVSRLGSGSHIMSFVLAQQRGWKPTSLTPVVTGPFGALRDGVTGNNLEAKKPTSEFFMWEHFTTKPYFHSPESPLKKIGEIFTPWPSWMVVASTSVFPTPETDERLKQLFGLLDEGIKEFRSELGRVIGLLGTGELGCTYGEEDAGEWIKDVRFVEGVRGVDESVVKGVVDVLKVAGVIDEGLEDGEALKRVVGIRRYIHIQLMTIAGPVRDQVLYLKLELMTRIKTNPPACTNRGHYVYKRLVELATMLSLLTIPIFGPRLVLSRSVVVAAAAVGGKELWYTGVSRLSPAGRSGVSVCAEKGYCADSNIDVIVLAFLMTINGPGGAPEIDFSISSQGCTTFNGTNLKNCPEIGEDITKCQAAGKTILLSIGGATYSEGGFDSATAANAGADLLWATFGPDQNDTKIHRPFGSAVIDGFDFDFEAAVTNTGVFATRLRALADADTSKKYYLTAAPQCPYPDAAGKDILNTNSSAAIDAVFVQFYNNYCGVNAYTPARNTPAGARSKAGYKLRAREDRYGRPHRNSGSGNQAAASNFNFDVWDNWALTQSKNKNVRVFLGVPANTGAASTGYLPIASLEPVISYSKGFESFGGVMMWDVSQAYGNPGFLDGVAKALGKGLTAHAPVQESPQQQQQPAIDEAQPPSAQQAQDANESVDTSPLQQQQQNAGGEGQTPTQLGQDVNESLETSPPLQQQQEAGDEGQAPAQQSQVAYESVDASPPLQSPPLQQQQNADDEGQTSAQQSQGGDAPVTTSPPLQQEGAIPAALQETTEAGEQQLNQDQADDQDRPLNLLPSIFDPDDDLDWIQI

SEQ ID NO: 8873 - protein, 774 aa, Kluyveromyces lactis NRRL Y-1140
MDGVMLDKVELNQHEVGAARERSRSMASLSKFIPKSIWKPQQQQQQQQPSETSEGNTKASNSHPVMLHASLHEAPAIVLQEAKPVSRESIEQEGAPAEKAASGNSSKLSMRLKKVFGKKEPSQPPVDSELSPPASSEAAANHDANDTTNTLNRNRTNSDTDPEPKRNLYSDGSQIQGTPLTSPSKSISSYNSGTHKPNNLVTGNQASKLSPNFDIPEASSNGNGFVPSYNSMTNISTASLNLIDENEETQNFEGSLHQSGEIIHPAITTPLKSGSESPFLSSQSMKPFPASDEAENSHRRSESNGVSVKPQLRRTASQPTDVHVQVNGKTASTKEEFSPRRGTVGADASFIQPPKRSERLRNKSFSNKFQDILVGPQSFEKIRLLGQGDVGRVYLVREKQTNRLYALKIFSKPEMIKRKKIKRILTEQEILATSNHPFIVTLYHSFQTEDYLYLCMEYCMGGEFFRALQTRKTKCISEDDARFYSSEVTAALEYLHLMGFIYRDLKPENILLHQSGHIMLSDFDLSVQAKDTKNPQVKGNASHSLVDTKICSDGFRTNSFVGTEEYIAPEVIRGNGHTAAVDWWTLGILIYEMLFGFTPFKGDNTNQTFSNILKNEVVIPNNNETSRACKDLIRKLLIKNENKRLGSKLGASDIKKHPFFKNDQWSLLRNQEPPLIPVLAKNGCDFAKLSSNPKGSKDKKDSAEQQEKLMFEEKVELDDQVSDNDPFHDFNSMSLMKQDNDSLIYGDSTSYGKISYTPNQNRSRSNSHRSFFKR

SEQ ID NO: 8874 - protein, 253 aa, Platanus x acerifolia
MSLLSDLINLNLSETTEKIIAEYIWIGGSGMDLRSKARTLPKLVDDPKKLPKWNYDGSSTGQAPGTDSEVILYPQAIFKDPFRRGNNILVMCDTYTPAGEPIPTNKRCNAEKIFSHPDVAAEEPWYGIEQEYTLLQKDVKWPLGWPVGGYPGPQGPYYCGVGSDKAWGRDIVDSHYKACIYAGINISGINGEVMPGQWEFQVGPSVGISAGDEVWVARYILERITEIAGVVLSFDPKPIQGDWNGAGAHTKLQ

SEQ ID NO: 8875 - protein, 135 aa, Populus trichocarpa
MSIREALMKAEKALKMSKRRDWYKILGISKTASVSEIKRAYKKLALQWHPDKNVDNREEAEAKFRDIAAAYEVLGDDDKRARYDRGEDMEDMGMGGGGGGNPFGGGGQQFSFHFEGGFPGGGFDGGFPGGYQFHF

SEQ ID NO: 8876 - protein, 357 aa, Sorghum bicolor
MASLTDLVNLDLSDCTDKIIAEYIWIGGSGIDLRSKARTVKGPITDPSQLPKWNYDGSSTGQAPGEDSEVILYPQAIFKDPFRKGDNILVMCDCYTPQGEPIPTNKRYNAAKVFSHPDVAAEVPWYGIEQEYTLLQKDVNWPLGWPVGGYPGPQGPYYCAAGADKAFGRDVVDAHYKACLYAGINISGINGEVMPGQWEFQVGPSVGISAGDEIWVARYILERITEIAGIVLSLDPKPIQGDWNGAGAHTNYSTKSMREAGGYEVIKKAIEKLGKRHTEHIAAYGEGNERRLTGRHETADINTFKWGVANRGASIRVGRDTEREGKGYFEDRRPASNMDPYVVTGMIAETTILWNGN

SEQ ID NO: 8877 - protein, 189 aa, Saccharum officinarum
  misc_feature (3)..(3): Xaa can be any naturally occurring amino acid
  misc_feature (52)..(52): Xaa can be any naturally occurring amino acid
  misc_feature (161)..(161): Xaa can be any naturally occurring amino acid
YRXDIPQASRFLFRQNRVRMIADCHATPVRVIQDPGLSQPLCLVGSTLRAPXGCHAQYMANMGSIASLVMAVIISSGGDDEQTGRGGISSAMKLWGLVVCHHTSPRCIPFPLRYACEFLMQAFGLQLNMELQLAHQLSEKHILRTQTLLCDMLLRDSPTGXVTQSPSIMDLVKCDGAALYYHGKYIPIG

SEQ ID NO: 8878 - protein, 218 aa, Brassica napus
  misc_feature (206)..(206): Xaa can be any naturally occurring amino acid
MGVDYYNVLKVRRDANDDDLKKSYRRLAMKYHPDKNPTSKKEAEAKFKQISEAYDVLSDPRRRQIYDQHGEEGLKSSDLPSAAETASASAAAKQRSYSSRRDDSEFRYYPRDAEDIFGEFFGTSPAKTSPANKKAAPANRKAADIESALPCTLEELYKGGKKKMRISRLVPDEFGKPKTVQEILKIDIKPGWKKGTKITFPEKGNXQEPGVTPADLTF

SEQ ID NO: 8879 - protein, 372 aa, delta proteobacterium MLMS-1
MKIDYYKTLGVGTDASMEEIKKAYRKLALQYHPDRNPGDQEAEEKFKTATEAYEVLGDLEKRKIYDRYGVDGLRDSGYQGPGGFDDIFSSFSDIFGDLFGFGGARGGSRRASGGPIPGNDLRYDLVISFMEAAHGVEKEVEISKGETCWTCEGSGARPGHPPESCSTCNGIGQVLHAQGPFRVQSACPHCRGQGRVVTEPCQDCQGQGLVKRSKKVSLKIPAGVDSGARMRLKGEGEGGRRGGPAGDLYVIIHVQPHDFFQREGYDIVCSLPLSFTQAALGCSLEVPTIYGSHKLKIPAGTQPGQHFTINEMGVAKLRGGGYGDMICEVRVVVPKRLTKKQKKLLKEFADSEEDPSDDAAKGDGFLKKFFHL

SEQ ID NO: 8880 - protein, 318 aa, Simarouba amara
AKAISRLQSLPSGNLSLLCDVLVKEVSELTGYDRVMVYKFHEDEHGEVVAECRRPDLEPYLGLHYPATDIPQASRFLIMRNKVRMIYDCLAPSVQVIQDKRLDQPLSLCGSTLRAPHGCHAQYMANMGSIASLVMSVTINEEDDELDNDQQQARKLWGLVVCHHTGPRFVPFPLRYACEFLIQIFGVQVNKEVELAAQLREKHILQTQTVLCDMLLRDSPIGIVTQSPNVMDLVKCDGAALYYGGKLWLLGVTPTEEQIKDIAEWLLKYHRGSTGLNTDSLMEAGYPGASVLGDVVCGMAAVKISSKDFLFWFRSHTA

SEQ ID NO: 8881 - protein, 318 aa, Simarouba glauca
AKAISRLQSLPSGNLLLLCDVLVKEVSELTGYDRVMVYKFHEDEHGEVVAECRRPDLEPYLGLHYPATDIPQASRFLIMRNKVRMIYDCLAPSVQVIQDKRLDQPLSLCGSTLRAPHGCHAQYMANMGSIASLVMSVTTNEEDDELDNDQQQARKLWGLVVCHHTSPRFVPFPLRYACEFLIQIFGVQVNKEVELAAQLREKHILQTQTVLCDMLLRDSPIGIVTQSPNVMDLVKCDGAALYYGGKLWLLGVTPTEEQIKDIAEWLLKYHRGSTGLNTDSLMEAGYPGASVLGDVVCGMAAVKITSKDFLFWFRSHTA

SEQ ID NO: 8882 - protein, 620 aa, Kluyveromyces lactis NRRL Y-1140
MKTCYYDLLDVKSDATDTDLKRAYRKKALLYHPDKNRNNIEEATEVFAQIRAAYEVLSDAQERAWYDAHKDQILNDSIDDAYDSDGSNVVDSSVTGVTTEELLKFFDGGMYSRIDDSPAGLYQIGGKIFAKLAGDEVRNGRKLGMAAFKDVVDDTVDADIVSIGYVNSMEKYKESNLLLPTFGYSGTSYQEVKVFYKKWGNFSTVKSFSWKDEYMYSRNYDRRTKREINKRNEKLRTQARSEYNKTVKRFVTFIKKFDKRMKEGARKQEEEKKLRLQNALKSQISKDKDVEMSKKQADFALQDWQTIDHNRLQEIDEYYLSKDQKKAPTDGEHHINNDLEDVLIYECFICNKNFKSEKQLENHTNTKLHRKLLRQLQWEMKQESIALGLDNISDVDEFKSASETYSDNETSGSIHLSSPDEFEEIEESDTFSFSDIDAELKKIDEDLDALNSTESNINNFMLETSEDDKQISDVEYIIDDEVDENISQKVETNNATQVSKNENQNKDTEPKDDLAMLLESLKKDNADTSWEPKKKNNGKKNKSRKKQTNSTTQIDSNTTSGNNAENKISADIDSFICSTCGVKFDTRNKMFKHLDSTNHAAPLSTNKKGSKKRNIRNNSK

SEQ ID NO: 8883 - protein, 318 aa, Simarouba glauca
AKAISRLQSLPSGNLLLLCDVLVKEVSELTGYDRVMVYKFHEDEHGEVVAECRRPDLEPYLGLHYPATDIPQASRFLIMRNKVRMIYDCLAPSVQVIQDKRLDQPLSLCGSTLRAPHGCHAQYMANMGSIASLVMSVTINEEDDELDNDQQQARKLWGLVVCHHTSPRFVPFPLRYACEFLIQIFGVQVNKEVELAAQLREKHILQTQTVLCDMLLRDSPIGIVTQSPNVMDLVKCDGAALYYGGKLWLLGVTPTEEQIKDIAEWLLKYHRGSTGLNTDSLMEAGYPGASVLGDVVCGMAAVKITSKDFLFWFRSHTA

SEQ ID NO: 8884 - protein, 388 aa, Gevuina avellana
PYEVPMTAAGALQSYKLAAKAIARLQSLPSGSMDRLCDTVVQEVYELTGYDRVMTYKFHEDDHGEVVSEITKPGLEPYLGLHYPATDIPQAARFLFMKCKVRMICDCRAKHVKVLQDEKLTFDLTLCGSTLRAPHSCHLQYMENMSSIASLVMAVVINEGNEESESSGSLQPQKRKRLWGLVVCHNTTPRFVPFPLRYACEFLIQVFAIHVSKEIELENQILEKNILRTQTLLCDMLMRDAPLGIVSQSPNIMDLVKCDGAALLYKNKIWLLGLTPTESQIHEIAAWLSNSHMDSTGLSTDSLYDAGFPGYLSLADVVCGMAVVRINSNDMLFWFRSPTAAEIQWGGAKHDPNDKDDGRRMHPRSSFKAFLEVVKTRSLPWKDYEMDA

SEQ ID NO: 8885 - protein, 292 aa, Vitis vinifera
MEGYEPGSGSRYVHQLLGPELHLQRPSSLPQHQATQQPSDSRDESPDDQEQRADTEEAAAASSGGATTSSNRRPRGRPPGSKNKPKPPIIVTRDSPNALRSHVLEVAAGADVMESVLNYARRRGRGVCVLSGGGTVMNVTLRQPASPAGSIVTLHGRFEILSLSGTVLPPPAPPSAGGLSIFLSGGQGQVVGGSVVGPLMASGPVVLMAASFANAVFERLPLEEEEGAVQVQPTASQSSGVTGGGAGGQLGDGGGSGGGAGVPIYNMGASMGNFPFPGDLLRWGGSAPRPPF

SEQ ID NO: 8886 - protein, 284 aa, Oryza sativa
MKMKALLPVAAMLLLVSGQLAAPVTADGYVGQLAVFWGRHKEEGSLREACDTGRYNIVVITFYNVFGYQRGRYGLDFSGHPVAAVGADIKHCQSKGVQVLLSIGGQGGEYSLPSSQSASDVADNLWNAYLGGRRAGVPRPFGDAVVDGIDFFIDQGGADHYEQLARQLHGRGVLLTATVRCAYPDSRMEAALATGVFARIHVRIFGDDQCTMFPKDAWEKWAAAYPRCTVFLTVVASPEQDEGYMFQKDLYYGVQQFIDKEPNYGGIAIWDRYYDKKANYSGEG

SEQ ID NO: 8887 - protein, 176 aa, Dalbergiella nyasae
IGLHYPATDIPQAFRFLFKQNRVRMIVDCHASPVRVVQDEALVQPLCLVGSTLRAPHGCHAQYMANMGSIASLVMAVIINGNDEEGVGGRSSMRLWGLVVCHHTSARCIPFPLRYACEFLMQAFGLQLNMELQLAAQTLEKRVLRTQTLLCDMLLRDSPTGIVTQSPNIMDLVKCD

SEQ ID NO: 8888 - protein, 297 aa, Oryza sativa
MASRRLAPLLVLLLSSSLAAGQSTGDTVVFWGRNTDQLEGSLREACDTGLYTTVIISFLSAFGYIPGTYKLDISGHTVSAVGPDIKHCQSRGILVLLAIGGQGGEYSLPTSQAAVDLEDYLWNAFLGGGRPGVARPFGDAVVDGIDFFIDQGATEHYDELARRLYAHNKDYKGRLGVMLTATARCVFPDQRLQAALSTGLFSRIHVKVFGDGRCASRREELEKWMAAYPQSRVLVGVVASPEADRDGYVSHKDLYYDVLQFINKLPNYGGIMVWNRYWDKKTGWTAGNEPGLLDQVL

SEQ ID NO: 8889 - protein, 311 aa, Arabidopsis thaliana; identical to SEQ ID NO: 7399

SEQ ID NO: 8890 - protein, 376 aa, Burkholderia mallei ATCC 23344
MAKRDYYEVLGVAKNASDDEIKKAYRKLAMKYHPDRNPDSKDAEEHFKEAKEAYEMLSDGQKRAAYDQYGHAGVDPNVGAAGAQGFGGFADAFGDIFGDIFGQAAGGGRARGGPQVYRGADLRYSMEITLEQAAHGYDTQIRVPSWAACGVCHGSGAKPGTKPETCPTCHGQGTVRMSQGFFSIQQTCPKCHGTGTYIPEPCAHCHGSGKVKETKTLEVKIPAGIDDGMRIRSAGNGEPGINGGPSGDLYVEIHIKPHAVFERDGDDLHCQMPIPFTTAALGGEIEVPTLAGRASFTVPEGTQSGKTFRLRGKGIKGLHSSIAGDLYVHVQVETPVKLTDQQRDLLKQFEKSLAEGGPRHSPQSKSWFDRVKSFFE

SEQ ID NO: 8891 - protein, 280 aa, Triticum aestivum
  misc_feature (192)..(192): Xaa can be any naturally occurring amino acid
REQKLELHRGGGRSRTSGSPGLQEFGTRANSDNLGAIVDIKILNHLITNQNEYCMEVTPKTLADVKGGTLISYEGRVQLLEIAQVPDEHVNEFKSIEKFKIFNTNNLWVNLKAIKRLVDAEALKMEIIPNPKEVDGVKVLQLETAAGAAIRFFEKAIGINVPRSRFLPVKATSDLLLVQSDLYTLVDGYVIXRNPARVKPSNPSIELGPEFKKVANFLCRFKSIPSIVELDSLKVSGDVSFGSGVVLKGNVTIAAKAGVKLEIPDGAVLENKDINGPEDL

SEQ ID NO: 8892 - protein, 198 aa, Sophora affinis
YDRVMAYSFHEDDHGEVVSEIRRSDLEPLLPVLHYPATDIPQAARFLFQQNRVRMICDCHAKPVNVIQSEELRQPLCLVNSTLRSPLGCHTQYMANMGSIASLVMAVIVNGNDTTRLWGLLVCHHTSPRYVPFPVRYACEFLMQAFGLQLYMEIQLASQMAEKRLLKTQTLLCDMLLRDAPFGIVTQSPNIMDLVKCD

SEQ ID NO: 8893 - protein, 203 aa, Echinacea pallida
DARRDDLNAAIFNLKGIESYDDYERSLLISQMSFEKTFGMSSVFIESTLMENGGLAESANPATMINEAIHVISCGYEEKTAWGKEIGWIYGSVTEDILTGFKMHCRGWRSIYCMPVRPAFKGSAPINLSDRLHQVLRWALGSVEVFLSRHCPLWYGWGGGRLKLLQRFAYINTIVYPFTSLPLVAYCTLPAICLLTGKFIIPT

SEQ ID NO: 8894 - protein, 377 aa, Shewanella sp. ANA-3
MSKRDYYEVLGVGRDASEREIKKAYKRLAMKFHPDRNPGDKAAEASFKEVKEAYEILTDANKKAAYDQFGHAGVDPNRGGGGGYGGAGDFGDIFGDVFGDIFGGGRRGGQRQAARGSDLRYNLELSLEEAVKGLTKELRIPTLASCDVCDGSGAKKGSSATTCGTCHGQGQVQMRQGFFTVQQPCPTCHGRGKIIKDPCSKCHGDGRVEKTKTLSVKIPAGVDTGDRIRLAGEGEAGEFGAPPGDLYVQVTVREHAIFVRDGNNLYCEVPISFSKAALGGEIEVPTLDGKVSLKIPAETQTGRMFRLRGKGVKSVRSHAVGDLLCKVVMETPVNLNERQKELLREFEATLTGESKKHSPKAEGFFDGVKKFFQDLNS

SEQ ID NO: 8895 - protein, 296 aa, Metarhizium anisopliae var. anisopliae
QAAPDEGRASGHKLTVYWGAEDDTTTLDDVCNDSSYDVVNLAFLSHFFSAGGYPKMSIGNLDGPSQAQKKAGATGLQDGSSLVKSIKNCQSKGKPVILSMGGATDYSDVQLNSDAQGQQIANTVWNLFLGGTDHKELRPFGDVKLDGVDLDNETNDGTGYLAMTKQFKANFQKDTSKKYYITAAPQCPYPDQSEPLDVCQLLDWVQVQFYNNGNCNIAQRGFAKAVKNWSKGIGSGVQLYIGALASGADGDEGYVHAATLNRAVNQVKAMNLPNFGGAMLWEAHSAVKNGQLPEED

SEQ ID NO: 8896 - protein, 403 aa, Oryza sativa Japonica Group
MASSGKMEGPSAPAMRRDPYEVLSVPRDSSDQEIKSAYRKLALKYHPDKNASNPEASELFKEVAYSYSILSDPEKRRQYDTAGFEALENEGMDMEIDLSNLGTVNTMFAALFSKLGVPIKTTVSPNVLEEAMSGTVTVRPLPVGSSATGKVDKQSAHFYGVTISEEQAQSGIVVRVTSAAQSKFKLLFFEQEINGGYGLALQEDSQKTGKVTSAGMYFLHFQVYRMDSTVNALAMAKDPEAAFFKRLEGLQPCEVSALKSGTHIFAVYGDNFFKPASYTIEAMCAKSYEDTTQRLKEIESKILEKRNDLRQFETEYRKALARFQEVTNRYTQEKEAVDDMLRERDDIHSSFTTERTMVNSVGAGSSSSRYPTESPENGNIDGKDKSSKKKWFNLNLNRSDKKA

SEQ ID NO: 8897 - protein, 182 aa, Glycine max
MDHYKVLGLHRTATKEEIKAAFKKLAFQFHPDKHSQSPKAVRENATLRFKQVSEAYEVLMDDRKRADYNFRRSSGAGTGNNYYSQYSYGYGRSGNSYYEYKPRSGGGGGFASKFELAFRILTARSSLLNLGFAAPILGGIVVIDSGGESLWRMQNSGKSFEEALKSIEKAKPYKEEHIEEDP

SEQ ID NO: 8898 - protein, 211 aa, Macaranga oblongifolia
PQASRFLFMKNKVRMICDCLAPPVKVIQDKSLAQPLSLCGSMLRSPHGCHAQYMANMGSIASLVMSVTINEDGDEMDDDQQKGRKLWGLVVCHHTSSRFVSFPLRYACEFLIQVFGVQINKEVDLAAQMREKHVLQTQTVLCDMLLRDAPAAIITQSPNVMDLVKCDGAALYYRKKFWLLGVTPTEAQIRDIAEWLLEYHSESTGLSTDSL

SEQ ID NO: 8899 - protein, 153 aa, Glycine max
MLGTVESNGAVCYYSELGIVKHCTDDEIRCAYRKMALKWHPDRWIKDPKLALEAKNRFLRVQEAYSVLSNKGKRRIYDAGLFGLIGEDDDEGFLDFMQEMALMMQKVRPKDEKGMLEDLQGLLIDKMADNEGMEKSGLSWNSSPCPTKRARIL

SEQ ID NO: 8900 - protein, 301 aa, Zea mays; identical to SEQ ID NO: 7877

SEQ ID NO: 8901 - protein, 129 aa, Zea mays
  misc_feature (115)..(115): Xaa can be any naturally occurring amino acid
  misc_feature (118)..(118): Xaa can be any naturally occurring amino acid
MGLDYYSVLKVNRSATEDDLKKSYRRLAMKWHPDKNPGDNKAEAEAKFKKISEAYEVLSDPQKRTIYDQYGEEGLKASAEAGSSSSSMNGSTNHRFNPRNAEDVFAEFFGSSKPXFEXMERAKSMRFQT

SEQ ID NO: 8902 - protein, 976 aa, Pisum sativum
MEHLKKSPSSSSSSSMRPSFPRDPRGSLEVFNPTSNSSSPVRSPSNLKNWTEIEEPRNELSEQHNEFSDEVTNTSWMAIKEGETGAAVQRAAEWGLMLTTDAETGKPQGVAVRNSGGDEPSVKLETKRNSNNTVRTSGESSDGDDPRGFPRVSEDLKDALSAFQQTFVVSDATKPDYPILYASAGFFKMTGYTSKEVIGRNCRFLQGADTDPDDVARIREALEGGKSFCGRLLNYKKDGTPFWNLLTISPIKDDDGNVLKLIGMLVEVNKHTEGSKEKKLRPNGLPESLIRYDARQKEKATSSVSELLEAMKRPRALSESGQRPFIRKSGGGGGSEEDEEAVENKSRRKSDSVASFRPKPQGKIRHSMERISELPENKQKNSRRGSFMGFMRKSDSIDESIDNEVIVDVSSGSEDDERDDSFEFDDKEKLREKRKGLDLATTLERIEKNFVITDPRLPDNPIIFASDSFLELTEYSREEILGKNCRFLQGPETDPATVRKIREAIDNQTEVTVQLINYTKSGKKFWNLFHLQPMRDHKGEVQYFIGVQLDGSQHVEPLHNCIAEDTAKEGELLVKETAENVGEAVKELPDANQKPDDLWMNHSKVVRPKPHRKDDDAWRAIQKVLENGEQVGLKHFRPIKPLGSGDTGSVHLVELEGTGQYFAMKAMDKGVMLNRNKVHRACTEREILDMLDHPFLPALYASFQTKTHVCLITDYYPGGELFLLLDQQPTKVLKEDSVRFYAAEVVIALEYLHCLGIIYRDLKPENVLIQSNGHVSLTDFDLSCLTSCKPQLILPAIEEKKKRKKKKNKGQQKNQQVPMFMAEPMRASNSFVGTEEYIAPEIITGSGHTSAVDWWALGILLYEMLYGYTPFRGKTRQKTFANILHKDLKFPKSKPVSPHGKQLIYWLLHRDPKNRLGSLEGANEIKNHPFFKNINWALVRCTKPPELDGPILLDNDEKKEAKEIDPGLDDLQKNIF

SEQ ID NO: 8903 - protein, 63 aa, Protea angolensis var. angolensis
MPGRWEYQVGPSVGIEAGDHIWCSRYLLERITEQAGVVLTLDPKPIEGDWNGAGCHTNYSTKS

SEQ ID NO: 8904 - protein, 191 aa, Zea mays
ESSPLRSSYAATRRPDRNRREWPNSTDGSQPSEHKEGGCQGPEGPILCINNCGFFGSAATMNMCSKCHKEMITKQDQAKLAASSIDSIENGSDAVMEPADAGSNTVVAVAQVELQTMNVQQPADVAGPSEGVAAISKGGKVGTNRCSACRKRVELTGFNCRCENLYCALHRYSDKHDCKFDYRTAARDAIG

SEQ ID NO: 8905 - protein, 180 aa, Sinorhizobium meliloti
EFDAFPTLEQLPLWGFDGSSTQQAEGRSSDCVLKPVAVYPDPVRTNGALVMCEVMMPDGKTPHPSNTRATVLDDESAWFGFEQEYFFYKNGRPLGFPEQGYPAPQGPYYTGVGYKNVGDIARQIVEEHLDICLAAGINHEGINAEVAKGQWEFQVFGKGSKKAADEVWLARYLLLRLTEK

SEQ ID NO: 8906 - protein, 390 aa, Herminiimonas arsenicoxydans
MSEPGLPISTIATPLRNRYDRMEWAGAFGDLGTLIPFVAAYIGVLKMDPFGVLFAFGVCMLVCGLYYKTPFPVQPMKAIGAVAALQAVQTAVVTPAAVYSAALVTGAVWLLLGLTGLVSRVARLVPPTVVIGIVFGLGFGFMLQGVTMMQSDWLIALIGGSATLLLMGNKKFPAMFVLLAFGITVGIVQNPALLTALKQSGAAFHTPTFALTDISWSQFFVGAVLLALPQIPLTLGNAVIAIKEENNRLFPHRPVTEGGVSISTGIMNLFSASVCGVPMCHGAGGMAGHIAFGARTGGAVVILGCLLLVLAFFFSDSVEVLFQLFPTAVLGVILFLTGAQLALGSSAFPAERSGRVVVLLTAAFCMWNVGVGFVVGIALHHLQQRGRMQM

SEQ ID NO: 8907 - protein, 373 aa, Haemophilus somnus 129PT
MAKRDYYEILGVQKGADDKEIKRAYKRLAMKYHPDRTKGDKESEEKFKEINEAYEVLADKEKRAMYDQYGHAAFEQGGGAGGFGGFSGADFGDIFGDMFGDIFGGGRSRQRVVRGEDLRYDIEISLEEAVKGCKKDIQINTLVHCGTCHGSGAEAGSKIESCPTCHGAGRVRRQQSFFVTEQTCPHCHGTGKKIEKPCHTCHGEGRVHKTQNLTVTIPMGVDTGNQLRLAGKGAAGENGAPAGDLYVVIHVKKHHIFERDGNNLYCEVPISFTMAALGGEVEIPTLDGRLKVKIPAETQTGKLLRLRGKGITSRGYAGDLICEIVIETPIKLNEEQKELLRKLEESLEGKTLQRPKSSGFLDGVKKFFDNLGK

SEQ ID NO: 8908 - protein, 354 aa, Agaricus bisporus
MANTYHNDLLAPYLSLDQGDKIQAEYVWIDGDGGLRCKTTTVSKKVTDIGQLRIWDFDGSSTNQAPGHDSDVYLRPAAIFKDPFRGGDNILVLAETYNNDGTPNRTNHRHHAKKVFDEAKEHEPWFGLEQEYTLFDADDQPYGWPKGGFPGPQGPYYCGAGTGKVFARDLIEAHYRACLYAGINISGINAEVMPSQWEFQVGPCEGISMGDHLWMARYLLVRIAEQWGVKVSFHPKPLKGEWNGAGCHTNFSTKAMREAGGMKFIEDAIEKLAKRHDEHIAVYGEDNDLRLTGRHETGHISNFSSGVANRGASIRVPRHVASQGYGYLEDRRPASNIDPYRVTSIIAETTILDK

SEQ ID NO: 8909 - protein, 116 aa, Lithachne humilis
VAEPVEARSSSFVGTHEYVAPEEARGGGHGAAVDWWAYGVFLYELLYGRTPFVGANNEATLLNIVRRPLEFPDASARDLIARLLDKDPRTRLGSQRGAADVKPTPFFKGLNFALLR

SEQ ID NO: 8910 - protein, 360 aa, Glomerella cingulata
MATEAAVVSNPNTLAKYLKLDQKGSIMAEYIWIDADGETRSKSRTLKEKEYTPEDLPMWNFDGSSTGQAPGDNSDVYLKPVAVFPDPFRGSPNILVLSECWNADGTPNKYNYRHECAKLMEAHAAHEPWFGLEQEYTLLDLSNRPFGWPANGFPAPQGPYYCGVGTGKVVQRDIVDAHYKACLYSGVKISGTNAEVMPAQWEFQVGPCVGIEMGDHLWLARFLLARIAEEFGAKVSVDPKPIPGDWNGAGLHSNFSTKEMRVEGGMKHIEAAIKKLEGRHKEHIAVYGEGNEKRLTGRHETGAIDQFSYGVANRGASIRIPREYTAKGYGYFEDRRPASNADPYRITGILMETIYGSVDN

SEQ ID NO: 8911 - protein, 427 aa, Triticum aestivum
MAQAVVPAMQCQVGVRGRSAVPARQPAGRVWGVRRTARATSGFKVLALGPETTGVIQRMQQLLDMDTTPFTDKIIAEYIWVGGSGIDLRSKSRTISKPVEDPSELPKWNYDGSSTGQAPGEDSEVILYPQAIFKDPFRGGNNILVICVTYTPQGEPIPTNKRHMAAQIFSDPKVTSQVPWFGIEQEYTLMQRDVNWPLGWPVGGYPGPQGPYYCAVGSDKSFGRGISDAHYKACLYAGIEISGTNGEVMPGQWEYQVGPSVGIDAGDHIWASRYILERITEQAGVVLTLDPKPIQGDWNGAGCHTNYSTLSMREDGGFDVIKKAILNLSLRHDLHIAAYGEGNERRLTGLHETASISDFSWGVANRGCSIRVGRETEAKGKGYLEDRRPASNMDPYTVTALLAETTILWEPTLEAEALAAKKLALKV

SEQ ID NO: 8912 - protein, 108 aa, Panicum miliaceum
SCSFVGTHEYVAPEVARAAPHGAAVDWWALGVFLYELLHGRTPFAGADNESTLRNIARRPLAFPDAAARDLIAGLLAKDPARRLGSRRGAADVKAHPFFRGLNFALLR

SEQ ID NO: 8913 - protein, 380 aa, Chlamydomonas reinhardtii
MAFALRGVTAKASGRTAGARSSGRTLTVRVQAYGMAAEYIWADGNEGKPEKGMIFNEMRSKTKCFEAPLGLDASEYPDWSFDGSSTGQAEGNNSDCILRPVRVVTDPIRGAPHVLVMCEVFAPDGKPHSTNTRAKLREIIDDKVTAEDCWYGFEQEYTMLAKTSGHIYGWPAGGFPAPQGPFYCGVGAESAFGRPLAEAHMEACMKAGLVISGINAEVMPGQWEYQIGPVGPLALGDEVMLSRWLLHRLGEDFGIVSTFNPKPVRTGDWNGTGAHTNFSTKGMRVPGGMKVIEEAVEKLSKTHIEHITQYGIGNEARLTGKHETCDINTFKHGVADRGSSIRIPLPVMLKGYGYLEDRRPAANVDPYTVARLLIKTVLKG

SEQ ID NO: 8914 - protein, 471 aa, Blumeria graminis
MPTFGFLKKRKKVSLGHRDLDSPASTLSQPASPITPSTSRGLGEPIDTTSSKITSPGQKLGSNITKDHRGTRTTVEDLPSMTDVSHLQQAYRNLSQGSTASKSNLLTIHNLINPPQHDGAGQSKVMPEKHMNNKTERPVQGKAAVAQVRQTKGKYSLSDFEILRTLGTGSFGRVHLVQSKHNQRFYAVKVLKKQQVVKMKQVEHTNDERSMLQEVKHPFLITLWGTFQDSKNLYMVMDFVEGGELFSLLRKSQRFPNPVAKFYAAEVTLALEYLHKKDIIYRDLKPENLLLDRHGHLKITDFGFAKKVTDITWTLCGTPDYLAPEVVSSKGYNKSVDWWSLGILIFEMLCGYTPFWDNGSPMKIYENILKGRVKYPPYIHPDAQDLIQRLITADLTKRLGNLHGGAEGIKSHQWFAEVTWERLAKKDIDAPYVPPVKAGSGDASQFDKYPEETERYGQTGPDEHGSLFENF

SEQ ID NO: 8915 - protein, 425 aa, Oryza sativa Indica Group; identical to SEQ ID NO: 431

SEQ ID NO: 8916 - protein, 118 aa, Pennisetum glaucum
TLVANPVNARSCSFVGTHEYEAPEVARGGPHGAAVDWWAYGVFLYELLHGRTPFAGADNDPTLRNIARRPLAFPDAAARDLIARLLAKDPAHRLGSRRGAADVKAHPFFKGLNFALLR

SEQ ID NO: 8917 - protein, 275 aa, Medicago truncatula
MNNNNNNIISRNGNGTTQACAACKYQRRKCGTSCILAPYFPHDRQKQFLNAHKLFGVGKITNMIKNVPPHLRDHTMSSIIFQSDMRAMDPVGGCYRFIQQLQSQYEFYQAELHLTRQQISICKATQSQQHQQQFAAVSNHHYNDMHVINHNNNEDNDAALNIINHFNQQHFVDDQLNMNMLPQQQLQLQQQYVVDDVCINPNYVPLQEDLNSWANNINIPLSPLTLEGNNKEEDGEEDQERVGDDQGNDQKPVFDLINEMNSLDTNSSSIDPGHQ

SEQ ID NO: 8918 - protein, 114 aa, Setaria italica
NPVKARSCSLVGTQEYVAPEVARGGPHGAAVDWWAYGVFLYELLHGRTPFAGADNESTLRNIARRPLRFPDAAARDLIARLLDKDPAHRLGSRRGAADVKAHPFFKGLNFALLR

SEQ ID NO: 8919 - protein, 107 aa, Setaria viridis
CSLVGTHEYVAPEVARGGPHGAAVDWWAYGVFLYELLHGRTPFAGADNESTLRNIARRPLAFPDAAARDLIARLLDKDPAHRLGSRRGAADVKAHPFFKGLNFALLR

SEQ ID NO: 8920 - protein, 530 aa, Colletotrichum trifolii
MPTLGFLKKKRTREGNQDPQGSLPTSPVTPTSSKPFDSSISTTLSSLSNNSQATSQPSGPGQKQQEDPASSEAAKNQQMYPVTVHPAPNQQHYNQQGEPQQNLPSISNLINPTQHDASSNGHNYLAHATQTSQPNPSPGTDPTRLQQQQAQSMLHPPTQPQQQQQQQQQQQQQQQQQQQQQQQQQQTQTQQPTAKERHAATGAGPAGRQTKGKYTLQDFDILRTLGTGSFGRVHLVQSKHNQRFYAVKVLKKAQVVKMKQVEHTNDERRMLGEVKHPFLITLWGTFQDSKNLYMVMDFVEGGELFSLLRKSGRFPNPVAKFYAAEVTLALEYLHSRDIIYRDLKPENLLLDRHGHLKITDFGFAKRVPDKTWTLCGTPDYLAPEVVSNKGYNKSVDWWSLGILIYEMLCGYTPFWDSGSPLKIYENILKGKVKYPAYINPDAQDLLSKLITADLTKRLGNLYGGPNDVKTHPWFQEVTWDRLARKDIDAPYTPPVKAGAGDASQFDRYPEDPERYGSSGHDEYGHLFTDF

SEQ ID NO: 8921 - protein, 393 aa, Treponema denticola ATCC 35405
MFLEVPKFLHWEFLVPASKRDYYEVLGVDKKASNDDIKKAYRKLAIKYHPDKNQGDKAAEEKFKEATEAYEILIDEKKRSMYDQFGHAGVDGMSGGGGYDPSAFQGFEDIFGGSFSDIFENLFGGGFSSRSSGFGGRHAGPVRGSNLRYDLQISFVDAVYGKKAELSYTRNEKCSECHGTGSESGSSKRMCPDCKGTGQVRQSTGFFSISRPCPTCGGEGSIIEKPCKKCGGNGLERKKQRIIVTIPAGVENGKRITIPSQGNAGQAGGDYGDLFVFIFVQAHPYFERNGIDLYCAVPISMTQAALGGEINIKSLDEKTLRLKIPAGTQNGKLLRIRGEGVPTGIGRKGDLYIQIQVQIPSKLSSNSKKLLQEISAIEGENENPNLIPLKDLP

SEQ ID NO: 8922 - protein, 190 aa, Cupriavidus taiwanensis
MTTLYATLGVQADATLDEIKLAYRRAAMKWHPDRNPGREAESHAAFQQIRDAYAILSDAEQRQVYDDVFEREMRRWEAEHAAQEAEERQAQEEARRVAQEHYEQMVAIAMRFADAGHSRDVLFGVLLGKDCETDLAAQIADSVHALQASRQACAGQACDEAVAPADAGTARTEIPISAFEAFWQGLFRFR

SEQ ID NO: 8923 - protein, 523 aa, Coccidioides immitis RS
MASRAIPSHLRAPNTESRSAEERSFVRHHGKSQSHMAFEHASTNVAASQMRNALNALSDTVKDPSEKKRFEAEMDNFFSLFRRFLNDKAKGNVLSWDRIAPPQPNQVVEYSELSNSASVDYLKKLAVIKLNGGLGTSMGCVGPKSVIEVREGMSFLDLSVRQIEYLNRTYNVNVPLVLMNSFNTDDDTQSIIKKYEGHNIDIITFNQSRYPRVLKDSLLPAPKDYSSPITDWYPPGHGDVFESLYNSGTLDKLIERGVEIVFLSNADNLGAVVDMRILEHMVTNNSEYIMELTDKTKADVKGGTIIDYEGKARLLEIAQVPKEHVNEFKSIKKFKYFNTNNIWLNLRAIKRVVEESALEMEIIPNEKSIPADKKGEADISIIQLETAVGAAIRFFKGAHGVNVPRRRFLPVKTCSDLMLVKSDLYTLQHGQLVIDPNRFGGAPLIKLGTDFKKVSDFQKRIPSIPRILELDHLTISGAVNLGRGVTLKGTVIIVATEGSTIDIPPGSILENVVVQGSLRILEH

SEQ ID NO: 8924 - protein, 188 aa, Stangeria eriopus
DEHGEVVAEIRRSDLEPYLGLHYPATDIPQASRFLFMQNRVRMICDCRAKPVRVIQAAKLRQPLCLVGSTLRAPHGCHAQYMVNMGSIASLVMAVVINVNDDAAGSGRGSSMKLWGLVVCHHTSPRAVPFPVRCACEFLMQAFGLQVNMELQLAAQLTEKHILKTQTLLCDMLLRDAPIGIVTQTPSV

SEQ ID NO: 8925 - protein, 146 aa, Brassica napus
  misc_feature (115)..(115): Xaa can be any naturally occurring amino acid
  misc_feature (128)..(128): Xaa can be any naturally occurring amino acid
  misc_feature (135)..(135): Xaa can be any naturally occurring amino acid
MATSGNITTAGTGSPCGACKFLRRKCLSDCIFEPYFSSEQGAERFAAIHKVFGASNVSKLLLKVPIHDRCEAVVTIAYEAQARLHDPVYGCVSHIFSLQQQVAYLQAQVMAMKAXIAGHKTSAAEGTXQFTTWQXQTSGSPIDSAY

SEQ ID NO: 8926 - protein, 523 aa, Debaryomyces hansenii
MVVDTTYYDLLSLQPDATSLDIKKAYRKAAIKLHPDKNPGDPTAAAKFQEVGEAYQVLSDDNLRSKYDKYGKQESIPSEGFEDPSEFFSMIFGGDAFKDWIGELSLLQELSKSAELSGYGDEEKKDSTEEEKTGDDSKTQTSESKAQDATASTTTTGDTTKNSNSQDEEDVKLRDKTQKLYLEDTSGGGNVGTNDGDRKELTKEEKEELKRKEELEKFEEECRIKKIEMREELSKKLTDKLSLFTETDMKEDVAESFKQKLKYEAESLKMESFGLEILHTIGSVYKTKSKIFLKNQTFLGFGGLWWSVKEKGGVVRDTFKTITSALDAQSTMQEYAKMQEDNEYHAKKEAEEQAEAKQKAEEVDQIEKEIEEMKKEKEQKEAAAANNSADKVVKEGEGIKSDEKKEEEKVPEKHTAEDIADMEKYLMGKVLAAAWSGSRFEIQSTVRGVCDNILQDKEVPLNVRVARAKGLRLIGEVFSSITRTEAEDEEARVFEELVAEATKKREKKKKPTEHTTTADEPTK

SEQ ID NO: 8927 - protein, 428 aa, Chlamydomonas reinhardtii; identical to SEQ ID NO: 5328

SEQ ID NO: 8928 - protein, 1123 aa, Glycine max
MSTSRPSQSSSNSGRSRRSARAMALATVDAKLHATFEESGSSFDYSSSVRISGTADGVNQPRHDKVTTAYLHHMQKGKMIQPFGCLLALDEKTCKVIAYSENAPEMLTMVSHAVPSVGDHPALGIGTDIKTLFTAPSASALQKALGFAEVLLLNPVLIHCKTSGKPFYAIIHRVTGSMIIDFEPVKPYEVPMTAAGALQSYKLAAKAITRLQSLPSGSMERLCDTMVQEVFELTGYDRVMAYKFHEDDHGEVIAEITKPGLEPYLGLHYPATDIPQASRFLFMKNKVRMIVDCHAKHVRVLQDEKLPFDLTLCGSTLRAPHSCHAQYMANMDSIASLVMAVVVNDNEEDGDTDAIQPQKRKRLWGLVVCHNTTPRFVPFPLRYACEFLAQVFAIHVNKEIELEYQIIEKNILRTQTLLCDLVMRDAPLGIVSESPNIMDLVKCDGAALIYKNKVWRLGVTPSESQIREIAFWLSEYHMDSTGFSTDSLSDAGFPSALSLGDVVCGMAAVRVTAKDVVFWFRSHTAAEIRWGGAKHEAGEKDDGRRMHPRSSFKVFLDVVKARSLPWKEYEIDAMHSLQLILRNAFKDTESMDLNTKAINTRLSDLKIEGMQELEAVTSEIVRLIETATVPILAVDVDGLVNGWNIKIAELTGLPVGEAMGKHLLTLVEDSSTDRVKKMLNLALLGEEEKNVQFEIKTHGSKMDSGPISLVVNACASRDLRDNVVGVCFVAHDITAQKNVMDKFTRIEGDYKAIVQNRNPLIPPIFGTDEFGWCCEWNPAMTKLTGWKREEVMDKMLLGELFGTHMAACRLKNQEAFVNLGVVLNKAMTGLETEKVPFGFFARNGKYVECLLSVSKKLDVEGLVTGVFCFLQLASPELQQALHIQRLSEQTALKRLNALSYMKRQIRNPLCGIIFSRKMLEGTALGTEQKQLLRTSAQCQQQLSKILDDSDLDSIIDGYLDLEMAEFTLHEVLVTSLSQVMTKSNGKSIRIVNDVAEQIVMETLYGDSLRLQQVLADFLLISINFTPNGGQVVVAGTLTKEQLGKSVHLVKLELSITHGGSGVPEALLNQMFGNNGLESEEGISLLISRKLLKLMNGDVRYLREAGKSAFILSAELAAAHNLKG

SEQ ID NO: 8929 - protein, 122 aa, Glycine max
PFLMECCERTENDKKGGHLAERIADGRLILRESAQCADEDEKEFQNITKHRYFNTNNLWIRLDKLQEELKQQGGVIRLPMIKNSKTVDPKDSSSTPVFQLETAMGAAIECFDGAGAVCVPRT

SEQ ID NO: 8930 - protein, 172 aa, Populus trichocarpa
MDRDETGCQAPPERPILCINNCGFFGSAATMNMCSKCHKDMLLKQEQTKLAASSIGSIVNGSASSNVNEPVIADTINVQINAVEPKTITVQPSCASVSGERVEAKPKEGPSRCTSCKKRVGLTGFKCRCGDLFCASHRYSDKHDCPFDYRTAAREAIAKANPVVKAEKLDKI

SEQ ID NO: 8931 - protein, 1130 aa, Glycine max
MSTSRPSQSSSNSRRSRHSARMAQATVDAKIHATFEESGSSFDYSSSVRVSGTADGVNQPRSDKVTTAYLNRMQRGKMIQPFGCLLAIDEKTCKVIAYSENAPEMLTMVSHAVPSVGDHPALGIGTDIKTLFTAPSVSGLQKALGCADVSLLNPILVHCKTSGKPFYAIVHRVTGSLIVDFEPVKPYEVPMTAAGALQSYKLAAKAITRLQSLPSGNMERLCDTMVQEVFELTGYDRVMAYKFHEDDHGEVIAEITKPGLEPYLGLHYPATDIPQASRFLFRKNKVRMIVDCHAKHVRALQDEKLQFDLILCGSTLRAPHSCHAQYMANMDSIASLVLAVVVNDNEEDGDTDAVQPQKRERLWGLVVCHNTTPRFVPFPLRYACEFLAQVFAVHVHKEIELEYQIIEKNILRTQALLCMLMRDAPLGIVSESPNIMDLVKCDGAALIYRNKVWRLGVTPSEPQIREIALWLSEYHMDSTGFSTDSLFDAGFPSALSLGDVVCGMASVRVTAKDMVFWFRSHTAAEIRWGGAKHEAGEKDDSRRMHPRSSFKAFLEVVKARSLPWKEYEMDAIHSLQIILRNAFKEDTESLDLNAKAINTRLSDLKIEGINDLKIERMQELEAVTSEIVRLIDTATVPILAVDVDGLVNGWNIKIAELTGLPIGEATGKHLLTLVEDSSTDRVKKMLNLALLGEEEKNVQFEIKTHGSKMDSGPISLVVNACASRDLRDNVVGVCFVAHDITAQKNVMDKFIRIEGDYKAIVQNRNPLIPPIFGTDEFGWCCEWNPAMVKLTGWKREEVMDKMLLGEIFGTQMAACRLKNQEAFVNLGVVLNKAMTSSETEKVPFGFFARNGKYVECLLSVSKKLDVEGLVTGVFCFLQLASPELQQALHIQRLSEQTASKRLNALSYMKRQIRNPLCGIVFSRKMLEGTDLGTEQKQLLRTSAQCQQQLSKILDDSDLDTIIDGYLDLEMAEFTLHEVLVTSLSQVMTKSNGKSIRIVNDVAGHIMMETLYGDSLRLQQVLADFLLISINFTPNGGQVVVAGSLTKEQLGKSVHLVKLELSITHGGSGVPEVLLNQMFGNNGLESEEGISLLISRKLLKLMNGDVRYLREAGKSAFILSAELAAAHNLKA

SEQ ID NO: 8932 - protein, 791 aa, Physcomitrella patens subsp. patens; identical to SEQ ID NO: 2207

SEQ ID NO: 8933 - protein, 388 aa, Macadamia integrifolia
PYEVPMTAAGALQSYKLAAKAIARLQSLPSGSMDRLCDTVVQEVYELTGYDRVMAYKFHEDDHGEVVSEITKPGLEPYLGLHYPATDIPQAARFLFMKCKVRMICDCHAKHVKVLQDEKLTFDLTLCGSTLRAPHSCHLQYMANMSSIASLVMAVVINEGNEESENSGSLQPQKRKRLWGLVVCHNTTPRFVPFPLRYACEFLIQVFAIHVNKEIELENQILEKNILRTQTLLCDMLMRDAPLGIVSQSPNIMDLVKCDGAALLYKNKIWLLGMTPTESQIHEIATWLSNSHMDSTGLSTDSLYDAGFPGSLSLADLVCGMAAVRINSNDMLFWFRSPTAAEVQWGGAKHDPNDKDDARRMHPRSSFKAFLEVVKTRSLPWKDYEMDA

SEQ ID NO: 8934 - protein, 408 aa, Magnaporthe grisea 70-15
MLRRASVLPLAMAIFGTAQAGFNPSMQDNIAAYWGQAGAQEGLGYYCKNVNVDIIPLAFLNIIVNPTNINFANVGDRCSKFPGTDLLKCPEIEADINTCHSLNKTILLSVGGATYSEGGFPNVEAANKAADNLWAMFGPPPAASTNDAATVNRPFGTAYIDGFDLDFETHGIKNLAAFARRLRQVMDTAARPAAVLPSDDKSYPMVPSPSEATKKFYLAAAPQCVFPDAAMDAALSSDVAFDFIMVQFYNNYCGLQNFQPGAAQQNAFNFERWDQWAREKGRSTKVMLGVPGSPNASGSGYTAAGPLDAIIKYCKRFSSFGGVMIWDASQVWSNNGFLDGVVRSLGGAAATETSDAEAPQQAGRPIQQTRAVKVPKFGRCGGRLYTGPRECEQGSKCVYGGALWSVCA

SEQ ID NO: 8935 - protein, 190 aa, Glycine max
MDREGGSNAGSCYYSVLGIRRDASFSDIRTAYRKLAMRWHPDKWALNPATAGEAKRRFQQIQEAYSVLSDQSKRSMYDAGLYDPLEEEDQVRKVFSFHFFSITIFIRKKNVFFFNEQDFCDFMQEMISMMNNVKDEGDSLEDLQRMFVDMVGGDHGHGIGVDLNQDRTAGKRGRVYGSKGNAPKRSNSRS

SEQ ID NO: 8936 - protein, 63 aa, Protea mundii
  misc_feature (30)..(31): Xaa can be any naturally occurring amino acid
MPGQWEYQVGPSVGIEAGDHIWCSRYLLEXXTEQAGVVLTLDPKPIEGDWNGAGCHTNYSTKS

SEQ ID NO: 8937 - protein, 180 aa, Sinorhizobium medicae
EFDAFPTLEQLPLWGFDGSSTLQAEGRSSDCVLKPVAVYPDPVRTNGALVMCEVMMPDGKTPHASNTRATVLDDEGAWFGFEQEYFFYKNGRPLGFPEQGYPAPQGPYYTGVGYKNVGDVARQIVEEHLDICLAAGINHEGINAEVAKGQWEFQIFGKGSKKAADEVWLARYLLLRLTEK

SEQ ID NO: 8938 - protein, 292 aa, Brassica oleracea
MAGLDLGTAFGYVNHQLHRPDLHLHHSSASDDVTPGAGLGHFTADDDDNNHQGLDLASGGGSGSSGGGGGDGGGGGNVVGRRPRGRPPGSKNKPKPPVIITRESANTLRAHILEVTSGCDVFDCVATYARRRQRGICVLSGSGTVTNVTIRQPSAAGAVVTLQGTFEILSLSGSFLPPPAPPGATSLTIFVAGGQGQVVGGSVVGELTAAGPVIVIASSFTNVAYERLPLEEDEQQHLGGGGGSNGGGNLFPEVSAGGGGGLPFFNLPMNMQSNVQLPVEGWPGNSGGRGPF

SEQ ID NO: 8939 - protein, 369 aa, Macadamia ternifolia
  misc_feature (7)..(7): Xaa can be any naturally occurring amino acid
LQSYKLXAKAIARLQSLPSGSMDRLCDTVVQEVYELTGYDRVMAYKFHEDDHGEVVSEITKPGLEPYLGLHYPATDIPQAARFLFMKCKVRMICDCRAKHVKVLQDEKLTFDLTLCGSTLRAPHSCHLQYMENMSSIASLVMAVVINEGNEESENSGSLQPQKRKRLWGLVVCHNTTPRFVPFPLRYACEFLIQVFAIHVNKEIELENQILEKNILRTQTLLCDMLMRDAPLGIVSQSPNIMDLVKCDGAALLYKNKIWLLGLTPTESQIHEIATWLSNSHMDSTGLSTDSLYDAGFPGFLSLADVVCGMAAVRINSNDMLFWFRSPTAAEVQWGGAKHDPNDKDDARRMHPRSSFKAFLEVVKTRSLP

SEQ ID NO: 8940 - protein, 764 aa, Arabidopsis thaliana; identical to SEQ ID NO: 1662

SEQ ID NO: 8941 - protein, 65 aa, Protea cynaroides
MPGQWEYQVGPSVGIEAGDHIWCSRYLLERITEQAGVVLTLDPKPIEGDWNGAGCHTNYSTKSMR

SEQ ID NO: 8942 - protein, 433 aa, Oryza sativa Japonica Group
MPLSSNISTQKTHYEVLSVNEGATYDEVRAGYRAAILNAHPDKSQAKLDSLVSSVEHGEFFSVQKAWEVLRDPKSRTEYDKQLQTSRQNSANIAYEIEIEEMTVESTGDAMELIVSESKEIFTLGIDKPCSLGPSPARPNPGKTGPWAWTRNHFPQHYSSISESNLPAELFPQYTTVEFMSTAETGPVVPPVFLFVVDTCMIEEEIDYLKSALAQAIELLPDQSLVGFITFGTYVQVHELGFGLLPKSYVFKGTKEVTKDQILEQMCFFAGKTKPTTGVIAGSRDGLSAESISRFLLPASECEFVLNSIIEELQKDPWPVSADQRASRCTGTALSVAASLLGVCVPGSGARIMAFIGGPSTEGPGSIVSKSLSEPIRSHKDLDKGSAPLYTKAVKFYEEISKQLVHQGHVLDFFACALDQNLGALSAMCTMPV

SEQ ID NO: 8943 - protein, 427 aa, Triticum aestivum
MAQAVVPAMQCQVGVRGRSAVPARQPAGRVWGVRRTARATSGFKVLALGPETTGVIQRMQQLLDMDTTPFTDKIIAEYIWVGGSGIDLRSKSRTISKPVEDPSELPKWNYDGSSTGQAPGEDSEVILYPQAIFKDPFRGGNNILVICDTYTPQGEPIPTNKRHMAAQIFSDPKVTAQVPWFGIEQEYTLMQRDVNWPLGWPVGGYPGPQGPYYCAVGSDKSFGRDISDAHYKACLYAGIEISGTNGEVMPGQWEYQVGPSVGIDAGDHIWASRYILERITEQAGVVLTLDPKPIQGDWNGAGCHTNYSTLSMREDGGFDVIKKAILNLSLRHDLHIAAYGEGNERRLTGLHETASISDFSWGVANRGCSIRVGRETEAKGKGYLEDRRPASNMDPYTVTALLAETTILWEPTLEAEALAAKKLALKV

SEQ ID NO: 8944 - protein, 203 aa, Echinacea pallida
DARRDDLNAAIFNLKEIEGYDDYERSLLISQMSFEKTFGMSSVFIVSTLMENGGLAESANPATMINEAIHVICCGYEEKTAWGKEIGWIYGSVTEDILTGFKMHCRGWRSIYCMPVRPAFKGSAPINLSDRLHQVLRWALGSVEIFLSRHCPLWYGWGGGRLKLLQRFAYINTIVYPFTSLPLVAYCTLPPICLLTGKFIIPT

SEQ ID NO: 8945 - protein, 278 aa, Oryza sativa
  misc_feature (218)..(218): Xaa can be any naturally occurring amino acid
  misc_feature (249)..(249): Xaa can be any naturally occurring amino acid
MADGGEKCRDAAGEGGGGGDLYAVLGLKKECSDADLKLAYRKLAMRWHPDKCSSSSSAKHMEEAKEKFQEIQGAYSVLSDSNKRFLYDVGVYDDDNNDDDNLQGMGDFIGEMAQMMSQARPTRQESFEELQQLFVDMFQADLDSGFCNGPSKCYHTQAQSQTRTSSTSPSTSPSPPPPVATEAESPSCNGINKRGSSAMDSGKPPRASEVSAGQSQSXGFCFGQKSDAKQAAKTRSGNTASPRRNGRKXQKGSSKHHLSSEDEMPGSQWPGVGLTFCS

SEQ ID NO: 8946 - protein, 181 aa, Brassica napus
  misc_feature (129)..(129): Xaa can be any naturally occurring amino acid
  misc_feature (151)..(151): Xaa can be any naturally occurring amino acid
MAANRSKSEKKDAEKQLRRDPYEVLGVLKNSTDQEIKSAYRKLALKYHPDKTANDPVAADMFKEVTFSYNILSDPEKRRQHDTAGFEAVEAEGQELELDLSSLGAVNTVFAALFSKLGVPIKTSVSATXILEEALNGRVSVDPLLLGQAVXKKVEKQCAHFYAVTVTEEEVCSGLVCRVII

SEQ ID NO: 8947 - protein, 395 aa, Prosthecochloris aestuarii DSM 271
MKRDYYEVLGVGRSATKDEIKKAYRKLAMKYHPDKNPDNSEAEEKFKEANEAYEVLSNDDKRRRYDQFGHAGVGSSASSQGGPFGGGGTGDLGDIFSAFNDMFGGGARGGGSPFGFEDVFSGGGGRRSRSAGVSGSDLKIRLKLSLEEIAKGVEKTLKIKKQVACDVCNGTGSKTGELETCPTCQGTGEVRQASKTMFGQFVNIAACPTCGGEGRVVKERCTACHGEGIKQGETTVKVNIPAGVEDGNYLTLRGQGNAGPRGGMNGDLIVVIEEVEHKIFARRGDDVVYNLTLSYADMVLGTKVDIPTLEGRVKMTVPPATQPNTVLRISAKGIGHLKAPGRGDHLVRVNVFVPKDPSHQDKELLKELNKSVHMVPDEKKEHEKGFYEKVKDIFS

SEQ ID NO: 8948 - protein, 375 aa, Azoarcus sp. BH72
MSKRDYYEVLGVNRDAGDDEIKKAYRKLAMKYHPDRNPDSKEAEEKFKEAKEAYEVLSDAQKKGAYDRYGHAGVDPSMGGGGGGQGFEGFADAFGDIFGDLFGGRGGGGGRSNVYRGADLRYNLEISLEEAARGAEKTIRIPTVEECGTCHGSGAKPGTQPKTCPTCGGAGQVRIQQGFFSIQQTCPKCHGTGRIIPDPCGDCGGAGRVKKQKTLEVKIPAGIDEGMRLRHSGHGEPGVNGGPPGDLYVEIHIRQHPVFERDHDDLHCEMPISFATAALGGEIEIPTLEGMARIKIPAETQSGKVFRLRGKGIKNVRSHTHGDLMCHVVVETPVNLTERQKELLREFEEVSKGDAERHNPKAKSWMDKVRDFFAT

SEQ ID NO: 8949 - protein, 1122 aa, Glycine max
MSTSRPSQSSSNSRRSRHSARMAQATVDAKIHATFEESGSSFDYSSSVRVSGTADGVNQPRSDKVTTAYLNHMQRGKIIQPFGCLLAIDEKTCKVIAYSENAPEMLTMVSHAVPSVGDHPALGIGTDIKTLFTAPSASALQKALGFAEVLLLNPVLIHCKTSGKPFYAIIHRVTGSMIIDFEPVKPYEVPMTAAGALQSYKLAAKAITRLQSLPSGSMERLCDTMVQEVFELTGYDRVMAYKFHEDDHGEVIAEITKPGLEPYLGLHYPATDIPQASRFLFMKNKVRMIVDCHAKHVRVLQDEKLPFDLTLCGSTLRAPHSCHAQYMANMDSIASLVMAVVVNDNEEDGDTDAIQPQKRKRLWGLVVCHNTTPRFVPFPLRYACEFLAQVFAIHVNKEIELEYQIIEKNILRTQTLLCDLVMRDAPLGIVSESPNIMDLVKCDGAALIYKNKVWRLGVTPSESQIREIAFWLSEYHMDSTGFSTDSLSDAGFPSAPSLGDVVCGMAAVRVTAKDVVFWFRSHTAAEIRWGGAKHEAGEKDDGRRMHPRSSFKVFLDVVKARSLPWKEYEIDAMHSLQLILRNAFKDTESMDLNTKAINTRLSDLKIEGMQELEAVTSEIVRLIETATVPILAVDVDGLVNGWNIKIAELTGLPVGEAMGKHLLTLVEDSSTDRVKKMLNLALLGEEEKNVQFEIKTHGSKMDSGPISLVVNACASRDLRDNVVGVCFVAHDITAQKNVMDKFTRIEGDYKAIVQNRNPLIPPIFGTDEFGWCCEWNPAMTKLTGWKREEVMDKMLLGELFGTHMAACRLKNQEAFVNLGVVLNKAMTGLETEKVPFGFFARNGKYVECLLSVSKKLDVEGLVTGVFCFLQLASPELQQALHIQRLSEQTALKRLNALSYMKRQIRNPLCGIIFSRKMLEGTALGTEQKQLLRTSAQCQQQLSKILDDSDLDSIIDGYLDLEMAEFTLHEVLVTSLSQVMTKSNGKSIRIVNDVAEQIVMETLYGDSLRLQQVLADFLLISINFTPNGGQVVVAGTLTKEQLGKSVHLVKLELSITHGGSGVPEALLNQMFGNNGLESEEGISLLISRKLLKLMNGDVRYLREAGKSAFILSAELAAAHNLKG

SEQ ID NO: 8950 - protein, 462 aa, Oryza sativa Japonica Group; identical to SEQ ID NO: 5359

SEQ ID NO: 8951 - protein, 307 aa, Triticum aestivum
  misc_feature (104)..(104): Xaa can be any naturally occurring amino acid
  misc_feature (173)..(173): Xaa can be any naturally occurring amino acid
  misc_feature (212)..(212): Xaa can be any naturally occurring amino acid
  misc_feature (219)..(219): Xaa can be any naturally occurring amino acid
  misc_feature (228)..(228): Xaa can be any naturally occurring amino acid
MASKLFPAMLLLTAVTMAGLAAGARAGGIAIYWGQNGNEGTLAQACATGNYKFVNVAFLFTFGRGQKPLLNLAGHCDPATSGSCTFVGADVKSCQSRGIKVLLXIGGGVGSYGLSSAADAKQVADYLWDNYLGGTSASRPLGDAVLDGVDFDIESGGSAHWDDLARELKKYSXKGSAYKPVYLAAAPQCPFPDAMLGGLGGALGTGLFDYVXVQFYNNXPPCQYTKAXGAGNLASAWQRWASIPARQVFLGLPAAPAAAGSGFVEPSDLVSEVLPVVQKSPKYGGIMLWSRFFDGQTGFSDKVKSSV

SEQ ID NO: 8952 - protein, 384 aa, Clostridium difficile 630
MSTKRDYYEVLGISKGAEAQEIKKAYRKLAMKYHPDRNPGDKEAEEKFKEINEAYEVLSDDTKRKTYDQFGHDGLNGQGGFGGQGGFGGQGFGGFEDMFGDIFGDMFGGSFGGGRARRRGPQRGADIRQSVTISFEEAAFGKKMSIKVNRSEECEECNGTGAKPGTSKKTCSTCNGTGQVRTVQRTPFGNIASSRPCSACNGTGEVIESPCSKCHGTGNTRKVKTIEVDIPAGIDDGQMIKLSGQGEVGEKGAPRGDLYIVVNVKSHPLFTRDGNDIYFEMPITFVQATLGDEIEVPTLDGKVKYSVPEGTQTGTVFRLKEKGIPRIRGNSRGDQYVKVVVEIPKKLNDKQKELLREFAKECGSNVHEKKKTFGQKIEDMFKKK

SEQ ID NO: 8953 - protein, 1100 aa, Glycine max
MSKAIAQYTEDARLHAVFERSGESGRSFNYSESIRIASESVPEQQITAYLVKIQRGGFIQPFGSMIAVDEPSFRILGYSDNARDMLGITPQSVPSLDDKNDAAFALGTDVRALFTHSSALLLEKAFSAREISLMNPIWIHSRTSGKPFYGILHRIDVGIVIDLEPARTEDPALSIAGAVQSQKLAVRAISQLQSLPGGDVKLLCDTVVESVRELTGYDRVMVYKFHEDEHGEVVSESKRPDLEPYIGLHYPATDIPQASRFLFKQNRVRMIVDCHASAVRVVQDEALVQPLCLVGSTLRAPHGCHAQYMANMGSIASLVMAVIINGNDEEGVGGRSSMRLWGLVVCHHTSARCIPFPLRYACEFLMQAFGLQLNMELQLAAQSLEKRVLRTQTLLCDMLLRDSPTGIVTQSPSIMDLVKCDGAALYFQGNYYPLGVTPTEAQIRDIIEWLLAFHGDSTGLSTDSLGDAGYPGAASLGDAVCGMAVAYITEKDFLFWFRSHTAKEIKWGGAKHHPEDKDDGQRMHPRSSFKAFLEVVKSRSLPWENAEMDAIHSLQLILRDSFKDAEHRNSKAVVDPHVSEQELQGVDELSSVAREMVRLIETATAPIFAVDVDGHVNGWNAKVSELTGLPVEEAMGKSLVHDLVFKESEETMNKLLSRALKGEEDKNVEIKMRTFGPEHQNKAVFLVVNACSSKDFTNNVVGVCFVGQDVTGQKIVMDKFINIQGDYKAIVHSPNPLIPPIFASDDNTCCLEWNTAMEKLTGWGRVDVIGKMLVGEVFGSCCQLKGSDSITKFMIVLHNALGGQDTDKFPFSFLDRHGKYVQTFLTANKRVNMEGRIIGAFCFLQIMSPELQQALKAQRQQEKNSFGRMKELAYICQGVKNPLSGIRFTNSLLEATSLTNEQKQFLETSVACEKQMLKIIRDVDLESIEDGSLELEKGEFLLGNVINAVVSQVMLLLRERNLQLIRDIPEEIKTLAVYGDQLRIQQVLSDFLLNIVRYAPSPDGWVEIHVRPRIKQISDGLTLLHAEFRMVCPGEGLPPELIQDMFNNSRWGTQEGLGLSMSRKILKLMNGEVQYIREAERCYFYVLLELPVTRRSSKKC

SEQ ID NO: 8954 - protein, 1036 aa, Glycine max
MIAVDEPSFRILAYSDNARDMLGITPQSVPSLDDKNDAAFALGTDIRTLFTHSSAVLLEKAFSAREISLMNPIWIHSRTSGKPFYGILHRIDVGIVIDLEPARTEDPALSIAGAVQSQKLAVHAISQLQSLPGGDVKLLCDTVVESVRELTGYDRVMVYRFHEDEHGEVVAETKRPDLEPYIGLHYPATDIPQASRFLFKQNRVRMIVDCHASAVRVVQDEALVQPLCLVGSTLRAPHGCHAQYMANMGSTASLVMAVIINGNDEEGVGGRTSMRLWGLVICHHTSARCIPFPLRYACEFLMQAFGLQLNMELQLAAQSLEKRVLRTQTLLCDMLLRDSPTGIVTQSPSIMDLVKCDGAALYYQGNYYPLGVTPTEAQIRDIIEWLLAFHRDSTGLSTDSLADAGYPGAASLGDAVCGMAVAYITEKDFLFWFRSHTAKEIKWGGAKHHPEDKDDGQRMHPRSSFKAFLEVVKSRSLPWENAEMDAIHSLQLILRDSFKDAEHSNSKAVLDPRMSELELQGVDELSSVAREMVRLIETATAPIFAVDVDGRINGWNAKVSELTGLPVEEAMGKSLVRDLVFKESEETVDKLLSRALKGEEDKNVEIKMRTFGPEHQNKAVFVVVNACSSKDYTNNVVGVCFVGQDVTGQKIVMDKFINIQGDYKAIVHNPNPLIPPIFASDDNTCCLEWNTAMEKLTGWSRADVIGKMLVGEVFGSCCQLKGSDSITKFMIVLHNALGGHDTDRFPFSFLDRYGKHGQAFLTANKRVNMDGQIIGAFCFLQIVSPELQQALKAQRQQEKNSFARMKELAYICQGVKNPLSGIRFTNSLLEATCLSNEQKQFLETSAACEKQMLKIIHDVDIESIEDGSLELEKGEFLLGNVINAVVSQVMLLLRERNLQLIRDIPEEIKTLAVYGDQLRIQQVLSDFLLNIVRYAPSPDGWVEIHVHPRIKQISDGLTLLHAEFRMVCPGEGLPPELIQNMFNNSGWGTQEGLGLSMSRKILKLMNGEVQYIREAQRCYFYVLLELPVTRRSSKKC

SEQ ID NO: 8955 - protein, 1100 aa, Glycine max
MSKAIAQYTEDARLHAVFEQSGESGRSFNYSESIRIASESVPEQQITAYLVKIQRGGFIQPFGSMIAVDEPSFRILGYSDNARDMLGITPQSVPSLDDKNDAAFALGTDVRALFTHSSALLLEKAFSAREISLMNPIWIHSRTSGKPFYGILHRIDVGIVIDLEPARTEDPALSIAGAVQSQKLAVRAISQLQSLPGGDVKLLCDTVVESVRELTGYDRVMVYKFHEDEHGEVVSESKRPDLEPYIGLHYPATDIPQASRFLFKQNRVRMIVDCHASAVRVVQDEALVQPLCLVGSTLRAPHGCHAQYMANMGSIASLVMAVIINGNDEEGVGGRSSMRLWGLVVCHHTSARCIPFPLRYACEFLMQAFGLQLNMELQLAAQSLEKRVLRTQTLLCDMLLRDSPTGIVTQSPSIMDLVKCDGAALYFQGNYYPLGVTPTEAQIRDIIEWLLAFHGDSTGLSTDSLGDAGYPGAASLGDAVCGMAVAYITEKDFLFWFRSHTAKEIKWGGAKHHPEDKDDGQRMHPRSSFKAFLEVVKSRSLPWENAEMDAIHSLQLILRDSFKDAEHRNSKAVADPRVSEQELQGVDELSSVAREMVRLIETATAPIFAVDVDGHVNGWNAKVSELTGLPVEEAMGKSLVHDLVFKESEETMNKLLSRALKGEEDKNVEIKMRTFGPERQNKAVFLVVNACSSKDFTNNVVGVCFVGQDVTGQKIVMDKFINIQGDYKAIVHSPNPLIPPIFASDDNTCCLEWNTAMEKLTGWGRVDVIGKMLVGEVFGSCCQLKGSDSITKFMIVLHNALGGQDTDKFPFSFLDRHGKYVQTFLTANKRVNMEGQIIGAFCFLQIMSPELQQALKAQRQQEKNSFGRMKELAYICQGVKNPLSGIRFTNSLLEATSLTNEQKQFLETSVACEKQMLKIIRDVDLESIEDGSLELEKGEFLLGNVINAVVSQVMLLLRERNLQLIRDIPEEIKTLAVYGDQLRIQQVLSDFLLNIVRYAPSPDGWVEIHVRPRIKQISDGLTLLHAEFRMVCPGEGLPPELIQDMFNNSRWGTQEGLGLSMSRKILKLMNGEVQYIREAERCYFYVLLELPVTRRSSKKC

SEQ ID NO: 8956 - protein, 170 aa, Glycine max
MESHDETGCQAPERPIPCINNCGFFGRAATMNMCSKCYKDMLLKQEQDNFAASSVENIVNGSSNGNGAVTTGAVDVQVEAVEVKTVSAQSSVDSSSGESLEMKAKNSPSRCATCRKRVGLTGFSCKCGNLFCAMHRYSDKHECPFDYRTVGQDAIAKANPIVKADKLDKI

SEQ ID NO: 8957 - protein, 382 aa, Macadamia jansenii
PYEVPMTAAGALQSYKLAAKAIARLQSLPSGSMDRLCDAVVQEVYELTGYDRVMAYKFHEDDHGEVVSEITKPGLEPYLGLHYPATDIPQAARFLFMKCKVRMICDCRAKHVKVLQDEKLTFDLTLCGSTLRAPHSCHLQYMENMSSIASLVMAVVINEGNEESENSGSLQPQKRKRLWGLVVCHNTTPRFVPFPLRYACEFLIQVFAIHVNKEIELENQILEKNILRTQTLLCDMLMRDAPLGIVSQSPNIMDLVKCDGAALLYKNKIWLLGLTPTESQIHEIATWLSNSHMDSTGLSTDSLYDAGFPGFLSLADVVCGMAAVRINSNDMLFWFRSPTAAEVQWGGAKHDPNDKDDARRMHPRSSFKAFLEVVKTRSLPWK

SEQ ID NO: 8958 - protein, 867 aa, Glycine max
MIAVDEPSFRILAYSDNARDMLGITPQSVPSLDDKNDAAFALGTDIRTLFTHSSAVLLEKAFSAREISLMNPIWIHSRTSGKPFYGILHRIDVGIVIDLEPARTEDPALSIAGAVQSQKLAVRAISQLQSLPGGDVKLLCDTVVESVRELTGYDRVMVYRFHEDEHGEVVAETKRPDLEPYIGLHYPATDIPQASRFLFKQNRVRMIVDCHASAVRVVQDEALVQPLCLVGSTLRAPHGCHAQYMANMGSTASLVMAVIINGNDEEGVGGRTSMRLWGLVICHHTSARCIPFPLRYACEFLMQAFGLQLNMELQLAAQSLEKRVLRTQTLLCDMLLRDSPTGIVTQSPSIMDLVKCDGAALYYQGNYYPLGVTPTEAQIRDIIEWLLAFHRDSTGLSTDSLADAGYPGAASLGDAVCGMAVAYITEKDFLFWFRSHTAKEIKWGGAKHHPEDKDDGQRMHPRSSFKAFLEVVKSRSLPWESAEMDAIHSLQLILRDSFKDAEHSNSKAVLDPRMSELELQGVDELSSVAREMVRLIETATAPIFAVDVDGRINGWNAKVSELTGLPVEEAMGKSLVRDLVFKESEETVDKLLSRALKGEEDKNVEIKMRTFGPEHQNKAVFVVVNACSSKDYTNNVVGVCFVGQDVTGQKIVMDKFINIQGDYKAIVHNPNPLIPPIFASDDNTCCLEWNTAMEKLTGWSRADVIGKMLVGEVFGSCCQLKGSDSITKFMIVLHNALGGHDTDRFPFSFLDRYGKHVQAFLTANKRVNMDGQIIGAFCFLQIVSPELQQALKAQRQQEKNSFARMKELAYICQGVKNPLSGIRFTNSLLEATCLSNEQKQFLETSAACEKQMLKIIHDVDIESIEDG

SEQ ID NO: 8959 - protein, 352 aa, Physcomitrella patens subsp. patens
MGVDYYSVLKVPKTATEDDLKKAYRKLAMKWHPDKNPNNKKEAEAKFKQISEAYEVLSDPQKRIIYDQEGEEGLKGHAAHPGSSHGYSNGAGGGPNAFRFNPRNAEDIFAEFFGGASPFGGMGGVGGRGGRGHFGDGMFGGFGGGESVFRSSDGSQGFRAFGEGPSHTQPRKAAPVENKLLCSLEELYKGSTRKMKISRSIADASGKTMPVEEILTIEVKPGWKKGTKITFPEKGNEQPGMLAADLVFVIDEKPHDTFKRDGNDLIVTKKISLVEALSGCSFTLGSLDGRSLTVSIPDVIHPGYEKVLAKEGMPVAKEPGRRGNLRIKFDIDFPTRLSAEQKAGLKRLLGGV

SEQ ID NO: 8960 - protein, 388 aa, Brabejum stellatifolium
PYEVPMTAAGALQSYKLAAKAIARLQSLPSGIMDRLCDTVVQEVFELTGYDRVMAYKFHEDDHGEVVSEITKPGLEPYLGLHYPATDIPQAARFLFMKCKVRMICDCCAKHVKVLQDEKLTFDLTLCGSTLRAPHSCHLRYMENMSSIASLVMAVVINEGNQESENSGSLQPQKRKRLWGLVVCHNTTPRFVPFPLRYACEFLIQVFAMHVSKEIELENQILEKNILRTQTLLCDMLMRDAPLGIVSQSPNIMDLVKCDGAALLYKNKIWLLGLTPTESQIHEIATWLSNSHMDSTGLSTDSLYDAGFPGSLSLADVVCGMAAVRINSNDMLFWFRSPTAAEVQWGGAKHDPNDKDDSRRMHPRSSFKAFLEVVKTRSLPWKDYEMDA

SEQ ID NO: 8961 - protein, 583 aa, Podospora anserina; identical to SEQ ID NO: 5372

SEQ ID NO: 8962 - protein, 337 aa, Trichodesmium erythraeum IMS101
MAKTDFKDYYSILGLTKSASAEEIKKAYRKLARKYHPDMKPGDRKAEARFKEVNEAYEVLSDSEKRQKYDQFGQYWKQVGSSGSGWPGGNSGRNVDFSEFDFSQYASFEDFINALLGRGGNPGSSNSGRRKNNSYKTNTSWPDGFNNGYYNPSSFNNPNWATSLNLEAEITLTFAEAFRGTQKRIGSGEVSIPPGVKSGSKIRVKGKGKLDQYTQQKGDLYLKVEIQSHSFYQFEGDNLLCEVPITPDEAVLGTSIKVPTPDGMVNVNIPAGIRSGQSLRLRGKGWPKPKSEERTDQLVRIIITAPKNISSLERECYEKITANRTFDPRSHLKNVSL

SEQ ID NO: 8963 - protein, 399 aa, Desulfotalea psychrophila LSv54
MSHRFAYNRMELAGSLGDLGTLLPITIAMILVVGLHPTGIFISIGLFYILSGSYFGITVPVQPMKVVGAYAIATGMQPSQLVASTLLMGVLLLIIGATGAIETIRRQTDTSVIRGIQLSTGVMLMTGGVKFIMGTSNLQIMQNAVEPSLILQAIGPIPISIILGILASLITFLLLDSRRFPAALMVILAGFTTGITLGRGIDIGVGNLGFHLPQILPFGIPALPDFTFALFILVLPQLPMTLGNAVLAYTDLSHKYFGEKAARVSNRKVCISMGLANVLSFFVGGMPLCHGAGGLAAHYRFGARTAGSNIFIGLFFLLVAIIFGDKSVQLLNLLPLSILGALLLFAGVQLALTIMDLKRREDYFVATIMLGITLASNLAAGFIAGIIIAKCLKWERFSI

SEQ ID NO: 8964 - protein, 292 aa, Cucumis melo
MAAHKITTTLSIFFLLSSIFRSSEAAGIAIYWGQNGNEGSLASTCATGNYEFVNIAFLSSFGSGQTPVLNLAGHCNPDNNGCAFLSDEINSCQSQNVKVLLSIGGGAGSYSLSSADDARQVANFLWNSYLGGQSDSRPLGAAVLNGIDFDIESGSGQFWDVLAQELKSFGQVILSAAPQCPIPDAHLDAAVKTGLFDSVWVQFYNNPPCMFADNADNLLSSWNQWTAFPISKLYMGLPAAPEAAPSGGFIPADVLISQVLPTIKTSSNYGGVMLWSKAFDNGYSDAIKGSIG

SEQ ID NO: 8965 - protein, 379 aa, Campylobacter jejuni
MEISYYEILEITQNADKETIKKAYRKMALKYHPDRNQGDKEAEDKFKLVNEAYEVLTNDEKRAIYDRYGKDALKGGGFGSSSSGFAGFEDLGDIFSSFFGEGFGSSRRRKSSNDEKIPSDFIVNLKLSFKEAVFGCKKNIDFTYKCSCKTCNGTGAKDGKLQTCPKCQGRGQVGVSQGFITFAQTCPDCQGIGEKASEKCSDCKGLGYNETKDSVELNIPEGVDTGMKLRVNAKGNILKNGTRGDMYVKIIAAEDDTFIRDDDDIYIEFPVFFTQAILGESIKVPTIRGEATLNLPKGAKDGQRFVLEKEGVKDVHSSRIGNQIVQISIKFPTFLNDEQKELLEKLSEVLVSKMVCIKTKKDFLKKSLIGLSLNFPKAF

SEQ ID NO: 8966 - protein, 66 aa, Protea amplexicaulis
MPGQWEYQVGPSVGIEAGDHIWCSRYLLERITEQAGVVLTLDPKPIEGDWNGAGCHTNYSTKSMRE

SEQ ID NO: 8967 - protein, 133 aa, Nicotiana benthamiana
LIYVSREKRPGFQHHKKAGAMSALVRVSAVLTNGPFMLNLDCDHYINNSKALREAMCFLTDPNLGKYVCYVQFPQRFDGIDRNDRYANRNTVFFDINLRGLDGIQGPVYVGTGCVFNRTALYGYEPPIKPKHK

SEQ ID NO: 8968 - protein, 388 aa, Nelumbo lutea
PYEVPMTAAGALQSYKLAAKAIARLQALPSGCMDRLCDTVVQEVFELTGYDRVMAYKFHEDDHGEVVSEITKPGLEPYLGLHYPATDIPQAARFLFMKNKVRMICDCRAKHVKVLQDEKLPFDLTLCGSTLRAPHSCHLQYMENMDSIASLVMAVVVNEGDEEGEASGSSQQQKRKKLWGLVVCHNTTPRFVPFPLRYACEFLIQVFAIHVNKEIELENQILEKNILRTQTLLCDMLMRDALLGIISQSPNVMDLVKCDGAALLYKNKIWQLGTTPTEFQIHDIASWLSEYHMDSTGLSTDSFYDAGFPGALSLGDAVCGMAAVRITSKDMLFWFRSHTAAEVRWGGAKHDPDEKDDGRRMHPRSSFKAFLEVVKTRSLPWKDYEMDA

SEQ ID NO: 8969 - protein, 432 aa, Cucumis melo
  misc_feature (205)..(205): Xaa can be any naturally occurring amino acid
  misc_feature (215)..(215): Xaa can be any naturally occurring amino acid
MAQILAPSTQWQLRTKLTSMSSSPITPKMWSSILLKQNKKGAVKSSSKYRVLSVKSVGGTINRMEDLLNLDVTPYTDKIIAEYIWIGGSGIDLRSKSRTISKPVEHPSELPKWNYDGSSTGQAPGEDSEVILYPQAIFKDPFRGGNNILVICDAYTPAGVPIPTNKRHRAAEIFSNKKVVDEIPWYGIEQEYTLLQTNVKWPLGXPVGAYPGPQXPYYCGVGADKSFGRDISDAHYKACLYAGINISGTNGEVMPGQWEYQVGPSVGIEAGDHIWCSRYILERITEQAGVVLSLDPKPIEGDWNGAGCHTNYSTKSMREEGGFEVIKKAILNLSLRHKDHISAYGEGNERRLTGKHETASINTFSWGVANRGCSIRVGRDTEKQGKGYLEDRRPASNMDPYVVTSLLAETTILWEPTLEAEALAAQKLSLKV

SEQ ID NO: 8970 - protein, 1129 aa, Avena sativa
MSSSRPASSSSSRNRQSSQARVLAQTTLDAELNAEYEESGDSFDYSKLVEAQRDGPPVQQGRSEKVIAYLQHIQKGKLIQTFGCLLALDEKSFNVIAFSENAPEMLTTVSHAVPSVDDPPRLGIGTNVRSLFSDQGATALHKALGFADVSLLNPILVQCKTSGKPFYAIVHRATGCLVVDFEPVKPTEFPATAAGALQSYKLAAKAISKIQSLPGGSMEVLCNTVVKEVFDLTGYDRVMAYKFHEDDHGEVFSEITKPGLEPYLGLHYPATDIPQAARFLFMKNKVRMICDCRARSIKVIEAEALPFDISLCGSALRAPHSCHLQYMENMNSIASLVMAVVVNENEEDDEAESEQPAQQQKKKKLWGLLVCHHESPRYVPFPLRYACEFLAQVFAVHVNREFELEKQLREKNILKMQTMLSDMLFREASPLTIVSGTPNIMDLVKCDGAALLYGGKVWRLRNAPTESQIHDIAFWLSDVHRDSTGLSTDSLHDAGYPGAAALGDMICGMAVAKINSKDILFWFRSHTAAEIRWGGAKNDPSDMDDSRRMHPRLSFKAFLEVVKMKSLPWSDYEMDAIHSLQLILRGTLNDASKPKREASLDNQIGDLKLDGLAELQAVTSEMVRLMETATVPILAVDGNGLVNGWNQKAAELTGLRVDDAIGRHILTLVEDSSVPVVQRMLYLALQGKEEKEVRFEVKTHGPKRDDGPVILVVNACASRDLHDHVVGVCFVAQDMTVHKLVMDKFTRVEGDYKAIIHNPNPLIPPIFGADEFGWCSEWNAAMTKLTGWNRDEVLDKMLLGEVFDSSNASCPLKNRDAFVSLCVLINSALAGEETEKAPFGFFDRSGKYIECLLSANRKENEGGLITGVFCFIHVASHELQHALQVQQASEQTSLKRLKAFSYMRHAINNPLSGMLYSRKALKNTDLNEEQMKQIHVGDNCHHQINKILADLDQDSITEKSSCLDLEMAEFLLQDVVVAAVSQVLITCQGKGIRISCNLPERFMKQSVYGDGVRLQQILSDFLFISVKFSPVGGSVEISSKLTKNSIGENLHLIDLELRIKHQGLGVPAELMAQMFEEDNKEQSEEGLSLLVSRNLLRLMNGDVRHLREAGVSTFIITAELASAPTAMGQ

SEQ ID NO: 8971 - protein, 470 aa, Arabidopsis thaliana; identical to SEQ ID NO: 7372

SEQ ID NO: 8972 - protein, 354 aa, Triticum aestivum
  misc_feature (108)..(108): Xaa can be any naturally occurring amino acid
MALVCSRPASLLLIAALLSAATFLAVPAAATGKTGQVAVFWGRNKNEGSLREACDTGTYTIAIISFLDVFGRGNYHLDLSGHDVSAVGADIKHCQSKNILVFLSIGGXGNQYSLPTAQSAADVANYLWNAYMLGTRKGVYRPFGDALVDGIDFFIENGAPANYDELAKRLWNFNKDFRGRTPVQLTATLRCGYPDRHVERALATGLVGRIFVRFYDDADCAANWQRQWDKWTAAYPSAQIYLGLPASEQKVGYVHPKNLYYSVIQVAQKAANYGGVMVWERYEDKRTNYSSYAIPMGLEPPVAHIRQPCGNLVYPSCPLHTPHVLAYLTVNKYHQCENGVSVPGCTCIRSKQNS

SEQ ID NO: 8973 - protein, 921 aa, Oryza sativa
MASKGTGGGHGGVERKEQQQQRGYQLPRDSRGSLEVFNPSSASSFRTAAAAAKSASPFLAIPDREEDNVVAQQRAAEWGLVLQTDYHTGLPQGVSTRPSSCSARTSSEDTPQQQQSAAAIPRVSEELRAALSAFQQTFVVSDATRPNHPIMYASAGFFNMTGYTSKEVVGRNCRFLQGSGTDPHEIDKIRQALANGSNYCGRILNYKKDGTPFWNLLTIAPIKDEDGRLLKFIGMQVEVSKYTEGKKETVVRPNGLSESLIKYDARQKDHARSSVSELLLALKNPRSLSESSNNTLKRKSQESLSMSMSEVPSKRSSESGSRRNSRSGTRSSLQKINEVPDQVNRTRKSGLRAFMGFLGMGHGSVEKNMLKPRDEDPLIDSDDERPESFEDEFRRKEMRRGIDLATTLERIEKNFVITDPRLPDNPIIFASDSFLQLTEYNREEILGRNCRFLQGPETDRAIVRKIRDAIDNQAEVTVQLINYTKSGKKFWNLFHLQPMRDQKGDVQYFIGVQLDGTEHVQDDAAEEGVVLVKKTADNIDEAAKELPDANLRPEDLWANHSKVVLPNPHMKDTASWRAIQKVLESGESIGLKHFRPIKPLGSGDTGSVHLVELLNTGEYFAMKAMDKSIMLNRNKVHRATAERQILDLLDHPFLPTLYASFQTKTHICLITDYCPGGELFVLLDNQPLKVLHEDAVRFYVAEVVIALEYLHCQGIIYRDLKPENILLHRDGHISLTDFDLSCLTSCRPQVFLPEDADEKKGRKNRSYPIFFAEPMRASNSFVGTEEYIAPEIITGAGHTSAVDWWALGILLYEMLYGYTPFRGKTRQRTFANILHKDIRFPASILVSLAARQLMYRLLHRDPANRLGSYEGANEIKGHPFFRGINWPLIRATAPPKLEIPLFSKDDMEKKGLVTDNRTDIF

SEQ ID NO: 8974 - protein, 1086 aa, Cryptococcus neoformans var. grubii
MASNDPKAKVILQSIATEKRNIEGARAVIRAFEASSKNETVIQQAQNEIRTATMSIKFLEDELAKLQVDGSGASSGTPGRGEPSGRAGAGVPGRQGPQGIATTSPGGRGMAGDRERPLPPPPPGAEQDNAKKPETKNYSQLDLLRYDAPLTGAKITRMLNQLQFKLQVEEQYRTGIEKMAQAYRAEGDKRLKSETDAKKSESEGKIQLLRKAKKRYESLAKFGGAVEDDEDLMSDGKRKEALRKPISGKLVISLRSARDLNHRTLPRRSSKTYSETTVIIKVEGNERAVSHPSRNDKWHEDFHIPVEKANEVEITIYDTVAPGDSAPIGMLWLRVSDLVEALRRQKVGIEGQGAGWVTAATAATMGPRSSGNAPDSVTLHSAGTLRGRPDAEGKGPDGIDGWWSVEPAGAISLRMDFVKDTVAGARRPYEALGRQGAVRMRKGDVYEMNGHKFVQRQFYQPIMCALCQEFLLTGEGYQCEDCRYACHKKCYPKVVTKCISKSNADGEGDEEKINHRIPHRFTSYTNMSANWCCHCGYMLPFGRKNAVKCSECALTCHQTCSHLVPDFCGMTMEMANLLLKNLRDIKTTQHRKPVPSTSTSSSVSTLPSYHSQEARSHPVQSAAPQQPALSPHPPAGTLPSADQRPIQPQAQNQQTGAYDNLRPAGGRAMPQLPPVAVPSSKISFEGERPQEPHAQIHPVMPSAQPQPQTLPPSAQSVQPPVKPHYVPQPPVQQQVTQRLPPQQPVMTRKRKVGLDDFNFLAVLGKGNFGKVMLAEEKTSSNLYAIKVLKKEFIIENDEVESTQSEKRVFLAAAQERHPFLLGLHSCFQTETRVYFVMEYISGGDLMLHIQKKQFTLRQAKFYACEVLLALQYFHSKGIIYRDLKLDNILLTLDGHVKVADYGLCKEEMWFGKTTSTFCGTPEFMAPEILLEQRYGRAVDWWAFGVLTYEMLLGQSPFRGEDEDEIFDAILEDEPLYPITMPRDAVSLLQRLLTRDPTRRLGAGEGDAEEIKQHLFFRDVNFDDVYHKRIPPPYFPVIGNATDTSNFDQEFTREQPTLTPVHTQLSEADQKEFAGFSWIAPWAAAQA

SEQ ID NO: 8975 - protein, 1157 aa, Mycoplasma gallisepticum R
MIKSEDFMAEKRDYYEVLQIDRDAEEQEIKRAFRKLAKKYHPDTNKDDANAESIFREINEAYEVLSNPEKKERYDKYGHDGLDREDDLDFDPNIFNSFFETINAADEFDDITFDGDWLDDDKPSKKKKKKTKKGGFWAKSKEASKTIETEPEIIDVGASVNQANETRLFDDTLDDQLEESVSTQSTDDGERLFDDNKEPSFTAGLDEEVQSEPQPEEDLSWTRFIGNPDYGHYDENNEWIWEGYFDDDDNFISTRELEQKVEPEQAQPQDDRSEQEEEEEALDSKPQDDSEDDYVIPDAEIISSPTLEVTAPKEVEQPLQPEQVAHVEQKEAEEESVAQTKAEEVSQPTQTVETKPTSAVESTSTFDLKQLLKVMQEQPTEEALTTTELTNETTSPTTEVSELEQTQDKSEDQQEEKAEKIDDAFVESNLPEIVDFSTKSSASLGTANLYDLSFLIKNQPTQAVQPTSETISTTPVEPTDQLKPKEVDQIQEELKRAAEELVEDNLIDDSSMITPPSVIKTKEIEVEELPTKKNDLVEINFDDLEELKFELVQTNQEKLPEKAVENWAQDYQLDEPTQSNIDWYKQEDPKDLEQLVQDQATLEITEENQISERKVEEQPSVESTKVEDQVVQAIKEEEELLEQKKAAEFAELFGEQTPTTKEDDDYLSIEELLNNEQTQPTEFNEIIIENNLDNVSVADDQNYQLKDDNKKFINISEPTIVSSNLSFDQQLVNEIESDDLIKHQEENQEEYQTVDYDPLQQPVRPMHTSDSEMYDFSIKLLRKQVGAKMEGNDSSNKNLANKINDLSDFKSRLLKRLSETNPSSQPPASKYQEPNLIQIERLTEINVVKEVEVHQVLLFNNAIKRIKYTRHTPCNNCSATGIDLTSSQPYKLCPACRNVEGNVESCMVCNQYGKLIRIPCKNCLGKSYTNEAITLDIKLPITSQLNISVNYPGFGHIFPNNLKGDLTVVFKVIPSNFFVIKNNDIHVKALVDPILASIGGIIKVPTINKLINVRIPPGTKVGDQVIIKDMGLDARYDLETKTYYDKGSLIIQVVYADIMKSNDRSLGLEEAAKLPNVQVEHFNKLALREIKELKYNQQELQQEQQNWNFQSNDSNGFDSLNDQKAHQNLAFNRVLNTIKDIRTLDDIKKIREKANKK

SEQ ID NO: 8976 - protein, 472 aa, Zea mays
MVRAWGRRTALPPLLILGLLRLHYSSLVVAQEGQEKDPATLFAQASGMMDLRKYDGALGLLNAVLEIDPNHSEAYRQRASVLRHKCRYEEAERDYNKHLELSPGSASVVKELSQLLQAQNSLQSAYGQFDSGDFSKVVEYINKIVLVFSPGCLKAKLLKAKALLALKDYSSVISETGFILKEDEDNLDALLLRGRAYYYLADHDVASRHYQKGLRLDPEHSELKKAYFGLKNLLKKTKSAEDNAAKGKLRVSVEDYKAALAMDPDHTAYNVHLYLGLCKTLVRLGRSKEAISTCTEALIIDSELVDALTQRGEAKLLSEDWEGAVQDLKEAAQKSPQDMGIREALMRAEKQLKLSKRKDWYKILGVSKTASAAEIKRAYKKLALQWHPDKNVDNREKAENMFREIAAAYEVLGDEDKRVRYDRGEDVEEMNMGGGGGFNPFGGGGQQYTFQYDGGFPGGGFPGGGGFQFNFG

SEQ ID NO: 8977 - protein, 368 aa, Platanus occidentalis
LQSYKLAAKAIARLQSLSSGSMDRLCDTVVQEVYELTGYDRVMAYKFHEDDHGEVVSEITKPGLEPYLGLHYPATDIPQAARFLFMKNKVRMICDCRAKHVKVLQDEKLTFDLTLCGSTLRAPHSCHLQYMENMGSIASLVMAVVVNEEDEEGESSGSSQPQKRKRLWGLVVCHNTTPRFVPFPLRYACEFLIQVFAIHVNKELELESQILEKNILRTQTLLCDMLMRDAPLGIVSQTPNIMDLVKCDGAALLYKNKIWRLGLSPTEFQIRDIASWLCNYHMDSTGLSTDSLHDAGFPGALSLGVVCGMAAVRITSKDMPFWFRSHTAAEVRWGGAKHDPGEQDDGRRMHPRSSFKAFLEVVKTRSLP

SEQ ID NO: 8978 - protein, 98 aa, Securigera parviflora
MSLLSDLINLNLSETTDKIIAEYIWIGGSGLDLRSKARTLPGPVSDPSELPKWNYDGSSTGRAPGEDSEVILYPQAIFKDPFRRGSNILVICDAYTPA

SEQ ID NO: 8979 - protein, 381 aa, Vibrio cholerae O1 biovar eltor str. N16961
MSKRDFYEVLGVGRDASERDIKKAYKRLAMKYHPDRNSGDAGAAEKFKEVKEAYEILTDAQKKAAYDQYGHAAFEQGAGGFGGGGFGGGGADFGDIFGDVFGDIFGGGRRGGGPRAQRGSDLRYNMELSLEEAVRGCSKEIEVPTLVHCDACDGSGAKKGTSAQTCGTCHGHGQVQMRQGFFAVQQTCPTCHGKGKIIKDPCNVCHGQGRKQKTKTLNVKIPAGVDTGDRIRLSGEGEAGEMGAPAGDLYVQVHVKEHHIFERDGNNLYCEVPVSFAMAALGGEVEVPTLDGRVSLKVPAETQTGRMFRMRGKGVKGVRSAALGDLIVKLVVETPVNLSARQKELLKEFEESCGGEAATKHKPKAEGFFNGVKKFFDDLTS

SEQ ID NO: 8980 - protein, 276 aa, Vitis vinifera
MEFQLGISLPILSLVILTLAQGSEASGIAIYWGQNGNEGTLAETCATGNYDFVNLAFLSTFGNGRTPMINLAGHCDPYSNGCTDLSTEIKSCQARATALPKRKTLGKSRLTSGTTSWGVIRLLVQLVQRFWMESTLISKEERATTGTISPGKKVYLTAAPQCPFPDAWVGGALKTGLFDYVWVQFYNNPPCQYTSGNVGNLEDAWKQWNSDISATKIFLGLPAAPEAAGSGFIPVADLTSTVLPAIKGSAKCGGVMLWSKYYDDQTGYSSSIKSHV

SEQ ID NO: 8981 - protein, 147 aa, Cucumis sativus
DSRPLGAAVLDGVDFDIESGSGQFWDVLAQELKNFGQVILSAAPQCPIPDAHLDAAIKTGLFDSVWVQFYNNPPCMFADNADNLLSSWNQWTAFPTSKLYMGLPAAREAAPSGGFIPADVLISQVLPTIKASSNYGGVMLWSKAFDK

SEQ ID NO: 8982 - protein, 298 aa, Vitis vinifera
MALQSIISLSVLSLVMLILARGSDAGGIAIYWGQNGNEGTLAETCGTGNYDFVNIAFLSTFGNGQTPMINLAGHCDPYSNGCTSLSSDINSCQAKGIKVILSIGGGAGSYYLTSKEDAGQVATYLWNNFLGGQSSSRPLGPAVLDGIDFDIEGGTNQHWDDLTTFLSGYSKKGKKVYLTAAPQCPFPDAWVGGALKTGLFDYVWVQFYNNPPCQYTSGNVGSLEDAWKQWTSDIPATKIFLGLPAAPEAAGSGFIPVADLTSTVLPAIKGSAKYGGVMLWSKYYDDQTGYSSSIKSHV

SEQ ID NO: 8983 - protein, 298 aa, Vitis vinifera
MALQLIISLSVLSLLMLILVRGSDAGGIAIYWGQNGNEGTLAETCGTGNYDFVNIAFLSTFGNGQTPMINLAGHCDPYSNGCTGLSSDINSCQAKGIKVILSIGGGAGSYYLTSKEDAGQVATYLWNNFLGGQSSSRPLGPAVLDGIDFDIEGGTNEHWDDLATFLSGFSKKGKKVYLTAAPQCPFPDAWVGGALKTGLFDYVWVQFYNNPPCQYTSGNVGSLEDAWKQWTSDIPATKIFLGLPAAPDAAGSGFIPVGDLKSTVLPAIKDSAKYGGVMLWSKYYDDQTGYSSSIKSEV

SEQ ID NO: 8984 - protein, 412 aa, Oryza sativa
MGLLSLLLVVVSCLAAPATADWYGPLAVYWGRHKDYEGSLREACDTGRYNTVIITFYSVFGYVKGRYGLDISGHPVAAVGADIKHCQSKGVQVLLSIGGQGGGYSLPSSQSAADVADNLWNAYLGGRRAGVPRPFGDAAVDGIDFFIDQGGADHYDELARQLHGRGVALTATVRCSYPDSRLQKALATGLLGRIHVRIFGDNQCTMLPLDAWEKWAAAYPRSKVWLALVASWEQDEVGYMFQKDLYYGVLQFILNKPNYGGIAIWDRYYDKKANYSAAAAAAQQREGRWWRCPTLCSIRPSSSCGGTLTSARSGGKGRPSSSCGSTLISARSGGKGGGGALPSARSGGKGGGGGLVMTASHGNDSGGGYLHVFLLAPLLVYNATTGEAGYCVQWCYTLEIGSQGSLIPLWVA

SEQ ID NO: 8985 - protein, 290 aa, Vitis vinifera
MASPSPFSITFLSFIILLLVIGSDAGGIAIYWGQNGNEGTLAETCGTGNYDFVNIAFLSTFGNGQTPMINLAGHCDPYSNGCTSLSSDINSCQAKGIKVMLSLGGAAGSYYLASSEDARQVAAYLWDNFLGGKSSSRPLGEAVLDGIDFDIEGGTNQHWDELAQYLSGYSKKGKKCPFPDAWVGGALMTSLFDYVWVQFYNNPPCQYSSGNIDNLKDAWKQWNSDIPATKIFLGLPAAPEAAGSGFIPVDDLKSTVLPAIKGSSKYGGVMLWSKYYDDQTGYSSSIKSHV

SEQ ID NO: 8986 - protein, 66 aa, Faurea galpinii
MPGQWEYQVGPNVGIEAGDHIWCSRYLLERITEQAGVVLTLDPKPIEGDWNGAGCHTNYSTKSMRE

SEQ ID NO: 8987 - protein, 171 aa, Oryza sativa Indica Group
  misc_feature (3)..(3): Xaa can be any naturally occurring amino acid
MEXQGDWMPAARRPDPLHHNCGFFGSAATMNMCSKCHKEMIMKQEQAKLAASSIDSIVNGGDSGKEPIIAGHAEVAVAQVEVKTLVAQPAEIAGPSEGVTVNPKGREGPNRCSTCRKRVGLTGFNCRCGNLYCATHRYSDKHDCQFDYRTAARDAIAKANPVVKAEKLDKI

SEQ ID NO: 8988 - protein, 414 aa, Metarhizium anisopliae var. acridum
LRALAGVGLVGLASGVPFTDNISIKPRQAPGAQNIVYWGQNGGGTIENNDLAAYCQPNSGIDVLVLAFLYQFGNGGNIPSGTIGQSCYISTSGQGQNCEALTAAIQTCQSAGVKIILSLGGATSSYSLQTQAQAEQIGQYLWDSYGNSGNKTVQRPFGSNFVNGFDFDIEVNGGSSQYYQYMIAKLRSNFGSDEANTYYITGAPQCPIPEPNMGVIISNSVFDHLYVQFYNNNNYTVPCALGINGNAPFNYNNWTSFISNTPSANAKVFIGVPASPLASTGTPSGAQYYATPDQLAAIVGEYKGDAHFGGIMMWSAGFSDANVNNGCTYAQQAKNILVNGAACGSSGPPIPTPTTTPATTTPTTASSTFSPTASPTGGTVPQWGQCGGEGYSGPTQCVPPYKCVKQGDWWSSCR

SEQ ID NO: 8989 - protein, 104 aa, Physcomitrella patens subsp. patens
MFVQDHYKVLGVEYDATIDSIRTSYLRLALKWHPDKHNDASAATLKFQEINEAYRVLSDPFMRHEYDMRGNYGLQDYNYTDYLKRFKSLILTCNGLGIGSRLDR

SEQ ID NO: 8990 - protein, 317 aa, Metarhizium anisopliae var. acridum
MFVRNALAVTGLLAALTQAAPDEGRASGHKLTVYWGAEDDTTTLDDVCNDSSYDVVNLAFLSHFFSAGGYPKMSIGNLDGPSQAQKKAGATGLQDGSSLVKSIKNCQSKGKPVILSMGGATDYSDVQLNSDAQGQQIANTVWNLFLGGTDHKELRPFGDVKLDGVDLDNETNDGTGYLAMTKQFKANFQKDTSKKYYITAAPQCPYPDQSEPLDVCQLLDWVQVQFYNNGNCNIAQRGFAKAVKNWSKGIGSGVQLYIGALASGADGDEGYVHAATLNRAVNQVKAMNLPNFGGAMLWEAHSAVKNGNYQKKIKANL

SEQ ID NO: 8991 - protein, 572 aa, Aspergillus nidulans FGSC A4
MPTKKHPNDSTHLPTKIKNFFRINSSSSTSSHQSSNHVNSSDRDTGSSTPVKHEPKSTFRQSRFLPMIGRNRSATVASEGNPLDEAISPTATANPYFVHQGQPALQHRNDGSIPSSPPDTPELQVDGVSAAEQATTANKEELARKLRRVASAPNAQGLFTATDSDGRPQTAELGKEPLVHSGAAGSPVGLVEVSSNTDQDGNLTVPQPGSGKLPAVTQVRTSSGGFRRTYSSNSIKVRNVEVGPASFDKIKLIGKGDVGKVYLVREKKSTRLYAMKVLSKKEMIKRNKIKRALAEQEILATSNHPFIVTLYHSFQSEDYLYLCMEYCSGGEFFRALQTRPGKCISEDAARFYAAEVTAALEYLHLMGFIYRDLKPENILLHQSGHIMLSDFDLSKQSGPGGAPTMIPARSGNSNTSLPTIDTKSCIADFRTNSFVGTEEYIAPEVIKGCGHTSAVDWWTLGILIYEMLYGTTPFKGKNRNATFGNILRDEVPFPEQGGAQQISKYVITEFCRGNETVNFRNVKESASVDIGEKNPSKMKGVPLNSGLATPNGEIADPFEEFNSVTLHHDGDF

SEQ ID NO: 8992 - protein, 346 aa, Zea mays; identical to SEQ ID NO: 6927

SEQ ID NO: 8993 - protein, 634 aa, Aspergillus nidulans FGSC A4
MVHSKSFFGFSRSHSTNQHQKQKSSSSSSKTSSKSSSPSKSHSRSSSSPSLPAFAARPRNSHRRSHDPDSHPLNLPPDELRRLSAMAAAAADPRSSMDIDSNDPRLTTPSEPQPNGEQFHQSPTPPPHRSTGNTDEADSFKLAGNKFFKDGNYNRAIEEFTKAIELNPNNSIYRSNRAAANLAAHNYLDALEDAERADELDPGNNKILHRLSRTLTALGRPAEALEVLERMQPPASAADRQNAEKMLRFINQAKETLAENRGASMAVFCIDQARQLLGPGVKEPRAWTLLTAEAQLKMATGNSFGKAQDIAINMLRDNNQDPDALLIRAKAYYGLGETDQALKSLKMCIGLDPDHREAIKLLRMLQKLTRTKEEGNNAFKAKDYRKAIELYTEALSVDETNKDVNAKILQNRAQAYINLKEYDEAIKDCTEALRLDPTYIKAQKMRAKAHGGAGNWQEAVSDYKAVAEANPGEKGIREDIRRAEFELKKAQRKDYYKILGVSKDATETDLKKAYRKLAIKYHPDKNREGEAGDEKFKEIGEAYETLIDPQKRAAYDNGDDLLDPADMFGGGGFGMGGMGGMGGMGGMGGMGGTHINIDPSVLFNMMNGGGGFASAGGNPFGGGQARGFPGGFPF

SEQ ID NO: 8994 - protein, 1086 aa, Cryptococcus neoformans var. neoformans
MASNDPKAKVILQSIATEKRNIEGARAVIRAFEASSKNETVIQQAQNEIRTATMSIKFLEDELAKLQVGGSGGASGTPGRGEPSGGTGAGVPGKQGPQGVVASSPGGRGMAGDRERPLPPPPPGAEQDSAKKPETKNYSQLDLLRYDAPLTGAKITRMLNQLQFKLQVEEQYKTGIEKMAQAYRAEGDKRLKSETDAKKSESEGKIQLLRKAKKRYESLAKFGGAVEDDEDLMSDGKRKEALRKPISGKLVISLRSARDLNHRALPRRSSKTYSETTVVIKVEGNERAVSHPSRNDKWHEDFHIPVEKANEVEITIYDTVAPGDSAPIGMLWLRVSDLVEALRRQKVGIEGQGAGWVTAATAATMGPRSSGNAPDSVTLHSAGTLRGKPDAEGKGPDGIDGWWSVEPAGAISLRMDFVKDTVAGARRPYEALGRQGAVRMRKGDVYEMNGHKFVQRQFYQPIMCALCQEFLLTGEGYQCEDCRYACHKKCYPKVVTKCISKSNADGEGDEEKINHRIPHRFTPYTNMSANWCCHCGYMLPFGRKNAVKCSECALTCHQTCSHLVPDFCGMTMEMANLLLKNLRDIKTTQHRKPVPSTSTSSSVSTLPSYHSQESRSHPVQSAALQQPAPSSRPPAGALPSTDQRPIQPQVQNQQTGAYDNLRPAGGRAMPQLPPVAVPSNKISFEGDRLQEPHGQIPPVMPAAQPQPQTLPPSAQSVQSPVKPQYVPQPAVQQQVAQRLPPQQPLMARKRKVGLDDFNFLAVLGKGNFGKVMLAEEKTSSNLYAIKVLKKEFIIENDEVESTQSEKRVFLAAAQERHPFLLGLHSCFQTETRVYFVMEYISGGDLMLHIQKKQFTLRQAKFYACEVLLALQYFHSKGIIYRDLKLDNILLTLDGHVKVADYGLCKEEMWFGKTTSTFCGTPEFMAPEILLEQRYGRAVDWWAFGVLTYEMLLGQSPFRGEDEDEIFDAILEDEPLYPITMPRDAVSLLQRLLTRDPTRRLGAGEGDAEEIKQHLFFRDVNFDDVYHKRIPPPYFPVIGNATDTSNFDQEFTREQATLTPVHSQLSEADQKEFAGFSWIAPWAAAQT

SEQ ID NO: 8995 - protein, 257 aa, Capsicum annuum
MKGEYVEVRKNHSNNITPSNIYMFGKLHQTQNFNHHHHQLPSQPIVSMSAPPPPPSSSSANDGATIEVVRRPRGRPPGSKNKPKPAPNYITTTRDDHMEKSTMSPYILEIPLGVDIIDSVYRFCRKHNTGLCIINGSGTVTNVTLRQPFTNNPDSTITFHGNFNILSISATIIPQSIFSKVLNGFSISLAGPQGQVVGGPVIRPLLSAGPVYLIAASFNNSFYHKFSVEDDEGSQSAVAGDGDSGHTLESTHHEYCY

SEQ ID NO: 8996 - protein, 72 aa, Passiflora serratodigitata
GEVMPGQWEYQVGPSVGIDAGDHIWCSRYILERITEQAGVVLILDPKPIEGDWNGAGCHTNYSTKSMREDGG

SEQ ID NO: 8997 - protein, 377 aa, Buchnera sp.
MAKKDYYQILGIPKSAEEREIKKAYKKLAMKYHPDRNQGDKTAEGKFKEIKEAYEILINEEKRSAYDQYGHAAFENGQSNSTYSTFTNSADFSDIFGDVFGDIFGGNRTQRAKKGADLCYNMEITLEEAVKGIKKEIQIPTLQKCKTCYGSGTRTGTKPRSCSTCHGKGQIHIRKGFFTVQQSCSTCHGKGTIITDPCNLCHGQGRVETYKILSVKIPPGLDTNDRIRLNNEGEAGANGAQSGDLYVQITVKKHPIFEREGNNLYCEVPKNFTMAALGGEIEVPTLDGRVKLKIPYETQSGKLFRIRGRGVKSVQNRNQGDLLCRVVVETPVNLNEQQKNLLHELGNSFHGFRGEKNSPRSKRFFDGVKRFFDDLTR

SEQ ID NO: 8998 - protein, 127 aa, Glycine max
MDARGEGSSTSYYNVLGVSSDSNVDEIRRAYRKLAMQWHPDKCTRSPSLLGEAKRKFQQIQEAYSVLSDSKKRTMYDAGLYDPQEEEDEGFSDFVEEMLSHMAQVRREVMLLIELNEKLFMLLIWLR

SEQ ID NO: 8999 - protein, 385 aa, Gemmata obscuriglobus UQM 2246
MAEKRCFYEVLGVTRTATEVEITKAYRQLAKQYHPDRNVGDDEAKVRYAEVDEAYTVLNDPNRRARYDRHGHAGVQGGAAGADAGGMDLGDLLGDFLGGFFGGGGGGGRRSRGPRRGENITAVLDLDLLEAATGVSKTFTVPSEQNCRECGGSGAKTGTQPAQCRRCRGQGFEVVNTGFGIATRTRCRGCNGRGVVITDPCPGCRGVGRVEAREPVTVNIPAGVDTGVRFTYPNGGHAGEPGAPRGDLELVIRVADHKVFERDGHNLICQCPIGFSRAALGGSLEITTLTNQKVTIEVPKGSQTHSTVVRVPSHGMPWLDDPRRKGDLLVQLVVETPTKLTAEQEELFRKLAELEGATVPGPRKGIFGKLKDLVSGDVPPKDEKK

SEQ ID NO: 9000 - protein, 374 aa, Pseudomonas putida
MAKRDYYEVLGVERGANEGDLKKAYRRLAMKYHPDRNPGDKESEEQFKEANEAYEVLSDASKRAAYDQYGHAGVDPSMGGGGAGFGGANFSDIFGDVFSDFFGGGRGGSRGGAQRGSDLRYTLELNLEEAVRGTTVSIRVPTLFNCNPCDGCGANKGSTPSTCPTCGGIGQVRMQQGFFSVQQTCPRCHGQGKIITDPCGACHGEGRVEEYKTLSVKVPAGVDTGDRIRLSGEGEAGTHGGPTGDLYVVINVREHEIFQRDGKHLYCEVPISYTDAALGGELEVPTLDGRVKLKIPEGTQTGKQFRLRGKGVAPVRGGGAGDLLCRVAVETPVNLSRRQRELLEELRDSLEGDSSHSPKANGWFDGVKRFFGDL

SEQ ID NO: 9001 - protein, 210 aa, Glycine max
MANEGKKSNNFYSILGLSKECTELELKNAYRKLAKKWHPDRCSATGNLELVEEAKKKFQEIREAYSVLSDANKRLMYDVGVYDSDDDENGMGDFLDEMLTMMSHTKSNENGEESFEELQQLFEDMFQADIGLDGGPSLASSDSSTSSAYMTYSESSSSNKRNSSEMNFGKAENSSVFDASYQNFCFGVSICCIFHIFLSIYHISSMAYTY

SEQ ID NO: 9002 - protein, 260 aa, Zea mays
MDAGGEKCGDAAAEGGDLYAVLGLKKECSEAELKVAYRKLAKKWHPDKCSSSSSVKHMEEAKEKFQEIQGAYSVLSDANKRLLYDVGVYDDEDDEESMQGMGDFIGEMAQMMSQAQPTRQESFEELQQLFVDMFQSDIDSGFCNRTAKAHQFQGPAKSRTCSTSPSSSPSPPPTTAKDAEVPSCNGFNKRGSSALDSGKPPKPVEGGAGQNQAGFCFGVSDTKETPKLPGQNASRRRNGRKQKLSSKHDVSSEDETAAGS

SEQ ID NO: 9003 - protein, 391 aa, Acorus gramineus
PYEVPMTAAGALQSYKLAAKAIARLQSLPGGSMERLCDTMVREVFELTGYDRVMAYKFHEDDHGEVVAEITKQGLEPYLGLHYPATDIPQAARFLFMKNKVRMICDCRAKPVKVFQDEKLTIDLAFCGSTLRAPHSCHLQYMENMDSIASLVMAVVINDGDDDDDHVGDNNNDNSKKKRLWGLVVCHNTSPRFVPFPLRYACEFLTQVFAIHVHKELELENQMPEKNILRTQTLLCDMILRDAPLGIVSQTPNIMDLVKCDGAALLYKDKIWQLGTTPTERQIRDIAIWLTDYHMDSTGLSTDSLHDAGYPDALALGDVVCGMAAARITSKDILFWFRSPTTSEIQWGGAKHERSDQDDGRRMHPRSSFKAFLEVVKTRSLPWKDYEMDAI

SEQ ID NO: 9004 - protein, 407 aa, Acorus gramineus
ILHRIDVGLVIDLEPVNPSDVPVTAAGALKSYKLAAKAISRLQSLPSGNISLLCDVLVREVSDLTGYDRVMVYKFHEDEHGEVIAEQRKTDLEPYLGLHYPATDIPQASRFLFMKNKVRIICDCFTPPVKVVQDKKLGQPLSLCGSTLRAPHGCHAQYMANMGSIASLVMAVTINDDDDDDGNGNEQQQKGRKLWGLVVCHHTSPRFIPFPLRYACEFLIQVFSIQLNKEVELAAQMREKHILRTQTVLCDMLLRDAPVGIFTQSPNVMDLVMCDGAALYYKNQFWLLGTTPSEVQIKDLVDWLHECHNGSTGLSTDSLMEASYPGASALGNAACGMAAIKIGGTRDYMFWFRSQTAKEIKWGGAKHDPVDNDEEGQKMHPRSSFKAFLEVVKWRSLPWENAEMDAI

SEQ ID NO: 9005 - protein, 385 aa, Amborella trichopoda
PYEVPMTAAGALQSYKLAAKAISRLQSLPSGNIDRLCHTVVQEVHELTGYDRTMAYKFHEDDHGEVISEITKGGLEPYLGLHYPATDIPQAARFLFMKNGVRMICDCRARHVRVFQDEKLASDLTLCGSTLRAPHSCHLQYMENMDSIASLVMAVVVNEDEEENIADGPKRKRLWGLVVCHNTSPRFVPFPLRYACEFLMQVFAIHVNKEVELEALVREKNILRTQTMLCDMLLRDALLGIVTKNPNVMDLVKCDGATLLYENKLWRLGVTPSEVHIRDLARWLSEYHTDSTGLSTDSLVEAGYPDGVSLGDLVCGMAAVKITETDMLFWSRSHTASEIRWGGAKHDPNDKDDKRRMHPRSSFKAFLEVVKTRSFPWKDYEMDAI

SEQ ID NO: 9006 - protein, 1164 aa, Oryza sativa
  misc_feature (1125)..(1125): Xaa can be any naturally occurring amino acid
MASGSRATPTRSPSSARPAAPRHQHHHSQSSGGSTSRAGGGGGGGGGGGGGAAAAESVSKAVAQYTLDARLHAVFEQSGASGRSFDYTQSLRASPTPSSEQQIAAYLSRIQRGGHIQPFGCTLAVADDSSFRLLAYSENTADLLDLSPHHSVPSLDSSAVPPPVSLGADARLLFAPSSAVLLERAFAAREISLLNPLWIHSRVSSKPFYAILHRIDVGVVIDLEPARTEDPALSIAGAVQSQKLAVRAISRLQALPGGDVKLLCDTVVEYVRELTGYDRVMVYRFHEDEHGEVVAESRRNNLEPYIGLHYPATDIPQASRFLFRQNRVRMIADCHAAPVRVIQDPALTQPLCLVGSTLRSPHGCHAQYMANMGSIASLVMAVIISSGGDDDHNISRGSIPSAMKLWGLVVCHHTSPRCIPFPLRYACEFLMQAFGLQLNMELQLAHQLSEKHILRTQTLLCDMLLRDSPTGIVTQSPSIMDLVKCDGAALYYHGKYYPLGVTPTEVQIKDIIEWLTMCHGDSTGLSTDSLADAGYPGAAALGDAVSGMAVAYITPSDYLFWFRSHTAKEIKWGGAKHHPEDKDDGQRMHPRSSFKAFLEVVKSRSLPWENAEMDAIHSLQLILRDSFRDSAEGTSNSKAIVNGQVQLGELELRGIDELSSVAREMVRLIETATVPIFAVDTDGCINGWNAKVAELTGLSVEEAMGKSLVNDLIFKESEETVNKLLSRALRGDEDKNVEIKLKTFGPEQSKGPIFVIVNACSSRDYTKNIVGVCFVGQDVTGQKVVMDKFINIQGDYKAIVHNPNPLIPPIFASDENTCCSEWNTAMEKLTGWSRGEVVGKLLVGEVFGNCCRLKGPDALTKFMIVLHNAIGGQDCEKFPFSFFDKNGKYVQALLTANTRSRMDGEAIGAFCFLQIASPELQQAFEIQRHHEKKCYARMKELAYIYQEIKNPLNGIRFTNSLLEMTDLKDDQRQFLETSTACEKQMSKIVKDASLQSIEDGSLVLEKGEFSLGSVMNAVVSQVMIQLRERDLQLIRDIPDEIKEASAYGDQYRIQQVLCDFLLSMVRFAPAENGWVEIQVSYLSSFSIPEGNTYSHAGISCVEFGRGQVKYLVKFIFVGHICCSTXRFACPGEGLPPEIVQDMFSNSRWTTQEGDLGSSDGEPSL

SEQ ID NO: 9007 - protein, 394 aa, Amborella trichopoda
DLEPVNPADVPVTAAGALKSYKLAAKAISKLQSLPSGNIELLCDVLVREVRELTGYDRVMAYKFHEDEHGEVVAEYRRADLDPYLGLHYPATDIPQASRFLFLKNKVRMICDCTASPVKVIQDKKLDKPLSLCGSTLRAPHGCHAQYMANMGSIASLVMSVTINENDEDSSPNEPSFHKGRKLWGLVVCHHTTPRFVPFPLRYACEFLLQVFGIQLNKEVELAAQLREKHILRTQTVLCDMLLRDAPVGIVTQSPNIMDLVKCDGAALYYQKQVWLLGTTPLEAQIRDISGWLLEYHCGSTGLSTDSLMEAGYPGALALGDAVCGMAAVKITSKDFLFWFRSHTAKVIKWGGAKHDPVDRDDGRKMHPRSSFKAFLEVVKQRSLPWEDVEMDAI

SEQ ID NO: 9008 - protein, 312 aa, Vitis vinifera
MALHSFAAVVVVTLVSCLLAPPAVEASSVNISTYWGTDAREGSVEDDCNASLYSIFNIGFVDRFGYDWPPRLNIHHCNASVQGCKYLGTEIKVCQERGVKVLISIGGPGGDYNLASSDDATELANYLWNAYLGGNQSTVDRPFEDAILDGVDFFIQAGSTLYWDVLAEALRNLSNNGTQMELSATPKCKYPDEYLGAAIQTGLFDYAQVRFYDEDGCQYNGSFDGMKSAWDEWTAEANVDKIFAGVTASESDQGYVDADDLASEFLPDAEQSPKFGGLMVWYLYTDHQSGYSARIKALNPTIQTAPSGVEVE

SEQ ID NO: 9009 - protein, 640 aa, Cryphonectria parasitica
MHRTVLLTLLSPSPELKKTHLSSPLSSFGRSPSQSTITDKDAKAQPQSGPSGTAPSPTPPDNNIASSEALTQTPVEFAPKPGILVVTLHEGRGFALPEPHKNIFSSHSTSASQGGGASIAGSVRTAPNGHRPNTSGGFGNVPTNHGRVSGKYMPYALLDFDKVQVFVNSVEGNPENPLWAGSNTQYKFDVSRVTDVTVHLYIRNPTAPPSVGRANDIFLGVVQIKPRFEEKHQFVEDPKANKKDREKAATEFAEKEKALGHSGVQWVPVGYGQGELKIGIEYVENRAGKLTIDDFDLLTVVGKGSFGKVIQVRKKDTSRIYALKTIRKAHIISRSEVTHTLAERSVLAQINNPFIVPLKFTFQSPEKLYFVLAFVNGGELFHHLQKEQRFDVNRSRFYTAELLCALECLHGFNVIYRDLKPENILLDYQGHIALCDFGLCKLDMKDEDRTNTFCGTPEYLAPELLMGQGYNKTVDWWTLGVLLYEMLTGLPPFYDENTNEMYRKILGEPLHFPSHDIVPPAAKDLLTKLLNRDPAQRLGANGSAEIKAHPFFHAIDWRKLLQRKYEPTFKPNVAGAMDTDNFDPEFTREAPQDSYVGGVPLSETMQNQFQGFSYNRPIAGLADGGGSVKDPSFIGSVTGR

SEQ ID NO: 9010 - protein, 293 aa, Vitis vinifera
MAHHSLLSLALLSFFFLASISNTNAGTITVYWGQNGNEGSLADTCSSGYYGIVNIAFLVVFGNNQTPQLNLAGHCDPTSSGCTWLSDDIKACQDQGIKVLLSIGGASGSYTLISAEDAREVANYLWNNFFGGQSSSRPLGDAVLDGIDFDIEGGTTQHWDELAKALSEFSGQRKVYLSAAPQCPFPDAWLGTAIATGLFDYVWVQFYNNPPCQYSGNADNLINSWNQWTTIEAGQVFLGLPAASAAAGSGYIEPDVLVSQVLPSIKTSPKYGGVMLWSRYYDNGYSAAILSSV

SEQ ID NO: 9011 - protein, 316 aa, Oryza sativa
MALTFTRHSLVVIVGALLLQLFFLAGLAPAAAAAGPTGQVTVFWGRNKDEGSLREACDTGLYTMVVMSFLNVYGARGGEYRLDLAGHPVGCIGGDVKHCQRKGVLVSLAIGGGAYSLPTNQSALDLFEHLWNTYLGGGGGKGAVAAARPFGDAVLDGVDFFLDRATPAERYDVLATELAKRGKPPRRALHLTATTRCAFPDRGAARALATGAFERVHVRFYGGGGGGDDNCTVYWEDAWDRWTAAYPRSRIYFGLPAAPAVAEEEQDGRSGYVYPKTLYYRYVPELQKAANYGGFMIWDRYSDKQSGYSGYVKNWA

SEQ ID NO: 9012 - protein, 65 aa, Protea laevis
  misc_feature (64)..(64): Xaa can be any naturally occurring amino acid
MPGQWEYQVGPSVGIEAGDHIWCSRYLLERITEQAGVVLTLDPKPIEGDWNGAGCHTNYSTKSXR

SEQ ID NO: 9013 - protein, 330 aa, Triticum aestivum
MAGMDPGGGSPGAGSSRYFHHLLRPQQQQQPSPLSPNSHVKMEHSKMSSPDKTPVGDADAGGSGGGAGADQPSSSAMVPVDGSSGGGGSGGSGGPTRRPRGRPAGSKNKPKPPIIVTRDSPNALHSHVLEVSAGADIVDCVSEYARRRGRGVCVLSGGGAVVNVALRQPGASPPGSVVATLRGRFEILSLTGTVLPPPAPPGASGLTVFLSGGQGQVIGGSVVGTLVAAGPVVLMAASFSNAVYERLPLEGEEEEVAAAAAGAEAQDQVAQSGGPPGQQPAASQSSGVTGGDAGGMSLYNLAGGNVGNYQLPGDNFGAWGGGGGGVRPPF

SEQ ID NO: 9014 - protein, 473 aa, Zea mays
MATTAVSVDEKLDKLRAEVAKLSQISENEKAGFISLVSRYLSGEAEQIEWGKIQTPTDEVVVPYDILASPPEDLEETKKLLDKLVVLKLNGGLGTTMGCTGPKSVIEVRNGFTFLDLIVIQIESLNKKYGCSVPLLLMNSFNTHDDTQKIVEKYSNSNIEIHTFNQSQYPRIVTEDFLPLPSKGKSGKDGWYPPGHGDVFPSLNNSGKLDILLAQGKEYVFVANSDNLGAIVDIKILNHLINNQNEYCMEVTPKTLADVKGGTLISYEGRVQLLEIAQVPDEHVNEFKSIEKFKIFNTNNLWVNLKAIKRLVEAEALKMEIIPNPKEVDGVKVLQLETAAGAAIRFFDKAIGINVPRSRFLPVKATSDLLLVQSDLYTLVDGFVIRNPARANPANPSIELGPEFKKVANFLARFKSIPSIVELDNLKVSGDVWFGSGITLKGKVTITAKSGVKLEIPDGAVLENKDVNGPEDL

SEQ ID NO: 9015 - protein, 227 aa, Vitis vinifera
MNLACHCDPSSNGCTALSNDIRACQGRGIKVLLSIGGGSGSYSLTSAKDARQVANYLWNNFLGGQSSSRPLGDAVLDGIDFDIVGGTDQHWDERANALSEFRHQRKVYLSAAPQCPFPDAWMGTAIATGLFDYVWVQFYKNPPCQYSGNSSQLISAWNQWTTIQAGQVFLGLPAAPEAAASGYIPPDVLVSQVLPYIKTSPKYGGVMLWDRYNDVQSGYSSAIKGSV

SEQ ID NO: 9016 - protein, 289 aa, Vitis vinifera
MAHRSLPSLALLCLILVASISNTRAGTITVYWGQNGNEGSLADTCSSGNYGIVNIGFLIVFGNNQTPQLNLAGHCSNDCTGLSNDIRACQNQGIKVLLSLGGAGGSPFLTSAEDARQVAEYLWNNFLGGQSSSRPLGDAVLDGIDFDIEGGTNQHWDELAKALSEYKQQRTVYLSAAPQCPFPDAWMGTAIATGLFDYVWVQFYNNDCQFSGNADKLISAWNQWTTIQAGQVFLGLPAAPEAAGSGYIAPDVLVSQVLPSIKTSPKYGGVMLWSKYYDNGYSAAIKSSV

SEQ ID NO: 9017 - protein, 214 aa, Debaryomyces hansenii
MVKSTLIYRYDALPLCGSVDDNNDPSLMDQKKKCKILISRITPNSEPQATIESGQYNIHYLIDNSIIYLSICDKSYPRKLAFSYLSEISHEFWNSHGQEALSNSARPFGFSSFDNFLGKTKKIYQDQRAQSNLDKLNNDLADVKKVMTKNIEDLLYRGDSLDKMSDLSSSLRNDSIKYRKHAQKINFDALLRQYAPIVGCGLFFVFLVWYMFLR

SEQ ID NO: 9018 - protein, 289 aa, Sinorhizobium meliloti
LEAASLWGFDGSSTQQAEGRSSDCVLKPVAVYPDPVRTNGALVMCEVMMPDGKTPHPSNTRATVLDDESAWFGFEQEYFFYKNGRPLGFPEQGYPAPQGPYYTGVGYKNVGDIARQIVEEHLDICLAAGINHEGINAEVAKGQWEFQVFGKGSKKAADEVWLARYLLLRLTEKYGIDVEFHCKPLGDTDWNGSGMHANFSTAYLREVGGKDYFEALMAAFEKNLHDHINVYGPDNHLRLTGKHETAPWDKFSYGVADRGASIRVPHSFVNNGYRGYLEDRRPNSQGDPY

SEQ ID NO: 9019 - protein, 71 aa, Platylophus trifoliatus
  misc_feature (2)..(2): Xaa can be any naturally occurring amino acid
EXMPGQWEYQVGPSVGIEAGDHIWCSRYLLERITEQAGVVLTLDPKPIQGDWNGAGCHTNYSTKSMREDGG

SEQ ID NO: 9020 - protein, 1122 aa, Arabidopsis thaliana
MSGSRPTQSSEGSRRSRHSARIIAQTTVDAKLHADFEESGSSFDYSTSVRVTGPVVENQPPRSDKVTTTYLHHIQKGKLIQPFGCLLALDEKTFKVIAYSENASELLTMASHAVPSVGEHPVLGIGTDIRSLFTAPSASALQKALGFGDVSLLNPILVHCRTSAKPFYAIIHRVTGSIIIDFEPVKPYEVPMTAAGALQSYKLAAKAITRLQSLPSGSMERLCDTMVQEVFELTGYDRVMAYKFHEDDHGEVVSEVTKPGLEPYLGLHYPATDIPQAARFLFMKNKVRMIVDCNAKHARVLQDEKLSFDLTLCGSTLRAPHSCHLQYMANMDSIASLVMAVVVNEEDGEGDAPDATTQPQKRKRLWGLVVCHNTTPRFVPFPLRYACEFLAQVFAIHVNKEVELDNQMVEKNILRTQTLLCDMLMRDAPLGIVSQSPNIMDLVKCDGAALLYKDKIWKLGTTPSEFHLQEIASWLCEYHMDSTGLSTDSLHDAGFPRALSLGDSVCGMAAVRISSKDMIFWFRSHTAGEVRWGGAKHDPDDRDDARRMHPRSSFKAFLEVVKTRSLPWKDYEMDAIHSLQLILRNAFKDSETTDVNTKVIYSKLNDLKIDGIQELEAVTSEMVRLIETATVPILAVDSDGLVNGWNTKIAELTGLSVDEAIGKHFLTLVEDSSVEIVKRMLENALEGTEEQNVQFEIKTHLSRADAGPISLVVNACASRDLHENVVGVCFVAHDLTGQKTVMDKFTRIEGDYKAIIQNPNPLIPPIFGTDEFGWCTEWNPAMSKLTGLKREEVIDKMLLGEVFGTQKSCCRLKNQEAFVNLGIVLNNAVTSQDPEKVSFAFFTRGGKYVECLLCVSKKLDREGVVTGVFCFLQLASHELQQALHVQRLAERTAVKRLKALAYIKRQIRNPLSGIMFTRKMIEGTELGPEQRRILQTSALCQKQLSKILDDSDLESIIEGCLDLEMKEFTLNEVLTASTSQVMMKSNGKSVRITNETGEEVMSDTLYGDSIRLQQVLADFMLMAVNFTPSGGQLTVSASLRKDQLGRSVHLANLEIRLTHTGAGIPEFLLNQMFGTEEDVSEEGLSLMVSRKLVKLMNGDVQYLRQAGKSSFIITAELAAANK

SEQ ID NO: 9021 - protein, 288 aa, Sinorhizobium meliloti
LEQLPLWGFDGSSTQQAEGRSSDCVLKPVAVYPDPVRTNGALVMCEVMMPDGKTPHPSNTRATVLDDESAWFGFEQEYFFYKNGRPLGFPEQGYPAPQGPYYTGVGYKNVGDIARQIVEEHLDICLAAGINHEGINAEVAKGQWEFQVFGKGSKKAADEVWLARYLLLRLTEKYGIDVEFHCKPLGDTDWNGSGMHANFSTAYLREVGGKDYFEALMAAFEKNLHDHINVYGPDNHLRLTGKHETAPWDKFSYGVADRGASIRVPHSFVNNGYRGYLEDRRPNSQGDP

SEQ ID NO: 9022 - protein, 71 aa, Hooglandia ignambiensis
EVMPGQWEYQVGPSVGIEAGDHIWCSRYILERITEQAGVVLSLDPKPIEGDWNGAGCHTNYSTKSMREDGG

SEQ ID NO: 9023 - protein, 936 aa, Triticum aestivum
  misc_feature (212)..(212): Xaa can be any naturally occurring amino acid
  misc_feature (229)..(229): Xaa can be any naturally occurring amino acid
  misc_feature (244)..(244): Xaa can be any naturally occurring amino acid
  misc_feature (530)..(530): Xaa can be any naturally occurring amino acid
YNKFVQKSRLVPARNSRDIVDPRVRGGGGHDEPPQRPKQQLPRDSRGSLEVFNPSSAAAFRPAASPFRQDDDDNIDDVDRATQRAAEWGLVLQTNEHTGRPQGVSARSSGGGSARSSSDDKAVAGAGIPRVSEELRAALSAFQQTFVVSDASRPGHPIMYASAGFFNMTGYTSKEVVGRNCRFLQGSGTDPAEIAKIRQALADGSNYCGRVXLNYKKDGTAFWNLLTIXAPIKDEDGRVLKFIXGMQVEVSKYTEGNQDTGVRPNGLPESLIKYDARQKDQARSSVSELLLALKNPRSLSESSNSTFKRKSQESVGVLTGDGTGHASAESGSRRTSRTGARSSLQKISEVPEGGNKTRKSGLFSLMGLLGMGHGNVEKNMLKPRDEDPLLDSDDERPESFDDELRRKEIRRGIDLATTLERIEKNFVITDPRLPDNPIIFASDSFLQLTEYSREEILGRNCRFLQGPETDRATVRKIRDAIDNQTEVTVQLINYTKSGKKFWNLFHLQPMRDQKGDVQYFIGVQLDGTEXRDAAEKEGVMLIKKTAENIDEAAKELPDANLRPEDLWANHSKVVLPKPHMKDSASWRAVQKVREGGENIDLKHFRPVKPLGSGDTGSVHLVELLNTGEYFAMKAMDKNVMLNRNKVHRATAERQILDMLDHPFLPTLYASFQTKTHICLITDYYPGGELFLLLDRQPQKVLREDAVRFYAAEVVIALEYLHCQGIIYRDLKPENILLHRDGHISLTDFDLSCLTSCRPQVFLPEEGNKKSRRKSRSSPIFFAEPMRASNSFVGTEEYIAPEIITGAGHTSAVDWWALGILLYEMLYGYTPFRGKTRQRTFANILHKDIRFPASVSVSLPARQLIYRLLHRDPANRMGSYEGSNEIKQHPFFRGINWALVRGTAPPKMDAPLFSDDVGKGMGDAAATAAADNHTDMF

SEQ ID NO: 9024 - protein, 60 aa, Passiflora sexflora
VMPGQWEFQVGPSVGIDAGDHIWCSRYILERITEQAGVVLSLDPKPIEGDWNGAGCHTNY

SEQ ID NO: 9025 - protein, 387 aa, Clostridium perfringens SM101
MAKRDYYEVLGLQKGASDDEIKRAFRKMAMKYHPDRNPGDKEAEENFKEVNEAYDVLKDPDKKAKYDQFGHAAFDGSGGFGGGGFGGFDAGGFDFSEMGGFGDIFESFFGGGFGGGSSRRRNAPQRGADLEYRLNITFEEAVFGCEKEISITRTENCETCNGTGAKAGTSPKTCPKCNGSGQIRVQRQTPLGSFVSTTTCDQCGGTGKVIEDPCPDCKGKGTVRKNRKITVKIPAGVDTGNIIPLRGQGEQGANNGPAGDLYIRVNVAPSKIFRREGSDIYYDYKISMAKAALGAEITVPTVDGNVKYKVPAGTQPGTKFRLKGKGVPYVNGGGRGNQYVHMVVEVPKHLNKEQEEALKAFMKASGESVDDIDEKDEGFFSKFKKKK

SEQ ID NO: 9026 - protein, 108 aa, Triticum aestivum
  misc_feature (81)..(81): Xaa can be any naturally occurring amino acid
QKTRRLYLDTRTQRNLAKLNDELYEVHQIMTRNVQEVLGVGEKLDQVSQLSSRLTSDTRMYADKAKDLNRQALPYRLKNNXALIRKYAPVAIVMGIVLMLFWIKNKIW

SEQ ID NO: 9027 - protein, 273 aa, Sinorhizobium meliloti
PLWGFDGSSTQQAEGRSSDCVLKPVAVYPDPVRTNGALVMCEVMMPDGKTPHPSNTRATVLDDESAWFGFEQEYFFYKNGRPLGFPEQGYPAPQGPYYTGVGYKNVGDIARQIVEEHLDICLAAGINHEGINAEVAKGQWEFQVFGKGSKKAADEVWLARYLLLRLTEKYGIDVEFHCKPLGDTDWNGSGMHANFSTAYLREVGGKDYFEALMAAFEKNLHDHINVYGPDNHLRLTGKHETAPWDKFSYGVADRGASIRVPHSFVNNGYRGYL

SEQ ID NO: 9028 - protein, 71 aa, Passiflora sprucei
GTNGEVMPGQWEYQVGPSVGIEAGDHIWCSRYILERITEQAGVVLTLDPKPVEGDWNGAGCHTNYSTKSMR

SEQ ID NO: 9029 - protein, 286 aa, Arabidopsis thaliana; identical to SEQ ID NO: 7481

SEQ ID NO: 9030 - protein, 213 aa, Oryza sativa
MVKLTMIARVTDDLPLVEGLDDGRDLKDADFYKQQAKLLFKNLSKGQHEASRMSIETGPYLFHYIIEGRVCYLTMCDCSYPKKLAFQYLEDLKNEFERVNGNQIETAARPYAFIKFDTFIQKTKKLYLDTRTQRNLAKLNDELYEVHQIMTRNFQEVLGVEVSEMSNRLISDTRIYAEKAKDLNRQALIRKYALVAIVIGIVLMLFWVKNKIW

SEQ ID NO: 9031 - protein, 428 aa, Oryza sativa Japonica Group; identical to SEQ ID NO: 7214

SEQ ID NO: 9032 - protein, 92 aa, Zea mays
  misc_feature (18)..(18): Xaa can be any naturally occurring amino acid
  misc_feature (41)..(41): Xaa can be any naturally occurring amino acid
  misc_feature (82)..(82): Xaa can be any naturally occurring amino acid
GFVIPHPSRANPANPSIXLGPEFKKVANFLARVKSLPRIVXLSSLKVFGEVWFGSGNTPKGKVAIFPQPGVKLEIPKGDVLXNKDVNGPEDF

SEQ ID NO: 9033 - protein, 100 aa, Brassica napus
MEGGIKATSPSYYDVLGVAVNSSAEQIRRAYHKLAMKWHPDRWTKDPLRSGEAKRRFQQIQEAYSVLSDQRKRSLYDVGLYDTDEDEVLIDISIAVLMVT

SEQ ID NO: 9034 - protein, 266 aa, Triticum aestivum
  misc_feature (211)..(211): Xaa can be any naturally occurring amino acid
LSRTSLYKKAGWYRSGIPGISSTHASELGEISENEKAGFISLVSRYLSGEAEQIEWSKIQTPTDEVVVPYDTLAPPPEDLDAMKALLDKLVVLKLNGGLGTTMGCTGPKSVIEVRNGFTFLDLIVIQIESLNKKYGCSVPLLLMNSFNTHDDTQKIVEKYSNSNIEIHTFNQSQYPRIVTEDFLPLPSKGQTGKDGWYPPGHGDVFPSLNXSGKLDTLLSQGKEYVFVANSDNLGAIVDIKILNHLITNQNEYCMESTSKTLADVK

SEQ ID NO: 9035 - protein, 55 aa, Passiflora talamancensis
WEYQVGPSVGIEAGDHIWCSRYILERITEQVGVVLTLDPKPIEGDWNGAGCHTNY

SEQ ID NO: 9036 - protein, 288 aa, Rhizobium etli
FPTLEQLPLWGFDGSSTMQAEGRSSDCVLKPVAIYPDPARTNGVLVMCEVMMPDGVTPHPSNARATILDDEDAWFGFEQEYFFYQNGRPLGFPEQGYPAPQGPYYTGVGYSNVGDVAREIVEEHLDLCLAAGINHEGINAEVAKGQWEFQIFGKGSKKAADQIWMARYLLQRLTEKYGIDIEYHCKPLGDTDWNGSGMHCNFSTKYMREVGGKAYFEALMAQFEKNLMDHINVYGPDNDKRLTGKHETAPWNKFSYGVADRGASIRVPHSFIKNDYKGYLEDRRPNSQ

SEQ ID NO: 9037 - protein, 323 aa, Coffea arabica
MTACLRPLFLAIISLLMISSLTRSSEGAGIAVYWGQNGNEGSLEEACRSGYYDYVNIAFLVSFGSGQTPELNLAGHCIPSPCTFLSSQIEVCQSLGIKVLLSLGGGGAGAGRGPILASPEDARGVAAYLWNNYLGGQSDSRPLGAAVLDGIDFDIEYGSNLYWDDLARALSGYSTAERKVYLSAAPQCFFPDYYLDVAIRTGLFDFVWVQFYNNPPCQYGTSTGNADNLLNSWSNDWAPHPGVNKLFLGLPAAPEAAPSGGYIPPEVLINQILPVVQSYPKYGGVMLWSRFYDRNYSPAIRPYVNGDPLTYTTKSVKKSHAVA

SEQ ID NO: 9038 - protein, 274 aa, Rhizobium leguminosarum
WGFDGSSTQQAEGRSSDCVLKPVAIYPDPARTNGALVMCEVMMPDGVTPHASNARATILDDEDAWFGFEQEYFFYQNGRPLGFPEQGYPAPQGPYYTGVGYSNVGDVAREIVEEHLDLCLAAGINHEGINAEVAKGQWEFQIFGKGSKKAADQIWMARYLLQRLTEKYGIDIEYHCKPLGDTDWNGSGMHCNFSTKYMREVGGKAYFEALMAQFEKNLMDHINVYGPDNDKRLTGKHETAPWNKFSYGVADRGASIRVPHSFVKNDYKGYLKSR

SEQ ID NO: 9039 - protein, 132 aa, Glycine max
ALSPFQEGLVFRTPFRAIPENPSLELGPQFKKVSHFLTRFQSIPRFVELARLKVPAHVWFGPGVTLKGKPGFFPNPGVNLEIPSGPVFPPKEIYGPWALLKKPFFEFLNPCGCAIFGFSPPLTKIWVLLLVW

SEQ ID NO: 9040 - protein, 392 aa, Annona sp. SM-1999
PYEVPMTAAGALQSYKLAAKAIARLQALPSGNLQKLIDTVVEEVFELTGYDRAMAYKFHDDDHGEVISEITKPGLEPYLGLHYPATDIPQAARFLFMKNKVRMICDCNAKPVKVYQDEKLKLELTLCGSTLRAPHSCHLKYMENMGSIASLVMAVVINESDNEDDNSMVEQQQQQQPKRKRLWGLVVCHNTTPKFVPFPLRYACEVLMQVFAIHVNKELELENQIREKHLRTQTLLCDMLMRDAPLGIVTQSPNIMDLVKCDGAALLYNNKFWRLGLTPSEAHMRHIVSWLNEYHMDSTGLSTDSLHDAGYPGALALGDAVCGMAAVRITSKDILFWFRTHTAAEIRWGGAKHDPSDKDDGRRMHPRSSFKAFLEVVKSSSFPWKDYEMDAI

SEQ ID NO: 9041 - protein, 341 aa, Annona sp. SM-1999
EPVNPADVPVTAGGALKSYKLAAKAISRLQSLPSGNIPLLCDVLVREVSELTGYDRVKAYKFHEDEHGEVIAECRRSDLEPYLGLHYPATDIPQASRFLFMKNKVRMISDCLSPPVKVIQGKGLAQPLSLCGSTLRAPHGCHAQYMANMGSISSLVMSVTIDEDNDDTCSEQQQKGRRLWGLVVCHHTSPRFVPFPLRYACEFLMQVFGIQLNKEVELAAQSREKHILQMQTMLCDMLLRDAPVGILSQSPNVMDLVNCNGAALYYQNQFWLLGTTPTEAQIRDIVGWLLEYHNSTTGLSTDSLVEAGYPGAAELGDDVCGMAAVRITSKDFLFWFRSHTA

SEQ ID NO: 9042 - protein, 259 aa, Oryza sativa Japonica Group; identical to SEQ ID NO: 7161

SEQ ID NO: 9043 - protein, 472 aa, Leptospira interrogans serovar Lai str. 56601
MDSLKSKSDELIQNKMTSEGLSSAFIQDFLKKTDLVRNGETGMVRWEEVGDLDPKADEITLEQIESENAPEPSILKNLVVIKLNGGLGTSMGLSGPKSLIELKNGMSFLEIVAKQSEVIEKKYNVSVPLILMDSFNTQKESQEELNRIGFRQKFPTSFLQHKVPRLLKKDLTPISCKNPDEEWCPPGHGDIWISLLETGLLDTLIQNGYKIAFVSNGDNLGATVHPGILSYMLKEKLEFCMEMTPKTLADKKGGAIYKRMVAGRAENYQLLETAQVPPEHMHEFEGLGKFRTFSTNNLWIDLVALRQRILLGSFELSLIVNPKTIEGQEVLQLETAMGSAIRNFEKVKGIIIPRDRFAPVKKCEDYLARRSDAYHLLENYSITMSDKRKESGLGEILIYLDERYYKKIGDFNRLFPEIPSLELCSSLTVQGEVLFDQKISIVGEVVIQNNETLPRRISDLKTRILESGKYSF

SEQ ID NO: 9044 - protein, 390 aa, Aquilegia sp. SM-1999
PYEVPMTAAGALQSYKLAAKAIARLQSLPSGSIDRLCDTVVEEVFQLTGYDRVMAYKFHDDDHGEVVSETTKEGLPPYLGLHYPATDIPQAARFLFMKNKIRMICDCRAKHVRVLQDEKLPFELTLCGSTLRAPHSCHLQYMENMDSIASLVMAVVINDGDEEEGTVEGASQSRKRKRLWGLVVCHNTTPRFVPFPLRYACEFLIQVFAIHVNKEFELENQILEKNILRTQTLLCDMLMRNAPIGIVSQSPNIMDLVKCDGAALLYQNKIWRLGLSPSESHIRDIASWLSEYHMDSTGLSTDSLYDAGFPGALSIGDTVCGMAAVRINSKDMLFWFRSHTAGEIRWGGAKHDPGEKDDGRKMHPRSSFKAFLEVVKTRSFPWKDYEMDAI

SEQ ID NO: 9045 - protein, 392 aa, Aquilegia sp. SM-1999
DLEPVNPADVPVTAAGAMKSYKLAAKAISKLQSLPSGNIPFLCEVLVQEISDLTGYDRVMVYKFHEDDHGEVIAEWKISDLEPYLGLHYPATDIPQASRFLFMKNKVRMIWDCTAAPVKVIQDTNLPQPLSLGGSTLRAPHGCHAQYMANMGSVASLVMSVTINDDDDDEVVNGQQKGRKLWGLVVCHHTCPRFVPFPLRYACEFLIQVFSMQINKEVELARQLREKHILQTKTVLCDMLLRDAPIGIFTQSPNVMDLVKCNGAALYYHQKFWLLGVTPTEAQIRDIVEWLVEYHNASTGLSTDSLVEAGYPGASILGNAVCGMAAAKITSKDFLFWFRSHTANEIKWGGAKHDPTEKDDGWKMHPRSSFKAFLDVVKHRSVPWEDIEMDAI

SEQ ID NO: 9046 - protein, 345 aa, Austrobaileya scandens
TGYDRVMAYRFHEDDHGEVVSEIRKSELEPYLGLHYPATDIPQAARFLFMKNKVRMICDCHAKSVTVHQDEKLQFDLTLCGSTLRAPHSCHLQYMANMGSIASLVMAVVVNEGEQDEEETAEPNQQPQLKRKRLWGLVVCHNTTPRFVPFPLRYACEFLIQVFAIHVNKEMELQNQLQEKNILRMQTLLCDMLLRDAPLGIVTQSPNIMDLVKCDGAAVLYGNKVWLLGVTPTESQIQDIASWLSESHMDSTGLSTDSLFEAGYPGALALGAKVCGMAAVKITLKDMLFWFRSHTAAEVRWGGAKHDPVDRDDGRRMHPRSSFKAFLEVVKSRSLPWKEYEMDGI

SEQ ID NO: 9047 - protein, 360 aa, Austrobaileya scandens
PFYAILHRIDAGLIIDLEPVNPADVPITAAGALKSYKLAAKAISRLQSLPSGNIGLLCDVLVQEVSELTGYDRVMAYKFHEDEHGEVIAEYRRSNLEPYIGLHYPATDIPQASRFLFMKNKVRMICDCFAPPIKVIQDKKLAQPLSLCGSTLRAPHGCHAQYMANMGSVASLVMSITVNDDDDETIGEQQNQQKGRKLWGLVVCHHTSSRFVPFPLRYACEFLIQVFGIQLNKEVELAAWMREKHILQMQTLLCDMLLRDAPVGIMTQSPNVMDLIKCDGAALYYGKQLWLLGTTPTEAQIRDIAGWLLEYHGGTTGLSTDSLMEAGYPAAAALGDGVCGMAAAKLTSKDFLFWFRSHTA

SEQ ID NO: 9048 - protein, 396 aa, Brasenia schreberi
PYEVPMTAAGALQSYKLAAKAIARLQSLPSGSVGRLIDTVVEEVHQLTGYDRVMTYKFHEDDHGEVVSEIRKPDLEPYLGLHYPATDIPQAARFLFMKNKVRMICDCRAKPVKVYQDENLKTDLTLCGSTLRAPHSCHLQYMDNMGSIASLVMAVVINEGEDEGDDEPEQNQGQQQQQQQKKKRLWGLVVCHNTTPRFVPFPLRYACEFLMQVFAIHVNKEVELENQMREKNILRTQTLLCDMLLRDAPLGIVTQSPNVMNLVKCDGAALLYGNKLWLLGQTPSESQMRDLAVWLSEYHRDSTGLSTDSLYEAGYPGALAIGDVVCGMAAVRITNSDMLFWFRSPTASEIRWGGAKHDPEEKDDGRRMHPRSSFKAFLEVVKTRSLPWKGFEMDAI

SEQ ID NO: 9049 - protein, 352 aa, Cabomba sp. SM-1999
DLEPVNPADMPSTAAGALKSYKLAAKAISRLQVLPSGNIGLLCDVLVREVSELTGYDRVMAYKFHEDEHGEVIAECKRPDLESYLGLHYPATDIPQASRFLFIKNKVRMICDCTAAPVKVIQNENLEPPLSLCGSTLRFPHGCHVQYMTNMGSIASLVMSVVINESDEATANDQPEAAATSEQPQKGRKLWGLVVCHHRKPRFIPYPLRYACEFLIQVFSVRLNKEVELAIQVREKHILRTQTVLCDMLLRDAPVGIVTQSPNIMDLVKCNGAALYYGKQFWLLGTTPTEAQIRDIIAWLHESHGSSTGLSTDSLMEAGYPRALVLGNAVCGMAAVKITSRDFLFWFRSHTA

SEQ ID NO: 9050 - protein, 301 aa, Triticum aestivum
  misc_feature (189)..(189): Xaa can be any naturally occurring amino acid
TSLYKKAGWYRSGIPGISSTHASAAFASYALASPSSFLALVDTYDVMRSGIPNFCAVALALHDLGYKASGIRLDSGDLAYLSIETRKVFHAIEKEFNIPGFGKMIITASNDLNEETIDALNKQGHEVDAFGIGTYLVTCYSQAALGCVFKLVEINSRPRIKLSEDVAKVSIPCKKRCFRLYGKEGYPLXVDIMIRESEPSPKAGERILCRHPFLESKRAYVVPQHVEELLHCYWPGSSDKPRAELPPLLKIRSRCMQQLEKLRPDHIRRLNPTPYKVSVSAKLYEFIHYLWLNEAPVGELQ

SEQ ID NO: 9051 - protein, 390 aa, Calycanthus floridus
PYEVPMTAAGALQSYKLAAKAITRLQSLPSGSMERVVDTVVQEVFELTGYDRVMAYKFHEDDHGEVISEITKPGLEPYLGLHYPATDIPQAARFLFMKNKVRMICDCHAKPVKVCQDEKLTFDLTLCGSTLRAPHSCHLQYMENMGSIASLVMAVVINEGEEDDEVGISQQQQQRRKRLWGLVVCHNTTPRFVPFPLRYACEFLMQVFAIHVSKEIELENQLREKNILRTQTLLCDMLLRDALLGIVTQSPNIMDLVKCDGASLLYGNKMWRLGLTPTESQIHDIAMWVSEYHMDSTGLSTDSLYDAGYPKALSIGDVVCGMAAVRITAKDMLFWFRSHAAAEVRWGGAKHDPSDKDDGRRMHPRSSFKAFLEVVKTRSSPWKDYEMDAI

SEQ ID NO: 9052 - protein, 393 aa, Calycanthus floridus
DLEPVNPDDVPVTAAGALKSYKLAAKAISKLQSLPSGNISLLCDVLVREVSELTGYDRVMAYKFHEDDHGEVIAECRRSDLEPYLGLHYPATDIPQASRFLFMKNKVRMICDCLAPPVKVIQDKRLAQPLSLCGSTLRAPHGCHAQYMANMNSIASLVMSVMVHENDDRQEMSSSRKGRKELWGLVVCHHTTPRLSFPLRYACEFLIQVFGIQLNKEIELAAQMREKHILRTQTVLCDMLQRDAPVGIIRQTPNVMDLVKCDGAALYYRNQFWLLGTTPTDAQIRDIAEWLLEYHSSSTGLSTDSLMEAGYPGASVLGDAVCGMAAIRITSKDFLFWFRSHTAKEIKWGGAKHDPVDQDDDDRKMHPRSSFKAFLEVVKCRSLPWEDIEMDAI

SEQ ID NO: 9053 - protein, 294 aa, Coccidioides immitis RS
MPTADDDLVAGEPPSSINPYEVLGVEEKATADQIKSAYRKQALRHHPDKASPESKDEANKKFQEIAFAYAILSDERRRRRYDTTGNTSESLDLEDDDFDWVDFYREQFSSMVDGKAIEKIKAEYQGSEEEERDLLEAYETYEGDLDKVYEEVMLSNVLDDDERFRKIIKKAIRKGEVTDWPAFSKESAKKRSQRVKAAEKEAREAMEIAKELGVEDKLFGKKKGKGDDDENSLMALIQQRQRSRASNFLADLEAKYVAPSKSGKGKKRRTEEAEPPEEAFQRNRPRTTKKQKAY

SEQ ID NO: 9054 - protein, 323 aa, Cucumis sativus
MAAHKIITTTLSIFFLLSSIFRSSNAAGIAIYWGQNGNEGSLASTCATGNYEFVNIAFLSSFGSGQTPVLNLAGHCNPDNNGCAFVSDEINSCQSQNVKVLLSIGGGVGRYSLSSANNAKQVAGFLWNNYLGGQSDSRPLGDAVLDGVDFVIGFGSGQFWDVLARELKSFGQVILSAAPQCPFPDAQLDAAIRTGLFDSVWVQFYNNPPCMYADNADNLLSSWNQWAAYPISKLYMGLPAAPEAAPSGGFIPADVLISQVLPTIKTSSNYGGVMLWSKAFDNGYSDAIKGRILLKKSSYCYGVRRLTMATHLPLSLEIEQVLV

SEQ ID NO: 9055 - protein, 546 aa, Debaryomyces hansenii CBS767
MFVSLIVSQLILLIKIVSALEVGSSNNVAVYWGQNSGGSQDRLSTYCESDSVDIVLLSFLNNFPNDFNLNFANQCGMTFEDGVLHCSAIGEDIKTCQAAGKTVLLSLGGGIGNYGFTSDAEAVDFASTLWNKFGAGTSADERPFDDAVVDGFDFDIENNNQVGYVALANELRTLFDQDSSKSYYLSASPQCPYPDQSVGDLLSNANLDFAFIQFYNNYCSLDQSEFNWNTWSDFAKSAPNDDIKLFVGLPGAPASGNGYVDAATVAKTIDEIKCDQALGGISLWDASSAFTNVNANDVNYIEQVASILNSEECSASSSSSVASSLTTQSSSSSTSNDMTASATSSNEITGASSALSLVSTLPHYSNGSVTSGLVSSDEGTTATVTGIQTTIITVTSCSDNHCSKVPIETGVTVVTEGSTSYTTYCPLDNTPSTETVSDVATTVITVTSCQDNKCDFATVTTGLTVVTEFDTVYTTYCPLTTESTAQNTITNSASVTQSDKTIAHSTVYPTSQNQTVAAIETYAEGMGSLVAGSWTLAIAAIFASLL

SEQ ID NO: 9056 - protein, 299 aa, Arabidopsis thaliana
MSSYMHPLLGQELHLQRPEDSRTPPDQNNMELNRSEADEAKAETTPTGGATSSATASGSSSGRRPRGRPAGSKNKPKPPTIITRDSPNVLRSHVLEVTSGSDISEAVSTYATRRGCGVCIISGTGAVTNVTIRQPAAPAGGGVITLHGRFDILSLTGTALPPPAPPGAGGLTVYLAGGQGQVVGGNVAGSLIASGPVVLMAASFANAVYDRLPIEEEETPPPRTTGVQQQQPEASQSSEVTGSGAQACESNLQGGNGGGGVAFYNLGMNMNNFQFSGGDIYGMSGGSGGGGGGATRPAF

SEQ ID NO: 9057 - protein, 560 aa, Oryza sativa; identical to SEQ ID NO: 8204

SEQ ID NO: 9058 - protein, 801 aa, Oryza sativa Japonica Group; identical to SEQ ID NO: 2266

SEQ ID NO: 9059 - protein, 113 aa, Glycine max
LESKLAPCYPGDEETAYDREECPICFLYYPSLNRSRCCTKSICTECFLQMKVPNSTRPTQCPFCKTANYAVEYRGVKSKEEKGLEQIEEQRVIEAKIRMRQQELQDEEERMHK

SEQ ID NO: 9060 - protein, 105 aa, Zea mays
  misc_feature (71)..(71): Xaa can be any naturally occurring amino acid
IASVHKKDGCNVPVLVVNCFNTDDDTQKSAGQCSNSDMEMHTVSRSQHAWIGTGGLLPLPSEGKSAKDGWXPPGHGGVFPCMTNRGKLDRLLAQGTELVCVANLH

SEQ ID NO: 9061 - protein, 58 aa, Passiflora tetrandra
WEYQVGPSVGIDAGDHIWGSRYILERITEQAGVVLSLDPKPIEGDWNGAGCHTNYCTK

SEQ ID NO: 9062 - protein, 363 aa, Triticum aestivum
  misc_feature (168)..(168): Xaa can be any naturally occurring amino acid
  misc_feature (204)..(204): Xaa can be any naturally occurring amino acid
MGLDYYKILGVDKAASDDDLKKAYRKLAMKWHPDKNPTNKKEAESKFKQISEAYEVLSDSQKRAVYDQYGEEGLKGQVPPPGAGGGAGGPAGATFFSTGADGPTAFRFNPRNAEDIFAEFFGSSSPFGGMGGMGGGGHGMPSGGIRFSPSMFGGGGDHTFTQTFGGGXAKGTPGMFGGGAPVKAAPIERKLPCSLEELYKGTTXKKMKISREIADASGKTIPVEEILTIDVKPGWKKGTKITFPEKGNEQPHTIAADLVFIIDEKPHPVYTRDGNDLVATQKIPLAEALTGYTVHLTTLDGRSLTVPISSVIHPGYEEVVRGEGMPIPKDPSRKGNLRVKFDIKFPARLTADQKSGVKRLLGQ

SEQ ID NO: 9063 - protein, 336 aa, Oryza sativa; identical to SEQ ID NO: 8103

SEQ ID NO: 9064 - protein, 285 aa, Oryza sativa Japonica Group
MAANKLKFSPLLALFLLAGIAVTSRAGDIAVYWGQNGDEGSLADACNSGLYAYVMVAFLSTFGNGQTPVLNLAGHCEPSSGGCTGQSSDIQTCQSLGVKVILSIGGGAGSYGLSSTQDAQDVADYLWNNFLGGSSGSRPLGDAVLDGVDFDIETGNPAHYDELATFLSRYSAQGGGKKVILTAAPQCPYPDASLGPALQTGLFDSVWVQFYNNPPCQYANGDASNLVSAWNTWNRRRQRRELLRRRAGGGGRGGERGNAKYGGIMVWNRFYDVQNNFSNQVKSSV

SEQ ID NO: 9065 - protein, 55 aa, Passiflora trialata
WEYQVGPSVGIDAGDHIWCSRYILERITEQAGVVLSLDPQPIEGDWNGAGCHTNY

SEQ ID NO: 9066 - protein, 269 aa, Zea mays
MATTAVSVDEKLDKLRAEVAKLDQISENEKSGFISLVSRYLSGEAEQIEWSKIQTPTDEVVVPYDTVASPPEDLEETKKLLDKLVVLKLNGGLGTTMGCTGPKSVIEVRNGFTFLDLIVIQIESLNKKYGCNVPLLLMNSFNTHDDTQKIVEKYSNSNIEIHTFNQSQYPRIVTEDFLPLPSKGKSGKDGWYPPGHGDVFPSLNNSGKLDILLAQGKEYVFVANSDNLGAIVDIKILNHLINNQNEYCMGVTPKTLADVKGGTLISYER

SEQ ID NO: 9067 - protein, 55 aa, Passiflora trifasciata
WEYQVGPSVGIDAGDHIWCSRYILERITEQVGVVLTLDPKPIEGDWNGAGCPTNY

SEQ ID NO: 9068 - protein, 68 aa, Passiflora tripartita var. mollissima
GTNGEVMPGQWEYQVGPSVGIDAGDDIWCSRYILERITEQAGVILSLDPKPIEGDWNGAGCHTNYSTK

SEQ ID NO: 9069 - protein, 272 aa, Bradyrhizobium yuanmingense
PLWGFDGSSTQQAEGHSSDCVLKPVAVFPDGARTNGVLVMCEVMMPDGKTPHPSNKRATILDDSGAWFGFEQEYFFYKDGRPLGFPTAGYPAPQGPYYTGVGYSNVGDVARKIVEEHLDLCLAAGINHEGINAEVAKGQWEFQIFGKGSKTAADQMWMARYLMLRLTEKYGIDIEFHCKPLGDTDWNGSGMHANFSTAYMREVGGKEYFEALMAAFEKNLMDHIAVYGPDNDKRLTGKHETAPWNKFSYGVADRGASIRVPHSFVNNGYKGY

SEQ ID NO: 9070 - protein, 274 aa, Bradyrhizobium liaoningense
GFDGSSTQQAEGHSSDCVLKPVAVFPDAARTNGVLVMCEVMMPDGKTPHPSNKRATILDDAGAWFGFEQEYFFYKDGRPLGFPASGYPAPQGPYYTGVGYSNVGDVARKIVEEHLDLCLAAGINHEGINAEVAKGQWEFQIFGKGSKKAADEMWMARYLMLRLTEKYGIDIEFHCKPLGDTDWNGSGMHANFSTEYMRTVGGKEYFEALMAAFDKNLMDHIAVYGPDNDKRLTGKHETAPWNKFSYGVADRGASIRVPHSFVNNGYKGYYEELR

SEQ ID NO: 9071 - protein, 274 aa, Oryza sativa Indica Group
MADGGEKCRDAAGEGGGGGGDLYAVLGLKKECSDADLKLAYRKLAMRWHPDKCSSSSSAKHMEEAKEKFQEIQGAYSVLSDSNKRFLYDVGVYDDDNNDDDNLQGMGDFIGEMAQMMSQARPTRQESFEELQQLFVDMFQADLDSGFCNGPSKCYHTQAQSQTRTSSTSPSTSPSPPPPVATEAESPSCNGINKRGSSAMDSGKPPRASEVSAGQSQSGFCFGQKSDAKQAAKTRSGNTASRRRNGRKQKVSSKHDVSSEDEMPGHPYTVKAKN

SEQ ID NO: 9072 - protein, 386 aa, Aristolochia tomentosa
DLEPVNLADAQVSASGALKSYKLASKAISRLQSLPSGNITLLCDVLVREVRDLTGYDRVMAYKFHEDEHGEVIAECKRPGLESYLGLHYPATDIPQASRFLFLKNKVRMIYDCSAVPVNVIQDKCLAQPLCLGGSTLRAPHGCHAQYMANMGSIASLVMSVTINEDDDETGRKLWGLVVCHHGSSRFVPFPFRYACDFLMQVFGIQINKEVELAAQMREKHILRTQTLLCDMLLRDAPVGIVDKSPNVMDLVKCDGAALYYKNRFWLLGTTPTEAQIRDTAQWLLQYHNNTTGLSTDSLVEAGYPGAQYLGDAVCGMAAVKITNRDFLFWFRSHAGKEIKWGGAKHDPEENDGDGKKLHPRSSFNAFLEVVKWRSKPWEDVEMDAI

SEQ ID NO: 9073 - protein, 212 aa, Populus trichocarpa
MHSILNRIIMPESIDKHGVDWKNVDYLIFNTYIWWMNTFSMKVLRGSFDEGSTEYDEIERPVAYRRVLNTWSKWVEKNVDPNRTTVFFSSMSPLHIKSLDWENPDGIKCAKETAPILNVSMPLNVGTDRRLFVVAANITGSMKVPVHFLNITKLSEYRKDAHTSVHTIRQGKMLTPEQQADPETYADCIHWCLPGLPDTWNEFIYTRIISRT

SEQ ID NO: 9074 - protein, 284 aa, Bradyrhizobium liaoningense
AMELEQLPLWGFDGSSTQQAEGHSSDCVLKPVAVFPDAARTNGVLVMCEVMMPDGKTPHPSNKRATILDDAGAWFGFEQEYFFYKDGRPLGFPASGYPAPQGPYYTGVGYSNVGDVARKIVEEHLDLCLAAGINHEGINAEVAKGQWEFQIFGKGSKKAADEMWMARYLMLRLTEKYGIDIEFHCKPLGDTDWNGSGMHANFSTEYMRTVGGKEYFEALMAAFDKNLMDHIAVYGPDNDKRLTGKHETAPWNKFSYGVADRGASIRVPHSFVNNGYKGYYEERR

SEQ ID NO: 9075 - protein, 349 aa, Canella winterana
DFEPVKPYEAPMTAAGALQSYKLAAKAIARLQSLPSGSMKRLVDTVVQEVFDLTGYDRVMAYKFHEDDHGEVISEITKPDLEPYLGLHYPSTDIPQAARFLFMKNKVRMICDCHALPVKVYQDDKLTFDLTLCGSTLRAAHSCHSQYMANMGSIASLVMAVVVNEREEEDENSESSEQQQQQKKKRLWGLVVCHNTTPRFVPFPLRYACEFLMQVFAIHVNKELELENQIQEKNILRTQTLLCDMLMRSAPLAIVTQNPNIMDLVKCDGASLLYQSKIWRLGVAPTESQIRDIARWLSDCHMDSTGLSTDSLHDAGYPGALLLGDVVCGMAAVKINSKDMPFWFRSHTA

SEQ ID NO: 9076 - protein, 393 aa, Canella winterana
DLEPVNPTDVPVTAAGALKSYKLAAKSISRLQSLPSGNIQLLCDVLVREVSDLTGYDRVMAYKFHEDEHGEVIAECRRSDLEPYLGLHYPATDIPQASRFLFMKNKVRMICDCSAPPVKVIQDKRLAQSLSLCGSTLRAPHGCHAQYMANMGSIASLVVSVTVSEDDDETESEQQQKGRKLWGLVICHHTCPRFVPFPLRYACEFLIQVFGIQLNKEVDLASQIREKHMLRTQTMLCDMLLRDAPVGIVTQSPNVMDLVKCDGAALYYKNQFWLLGTTPTEAQIRDITNWLVEYHNSTTGLSTDSLAVAGYPGASVLGDAVCGMAAVKFTNKDLLFWFRSHTAKEIMWGGAKHDPVDKDDDGRKLHPRSSFKAFLEVVKRRSLPWEDVEMDAI

SEQ ID NO: 9077 - protein, 386 aa, Aristolochia manshuriensis
DLEPVNLADAQVSASGALKSYKLASKAISRLQSLPSGNITLLCDVLVREVRDLTGYDRVMAYKFHEDEHGEVIAECKRPGLESYLGLHYPATDIPQASRFLFLKNKVRMIYDCSAVPVNVIQDKCLAQPLCLGGSTLRAPHGCHAQYMVNMGSIASLVMSVTINEDDDETGRKLWGLVVCHHGSSRFIPFPFRYACDFLMQVFGIQINKEVELAAQMREKHILRTQTLLCDMLLRDAPVGIVDKSPNVMDLVKCDGAALYYKNRFWLLGTTPTEAQIRDIAQWLLQYHNNTTGLSTDSLVEAGYPGAQYLGDAVCGMAAVKITNRDFLFWFRSHAGKEIKWGGAKHDPEENDGDGKKLHPRSSFNAFLEVVKWRSKPWEDVEMDAI

SEQ ID NO: 9078 - protein, 277 aa, Bradyrhizobium liaoningense
LEQLPLWGFDGSSTQQAEGHSSDCVLKPVAVFPDAARTNGVLVMCEVMMPDGKTPHPSNKRATILDDAGAWFGFEQEYFFYKDGRPLGFPASGYPAPQGPYYTGVGYSNVGDVARKIVEEHLDLCLAAGINHEGINAEVAKGQWEFQIFGKGSKKAADEMWMARYLMLRLTEKYGIDIEFHCKPLGDTDWNGSGMHANFSTEYMRTVGGKEYFEALMAAFDKNLMDHIAVYGPDNDKRLTGKHETAPWNKFSYGVADRGASIRVPHSFVNNGYKGYL

SEQ ID NO: 9079 - protein, 391 aa, Chloranthus spicatus
PYEVPMTAAGALQSYKLAAKAIARLQSLPGGSMEKLCDTVVQEVFELTGYDRAMAYKFHEDDHGEVISETTKPGLEPYLGLHYPATDIPQAARFLFMKNKVRMICDCHAKPVKVFKMKKLAFDLTLCGSTLRAPHSCHSQYMVNMNSIASLVMAVVVNEGEEGDSSEPGQQQLQQKKKRLWGLVICHNTTPRFVPFPLRYACEFLMQVFAIHVNKELELENQIQEKNIFRTQTLLCDMLMRDAPLGIVSQNPNIMDLVKCDGAALLYNKKIWRLGLTPSESQIHDISFWLSENHMDSTGFSTDSLNDAGYPGAVAIGNAVCGMAAVWITSKDMLFWFRSHTAAEVRWGGAKHDPEDKDDNRRMHPRSSFMAFLEVVKTRSLPWKDAEMDAI

SEQ ID NO: 9080 - protein, 397 aa, Chloranthus spicatus
DLEPVNPADVPVTAAGALKSYKLAAKAISRLQSLPSGNISLLCDVLVREVSELMGYDRVMAYKFHEDEHGEVIAECRRVDLEPYLGLHYPATDIPQASRFLFMKNKVRMICDCSAAPVKVIQDKRLGQPLSLCGSTLRAPHGCHALYMANMGSIASLVMSVTINEDDDETKSDPQQQQQENRRKLWGLVVCHHTSTRFAPFPLRYACEFLLQVFSLQLNKEVELAAQLREKNMLRMQTLLCDMLLRDTPTGILTQSPNVMDLVKCDGAALYYRNQFWLFGTTPTDVQIRDMAEWLLECHDGSTGLSTDSLMEAGYPCASILGNAVCGMAAVKITSKDFLFWFRSHTAKEVKWGGAKHDPIDKDGDGRKMHPRSSFKAFLEVMKQRSLPWEDMEMDAI

SEQ ID NO: 9081 - protein, 298 aa, Cucumis sativus
MAAHKITTTLSIFFLLSSIFHSSDAAGIGIYWGQNGNEGSLASTCATGNYEFVNIAFLSSFGGGQTPVLNLAGHCNPDNNGCTILSNEINSCQSQNVKVLLSIGGGTGSYSLYSADDAKEVANFIWNSYLGGQSDSRPLGDAVLDGVDFDIEFGSDQFWDVLAQELKSFGQVILSAAPQCPIPDAHLDAAIRTGLFDSVWVQFYNNPSCMYADNTDDILSSWNQWAAYPILKLYMGLPAAPEAAPSGGFIPVDELISEVLPTIKAYSNYGGVMLWSKAFDNGYSDAIKDSIYQLKGSS

SEQ ID NO: 9082 - protein, 414 aa, Degeneria vitiensis
SGKPFYAIIHRVTGSLIIDFEPVKPYEVPMTAAGALQSYKLAAKAIAKLQALPSGSMEKLVDTIVQEVFELTGYDRAMAYKFHEDDHGEVISEVTKPGLEPYLGLHYPATDIPQAARFLFMKNKVRMICDCHAKPVEVYQDEKLTFDLTLCGSTLRAPHSCHLQYMENMDSIASLVMAVVINEGEDESGGPEQQQQQLKRKRLWGLVVCHNMTPRFVPCPLRYACEFLMQVFAIHVNKEFELENQIREKNILRTQTMPCDMLLRDAPLGIVTQSPNIMDLVKCDGAALLYNNKIWRLGFTPTESQIHDISIWLSEYHTDSTGLSTDSLRDAGYPDALALGDVVCGMAAVRISPKDMLFWFRSPTAAEVRWGGAKHDPCDKDDGRRMHPRSSFKAFLEVVKTRSLPWKDYEMDGI

SEQ ID NO: 9083 - protein, 393 aa, Degeneria vitiensis
DLEPVNPADVPVTAAGALKSYKLAAKAISRLQSLPSGNISLLCDVLVREVSELTGYDRVMAYKFHEDEHGEVIAESRRSDLEPYLGLHYPATDIPQASRFLFMKNKVRMICDCSAPPVKVIQDKRLAQPLSLCGSTLRAPHGCHTQYMANMGSISSLVMSVTINEDDDDMLSEQQQKGRKLWGLVVCHHTSPRFIPFPLRYACEFLIQVFGIQLNKEVELAAQMREKHILRMQTVLCDMLLRDTPVGIITQSPNVMDLVNCDGAALYYRNQFWLLGTTPTEAQIRDIAGWLVEYHDGTTGLSTDSLTEAGYPSAADLGDDVCGMATVKITSKDFLFWFRSHTGKEIKWGGAKHDPVDKDDDGRKMHPRSSFKAFLEVVKQRSLPWEDVEMDAI

SEQ ID NO: 9084 - protein, 580 aa, Oryza sativa Indica Group
MKKKKNGMGAAADRGRLLALAHHDKLNPTKPSEAQRRFKPSIQQLPFFFFFFFLEAAFLGLFLLSPLPSFLGQGQMQMQQRRKPPPAAAPVAAKQPSPRRTPGPLSFAGALLSLLVVATFLYINDHGNMMPPHASPDPNLRLLQEAAHQKVNSILLSRHAPAPPPRTNTNTSSSDQHLRLINIPMSSDLDLELGGNSTSSSGVEIQFEQQEEKNLRGCELYKGRWVYDAAGREAPLYRESECGFLTEQVTCMRNGRRDDSYQRWRWQPEGCDLPSFDARALLERLRNKRMMFVGDSLNRNQWESMVCLVQSAIPYGQKTLTKFVNNGSLNVFRAHEYNATVEFYWAPFLVQSNSDDPQVHSVRDRVIAWRSIAKHAANWKGVHYLVFNTYIWWLNNFQIKVLKSRGAPFAGSGGWSSRYALVDRAIAYREVLKTWAKWVDRRIDPNKTHVFFMAMSPNHFMPEAWGGSAGAVKCAMETQPIVNRTSGGLDIGTDWRLHGVARGVLRSMRRVGVRFVDITALSELRKDAHTSVHTLRQGKLLTPEQQADPRTYADCIHWCLPGLPDTWNHFLYAHIVAHAA

SEQ ID NO: 9085 - protein, 174 aa, Oryza sativa Japonica Group; identical to SEQ ID NO: 7482

SEQ ID NO: 9086 - protein, 388 aa, Drimys winteri
PMTAAGALQSYKLAAKAIARLQSLPGGSLKRLIDTVVLEVFELTGYDRVMAYKFHEDDHGEVISEVTKPDLEPYLGLHYPATDIPQAARFLFMKNKVRMICDCNAKPVKVYQDEKLTFDLTLCGSTLRAPHSCHLQYMENMGSIASLVMAVVINEREEQDENSGSEQQREQPRRKRLWGLVVCHNTTPKFVPFPLRYACEFLAQVFAIHVNKELELENQIQENNILRTQTLLCDMLMRAALLGIVTQSPSILDLVKCDGASLLYQNKIWRLGVAPTESQILDIALWLSEYHMDSTGLSTDSLQDAGHPGALSLGDVVCGMAAVRINSKDTLFWFRSHTAAEIRWGGAKHDPNQKDDGRKMHPRSSFKAFLEVVKTRSSPWADYEMDAI

SEQ ID NO: 9087 - protein, 302 aa, Oryza sativa Japonica Group; identical to SEQ ID NO: 8203

SEQ ID NO: 9088 - protein, 394 aa, Drimys winteri
DLEPVNPVDVPVTAAGALKSYKLAAKAISKLQYLPSGNISLLCDVLVREVSELTGYDRVMAYKFHGDEHGEVIAECRRSDIEPYLGLHYPATDIPQASRFLFMKNKVRMICDCTARPVKVIQDKKLAQPLSLCGSALRAPHGCHAQYMANMGSIASLVMSVTISEDDDEASTEEQRQKGRKLWGLVVCHHVTPRFVPFPLRYACEFLIQVFGIQLNKEVELEAQLREKNMLRTQTMLCDMLLRDAPVGIVTQSPNVMDLVKCDGAALYYRNQFWLLGITPTEAQIRDIAEWLLEYHNSTTGLSTDSLMEAAYPGASILGDAVCGMAAVKITCKDFLFWFRSHTAKEIKWGGAKHDPGDKDGDGRKMHPRSSFKAFLDVVKQRSLPWEDVEMDAI

SEQ ID NO: 9089 - protein, 921 aa, Oryza sativa Indica Group; identical to SEQ ID NO: 8973

SEQ ID NO: 9090 - protein, 392 aa, Eupomatia laurina
PYEVPMTAAGALQSYKLAAKAIARLQALPSGSLEKLIDTVVQEVFELTGYDRAMAYKFHDDDHGEVISEITKPGLEPYLGLHYPATDIPQAARFLFMKNKVRMICDCYAKPVNVYQDEKLAFDLTLCGSTLRAPHSCHLQYMENMGSIASLVMAVVINDGEDEDESTGSGLQPPLLKKKRLWGLVVCHNTTPRFVPFPLRYACEFLMQVFAIHVNKELELENQICEKNILRTQTLLCDMLLRDAPLGIVTQNPNIMDLVKCDGVALLYDNKFWRLGLTPTESQMRDISAWLSEYHMDSTGLSTDSLYDAGYPGALALGDVVCGMAAVRITSKDMLFWFRSHTAAEVRWGGAKHDPNDKDDGRRMHPRSSFKAFLEAVKTRSLPWKDYEMDAI

SEQ ID NO: 9091 - protein, 65 aa, Protea restionifolia
  misc_feature (47)..(47): Xaa can be any naturally occurring amino acid
MPGQWEYQVGPSVGIEAGDHIWCSRYLLERITEQAGVVLTLDPKPIXGDWNGAGCHTNYSTKSMR

SEQ ID NO: 9092 - protein, 172 aa, Physcomitrella patens subsp. patens
MAQYGRKPDTEETNCQVPEGPVRCTNNCGFFGSAVTMGMCSKCYRDFVLSQSRTSSAKIAGASPPVYETQEPVADRAQIQNSCLSSTQPEAAGASSGASASGQDPSRSRPNRCFSCKKRLGLTGFECRCGNLFCSAHRYSDKHSCTFDYKLAGRDSISKANPVVKADKINKI

SEQ ID NO: 9093 - protein, 393 aa, Eupomatia laurina
DLEPVNPADVPVTAAGALKSYKLAAKAISRLQSLPSGNISLLCDVLVRELSELTGYDRVMAYKFHEDEHGEVIAECRRLDLEPYLGLHYPATDIPQASRFLFMKNKVRMICDCSAPPVKVIQDKRLEQPLSLCGSTLRAPHGCHAQYMANMGTIASLVISVTINEDDDETPGEQQQKGRKLWGLVVCHHMSPRFVPFPLRYACEFLIQVFGIQLNKEVELAAQTREKHILRMQTMLCDMLLRDTPIGIVTQSPNVMDLVKCDGAALYYQNQFWLLRTTPTETQIRDIIGWLLEYHGDTTGLSTDSLTEAGYPGAADLGDDVCGMAAVKISSKDFLFWFRSHTAKEIMWGGAKHGPVDKDDDGRKMHPRSSFKAFLEVVKRQSLPWEDMEMDAI

SEQ ID NO: 9094 - protein, 471 aa, Oryza sativa; identical to SEQ ID NO: 6997

SEQ ID NO: 9095 - protein, 65 aa, Protea curvata
  misc_feature (44)..(44): Xaa can be any naturally occurring amino acid
MPGQWEYQVGPSVGIEAGDHIWCSRYLLERITEQAGVVLTLDPXPIEGDWNGAGCHTNYSTKSMR

SEQ ID NO: 9096 - protein, 481 aa, Glycine max
  misc_feature (261)..(261): Xaa can be any naturally occurring amino acid
PSSSLESSTAMTTATEKLSALKSAVAGLNEISESEKNGFISLVSRYLSGEAQHVEWSKIQTPTDEVVVPYDTLAPTPDGSSDVKNLLDKLVVLKLNGGLGTTMGCTGPKSVIEVRDGLTFLDLIVIQIENLNSKYGSNVPLLLMNSFNTHDDTQKIVEKYQNSNIEIHTFNQSQYPRLVAEDFLPLPSKGHTDKDGWYPPGHGDVFPSLLNSGKLDALLSQGKEYVFVANSDNLGAIVDLKILNHLIQNKNEYCMEVTPKXTLADVKGGTLISYEGRVQLLEIAQVPDEHVNEFKSIEKFKIFNTNNLWVNLNAVKRLVEADALKMEIIPNPKEVDGIKVLQLETAAGAAIRFFDKAIGINVPRSRFLPVKATSDLLLVQSDLYTLEDGFVIRNKARANPENPSIELGPEFKKVSNFLGRFKSIPSIVELDSLKVAGNVWFGAGVILKGKISIVANPGVKLEVPDGAVISDKEINGPEDLL

SEQ ID NO: 9097 - protein, 401 aa, Arabidopsis thaliana; identical to SEQ ID NO: 748

SEQ ID NO: 9098 - protein, 323 aa, Arabidopsis thaliana
MGVDYYKVLQVDRNAKDDDLKKAYRKLAMKWHPDKNPNNKKDAEAKFKQISEAYDVLSDPQKRAIYDQYGEEGLTSQAPPPGAGGGFSDGGASFRFNGRSADDIFSEFFGFTRPFGDSRGAGPSNGFRFEEDVFSSNVVPPRKAAPIERQLPCSLEDLYKGVSKKMKISRDVLDSSGRPTTVEEILTIEIKPGWKKGTKITFPEKGNEQRGIIPSDLVFIVDEKPHAVFKRDGNDLVMTQKIPLVEALTGYTAQVSTLDGRSVTVPINNVISPSYEEVVKGEGMPIPKDPSKKGNLRIKFTVKFPSRLTTEQKSGIKRMFSSS

SEQ ID NO: 9099 - protein, 976 aa, Phaseolus vulgaris
MEAFPRDQRGSLEVFNPSSSSYSNEKPVISPLRTQSTWKTWVDSRVEEQPEKQQRGGGPDEVTATSWMALKDSTPPPPSQTLAAVLGEPPAEVGNAAKRAAEWGLVLKTDTETGKPQGVAVQTSGGEEPGVKVTGGSRRDSGNSVRSSGESSDDGREYRGGIPRVSEDLRDALSAFQQTFVVSDATKPDYPIMYASAGFFKMTGYTSKEVIGRNCRFMQGADTDPDDVAKIREALQTGQTYCGRLLNYKKDGTPFWNLLTIAPIKDHDGRVLKFIGMQVEVSKHTEGNKENMLRPNGLPESLIRYDARQKEKANSSVSELLLAVRRPRALSESGGRPLIRKSASGDDDQDKPEKSSRRKSESVASFRRKSHAGDRTSMEKITEIPENKHKTSRRRSFMGFIRKNQSKFGSFNDEAVIEGSSESSDEDGERSGSFDGKVQRKEKRKGLDLATTLERIEKNFVITDPRLPDNPIIFASDSFLELTEYSREEILGRNCRFLQGPETDPATVRKIREAIDTQTDVTVQLINYTKTGKKFWNLFHLQPMRDQKGEVQYFIGVQLDGSQHVEPLHNRIAENTAKEGEKLVKDTAENVDDALRELPDANLKPEDLWMNHSKVVHPKPHRRDEAAWKAIQKILESGEQIGLNHFKPVKPLGSGDTGSVYLVELGETGQYFAMKAMEKGIMLNRNKVHRACTEREILDMLDHPFLPALYASFQTKTHVCLITDYCSGGELFLLLDRQPAKVLREDAVRFYAAEVVVALEYLHCQGIIYRDLKPENVLLQSSGHVSLTDFDLSCLTSCKPQLLVPSINEKKKAQKGHQPPIFMAEPMRASNSFVGTEEYIAPEIITGSGHSSAVDWWALGILLYEMFFGYTPFRGKTRQRTFTNILHKDLKFPKSKQVSFSAKQLMYRLLNRDPKSRLGSREGANEIKNHPFFRGVNWALVRCTKPPELDAPLFDTTRGEKEANFEDQVQEEMNVF

SEQ ID NO: 9100 - protein, 59 aa, Passiflora tripartita var. mollissima
MPGQWEYQVGPSVGIDAGDDIWCSRYILERITEQAGVILSLDPKPIEGDWNGAGCHTNY

SEQ ID NO: 9101 - protein, 987 aa, Phaseolus vulgaris
MEPSEKSPKKVSSVRSSFPRDPRGSLEVFNPNTSTAANSRVRSQPLWKSYTESEESRDEIAATSWMAINPAPQAEVECGAAAQRAAEWGLVLRTDTETGRPQGVAARNSGGEEPNVAKLAAAASSSRKNSQNSARTSGDSSSDGGGDVVGGIPRISEDVMGALSAFQQTFVVSDATKPDCPILYASAGFFKMTGYTSKEVIGRNCRFLQGAETDCGDVAKIREALEAGKIYCGRLLNYKKDGTPFWNLLTITPIKDEDGKVLKFIGMLVEVSKHTEGLKEKTLRPNGLPESLIRYDARQKEKATNSVSELLQIMKRPRALSESAGRPSITKSGFAEEEKQSLHEEEEEEEEEEEKEKAKRTLRRKSESEASLGRKSEGGKKISMQRISEVPENKLKNSQRRSFMGFRRKSESNDESMENDVIEDVSSDSEDGERPDSFDVDDKEKQREKRKGLDLATTLERIEKNFVITDPRLPDNPIIFASDSFLELTEYSREEILGRNCRFLQGPETDPATVRKIREAIDNQTEVTVQLINYTKSGKKFWNLFHLQPMRDQKGEVQYFIGVQLDGSQHVEPLQNGIAEDTAKEGEQMVKQTAENVDVAVRDLPDANMKPDDLWTNHSKAVHPKPHRKDNPAWKAIQKVLESGEQISLKHFRPIKPLGSGDTGSVHLVELRGTGQYFAMKAMDKGVMLNRNKVHRVCAEREILDQLDHPFLPALYASFQTKSHVCLITDYCPGGELFMLLDQQPTKVLKEDAARFYAAEVVIALEYLHCQGIIYRDLKPENVLIQSNGHVSLTDFDLSCLTSSKPQLIIPASNSKKKKKKKQRNQEVPVFMAEPMRASNSFVGTEEYIAPEIITGSGHTSAVDWWALGILVYEMFYGYTPFRGKTRQKTFANILHKDLKFPKSKPVSLQGKQLIYWLLQRDPKERLGSREGANEIKRHPFFKGVNWALVRCMKPPQLDAPLLPKTEEEKEAKDIDPGLEDLQTNVF

SEQ ID NO: 9102 - protein, 59 aa, Passiflora tripartita var. mollissima
WEYQVGPSVGIDAGDDIWCSRYILERITEQAGVILSLDPKPIEGDWNGAGCHTNYSTKS

SEQ ID NO: 9103 - protein, 297 aa, Zea mays
MATGSSLVPLLLIAVAVAQIVGSQAGSISIYWGQNGGEGTLADTCATGNYRFVNLAFLAAFGNGQPPVLNLAGHCDPTNGGCASLSGDIKSCQSSGVKVMLSIGGGAGSYYLSSAADAKDVATYLWNNFLGGQSSSRPLGDAVLDGIDFDIEGGTNQHWDDLAKYLKGYSNSGRRVYLTAAPQCPFPDAWVGGALNTGLFDYVWVQFYNNPPCQYSSGSTTDLADAWKQWLSIPAKQIFLGLPASPQAAGSGFIPADDLKSQVLPLIKSSGKYGGIMLWSKYYDDQDGYSSSVKSDV

SEQ ID NO: 9104 - protein, 1041 aa, Eucalyptus globulus
MEAGAGLVAGSHNRNELVVIHGHEESKPLKNLDGQVCEICGDEVGLTVDGDLFVACNECGFPVCRPAYEYERREGSQLCPQCKTRYKRLKGNPRVEGDDDEEDIDDLEHEFNIEDEQNKHKYMAEAMLHGKMSYGRGPEDDDNAQFPSVIAGGRSRPVSGEFPISSYGHGEMPSSLHKRVHPYPISEPGSERWDEKKEGRWKERMDDWKLQQGNLGPEPDDINDPDMAVIDEARQPLSRKVPIASSKINPYRMVIVARLAILAFFLRYRILNPVHDAFGLWLTSIICEIWFAFSWILDQFPKWFPIDRETYLDRLSLRYEREGEPNMLSPVDVFVSTVDPMKEPPLVTGNTVLSILAMDYPVDKISCYVSDDGASMLTFESLSETAEFARKWVPFCKKFSIEPRAPEMYFTLKIDYLKDKVQPTFVKERRAMKREYEEFKVRINALVAKAAKVPEGWIMQDGTPWPGNNTKDHPGMIQVFLGHSGGLDADGNELPRLVYVSREKRPGFQHHKKAGAMNALVRVSGVLTNAPFMLNLDCDHYINNSKAVREAMCFLMDPQIGRKVCYVQFPQRFDGIDTNDRYANRNTVFFDINMKGLDGIQGPVYVGTGCVFRRQALYGYEPPKGPKRPKMVSCDCCPCFGRRKKLPKYSKHSANGDAADLQGMDDDKELLMSEMNFEKKFGQSAIFVTSTLMEQGGVPPSSSPAALLKEAIHVISCGYEDKTEWGTELGWIYGSITEDIILTGFKMHCRGWRSIYCMPKRPAFKGSAPINLSDRLNQVLRWALGSVEIFFSHHSPVWYGYKGGKLKWFERFAYVNTAIYPFTSLPLLAYCTLPAICLLTDRFIMPAISTFASLFLIALFMSIQFATGILELRWSGVSIEEWWRNEQFWVIGGVSAHLFAVVQGLLKVLAGIDTNFTVTSKSSDDEDFGELYAFKWTTLLIPPTTILIINLVGVVAGISDAINNGYQAWGPLFGKLFFAFWVILHLYPFLKGLMGRQNRTPTIVVIWSVLLASIFSLLWVRIDPFVLKTKGPDTKKCGINC

SEQ ID NO: 9105 - protein, 154 aa, Triticum aestivum
MEGGGSNVRSSYYNVLGIRKDASVSDVRAAYRKLAMKWHPDRYARTPDVAGEAKRRFQQIQEAYSVLNDENKRSMYDAGLYDPHEDDDDDFCDFMQEMISMMNNVKGKGDSLEDLQRMFTDIVGGDSVSFACNDNSRNSKRPRVNISRSSAAMR

SEQ ID NO: 9106 - protein, 58 aa, Passiflora tripartita var. mollissima
WEYQVGPSVGIDAGDDIWCSRYILERITEQAGVILSLDPKPIEGDWNGAGCHTNYSTK

SEQ ID NO: 9107 - protein, 65 aa, Passiflora trisecta
GTNGEVMPGQWEYQVGPSVGIDAGDDIWCSRYILERITEQAGVVLSLDPKPIEGDWNGAGCHTNY

SEQ ID NO: 9108 - protein, 368 aa, Thottea siliquosa
  misc_feature (269)..(269): Xaa can be any naturally occurring amino acid
  misc_feature (363)..(363): Xaa can be any naturally occurring amino acid
KSYKLAAKAISRLQSLPSGNINLLCDVLVREVKDLTGYDRVMAYKFHEDEHGEVIAEARTSELQPYLGLHYPATDIPQASRFLFLKNKVRMICDCSAPPVKVIQDKQLAQPLCLGGSTLRAPHGCHAQYMVNMGSIASLVMSVTVSEDDGEAGRNLWGLVVCHHSSPRFVPFPLRYACEFLMQVFGIQINKEVELAAQMREKNILRTQTVLCDMLLRDAPMGILTKSPNVMDLVKCDGAALYYRKEFWLLGTTPTETQIRDISEWLLQXHSSTTGLSTDSLVEAGYPGAYDLGDAVCGMAAVRITNQDFLFWFRSHAAKEVKWGGAKHDPRDNDGDGKKLHPRSSFKAFLEVVKWRSTPWEDXEMDAI

SEQ ID NO: 9109 - protein, 292 aa, Ficus pumila var. awkeotsang
MILVFLLLQALASIKASHAGGIAIYWGQNGNEGTLSQTCATGKYSIVNIAFLNIFGNGQTPQINLAGHCNPALKTCTVISDGIRSCQSRGIKVMLSIGGGIGRYSLSSAMDAKNVADYLWNNFLGGKSLSRPLGDAVLDGIDFDIELGSTKYWDSLARYLKGYSNLERPVYLTAAPQCPFPDRFLGNALNTGLFDYVWVQFYNNPPCQYRSGAVDGLLNSWSKWTTSISAGRIFLGLPAAPQAAGSGYIPPNVLTSEILPAIQKSPKYGGVMLWSKYYDDKNGYSSIIFQSV

SEQ ID NO: 9110 - protein, 565 aa, Physcomitrella patens subsp. patens
MDLENLEGESKSNEGDEAFESVPGPPTNPMVSALLTDMYQISMAYAYWRAGKHKDRAVFDLLHRKNPFGGEYTVFAGLEECIRFAANFKFTDDDIEYLKDIMPPKCEDEFYTFLKSVDCSEVEIYAIPEGSVVFPRVPLIRVEGPLLVTQLLETTFLTLVNYASLVATNAARHRRVAGKDKTLLEFGLRRAQGPDGGISASKYCYLGGFDATSNVDAGRRFGIPVRGTHSHAFVSSFTSFDEITERSLEYAKGGSKCEDFVRLTQLWLSRMQESSRLREFFLETNHSELAAFTSYALAFPTAFQALVDTYDVIRSGVPNFCAVALALHDLGYKALGIRLDSGDLSYFSIETRRIFRIIEEEFNVSGFGKLVIVASSDINEGTLDALNKQTHEIDAFGIGTHLVTCFSQPALGCVYKLVEIRGQPRMKLSEDLTKVTIPCKKQPFRLYGKEGVALVDLLIGESEPNPKPGERILCRHPFSESKRAYVVPTRVEPLYKCYWNGLRGKRERLPSLVELRKRCSQQLDAMRTDHMRSLNPTPYKVSVSVKLYDFIHFLWLNEAPVGELQ

SEQ ID NO: 9111 - protein, 1092 aa, Adiantum capillus-veneris
MSTSSSMNDQRRDAYSLRAPPNEGKLHPLARDSRGSLEVFNPGNPSSLTAASIGAGMQYTPSWQQQQPPEDENYDLPLNQREKEENIYNQTHGGPERERGPDKGTSPSDHKRGMSTGTSPPTRSKYSEIFTSHDTIDKEGKFQAYQTNEESTHDWLSSTPAGQGPMLGGGFGGGEGARGSYLLGTREHPKARCDSLAERAAGWGLVLKTDGDSGRVDGVRTRTSEEEREFRRLSEERRSLNSSTVRTSDDSGFTSDTSNASRIPRVSKDVLQALEGFQQTFVIADGTKPDLPIMYASAGFFKMTGYTSSEVIGRNCRFLQGKETDPEEIDRIRECISKGSGYCGRLLNYKKDGSAFWNLLTISPIKDVDGSVLKYIGMQVEVSQFTEGTKENAMRPNGLSESLIKYDARQKERASFQVTELVEAIKDPKQVGDDKKTSISLGVVRPVAPSGPRKGPDLRELLTAQQYTPRSATSVQPKGSNLTEPGSHRESISKRNRSSGFFSFLGLDKLAGKGPGNQHDAAEFIEPEILMTKDEDSSEASFELDKARLKEIRRGIDLATTLERIEKNFVITDPRLPDNPIIFASDNFLELTEYSREEILGRNCRFLQGPDTNRETVKLIRDAIDNEKEVTVQLLNYTKTGRTFWNLFHLQPMRDHKGELQYFTGVQLDGTEYLEPLTKRLSQQIASEGAKIIRETAANVNEALRELPDANLKVEDLWRIHSRLVLPKPHKLNHDSWGVIRKIHASGEKVKLKHFRPLRPLGYGDTGSVHLVELRGTGKLFAMKAMEKNVMVKRNKVHRVCAEREILGMMDHPFLPTLYASFETQTHVCLITDFCAGGELFLLLERQPTKIFREETARFYTSEVVVALEYLHCQGVIYRDLKPENILLQQDGHVMLSDFDLSYLSSSNPRLVVPPRLHKKRSKRKNFPPPIFRAEPIGACNSFVGTEEYIAPEVITGSGHNSSVDWWALGILMYEMLYGRTPFRGKTRQKTFGNILHKDLVFPRRIPTSLAARQLINGLLQKDPENRLGSQGGANEIKGHPFFQGVNWTLIRCMRPPTFDAPVCFAGSELDVEGDEALDWDDVEASNPIEYF

SEQ ID NO: 9112 - protein, 273 aa, Bradyrhizobium yuanmingense
LPLWGFDGSSTQQAEGHSSDCVLKPVAVFPDGARTNGVLVMCEVMMPDGKTPHPSNKRATILDDSGAWFGFEQEYFFYKDGRPLGFPTAGYPAPQGPYYTGVGYSNVGDVARKIVEEHLDLCLAAGINHEGINAEVAKGQWEFQIFGKGSKTAADQMWMARYLMLRLTEKYGIDIEFHCKPLGDTDWNGSGMHANFSTAYMREVGGKEYFEALMAAFEKNLMDHIAVYGPDNDKRLTGKHETAPWNKFSYGVADRGASIRVPHSFVNNGYKGY

SEQ ID NO: 9113 - protein, 386 aa, Asarum europaeum
DLEPVNPSDVPVTAAGALKSYKLAAKAISKLQSLPSGNISLLCDVVVREVSDLTGYDRVMAYKFHEDEHGEVIAECKISDLEPYHGLHFPATDIPQASRFLFMKNKVRMICDCSAPPVKVIQDKRLAQPISLGGSTLRAPHGCHAQYMANMGSIASLVLSVTISEDDDETGRKLWGLVVCHHTSPRFIPFPLRYACEFLIQVFGIQLNKEVELAAQMRETHILRTQTMLCDMLLRDAPMTIMTQSPNVMDLVRCDGAALYYRKESWLLGVTPTKAQIQDLAEWLLKYHNGTTGLSTDSLVEAGYPRAHNLGDMVCGMAAVRITSQDFLFWFRSHTGKEVKWGGAKHDPADKDDDRGKMHPRSSFKVFMEVMKRRSLPWEDVEMDAI

SEQ ID NO: 9114 - protein, 386 aa, Asarum speciosum
DLEPVNPSDVPVTAAGALKSYKLAAKAISKLQSLPSGNISLLCDVVVREVSDLTGYDRVMAYKFHEDEHGEVIAECKISDLEPYHGLHFPATDIPQASRFLFMKNKVRMICDCSVPPVKVIQDKRLAQPISLGGSTLRAPHGCHAQYMANMGSVASLVLSVTISEDDDETGRKLWGLVVCHHTSPRFIPFPLRYACGFLIQVFGIQLNKEVELAAQMRETHILRTQTMLCDMLLRDAPMTIVTQSPNVMDLVSCDGAALYYRKESWLLGVTPTKAQIQDLAEWLLKYHNGTTGLSTDSLVEAGYPRAHNLGNMVCGMAAVRITSQDFLFWFRSHTGKEVKWGGAKHDPADKDDDRGKMHPRTSFKAFMEVVKRRSLPWEDIEMDAI

SEQ ID NO: 9115 - protein, 452 aa, Diospyros kaki; identical to SEQ ID NO: 5544

SEQ ID NO: 9116 - protein, 386 aa, Piper magnificum
  misc_feature (381)..(381): Xaa can be any naturally occurring amino acid
DLEPVNPADVPVTAAGALKSYKLAAKAISRLQSLPSGDIALMCDVLVREVSDLTGYDRVMAYKFHEDEHGEVIAECKRSDLEPYLGLHYPATDIPQASRFLFMKNKVRMICDCLAPPVKVVQDKRLGQPISLAGSTLRAPHGCHSQYMSNMGSIASLVMSVMVSEGDEDSNRKLWGLVVCHHTSPRFIPFPLRYACEFLIQVFAIQLSKEVELAAQMKEKHVLRMQTVLCDMLLRDAPMGIMTQSPNVMDLVKCDGAALYYRSQCWLLGTTPTENKIRDIAEWLQQYHGSSTGLSTDSLVEAGYPGGHELGDAVCGMAAITITSRDFLFWFRSHTAKEVKWGGEKHDPKTKDAFTSKMNPRTSFKAFLEVVKRRSIPWEDXEMDAI

SEQ ID NO: 9117 - protein, 396 aa, Hedycarya angustifolia
DLEPVNPADVPVTAAGALKSYKLAAKAISKLQSLPSGNISVLCDVLVREVSELTGYDRVMAYKFHDDEHGEVIAECRRSNLEPYLGLHYPATDIPQASRFLFMKNKVRMICDCSAPPVKVIQDKSLAQPLSLGGSTLRAPHGCHAQYMANMGSIASLVMSVTINEDDDETSSGSEQQQQKGRKLWGLVVCHHTSPRFVPFPLRYACEFLIQVFGIQLNKEVELAAQMREKHILRTQTVLCDMLLLDAPVGIITKTPNVMDLVKCDGAALYYLNQFWLLGTTPTEAQIRDIVSWLQEYHNGSTGLSTDSLMEANYPGAFVLGDAVCGMAAVRITSKDFLFWFRSHTAKEIKWGGAKHNIVDKDDDGRKMHPRSSFKAFLEVVKRRSLPWEDIEMDAI

SEQ ID NO: 9118 - protein, 398 aa, Hernandia lychnifera
DFEPVKPYEVPMTAAGALQSYKLAAKAIARLQSLSSGSMQKLVDTVVEEVYELTGYDRVMAYKFHDDDHGEVISEIKKPDLEPYLGLHYPATDIPQASRFLFMKNKVRMICDCNMKPVKVYLDEKLTYDLTLCGSTLRAPHSCHLQYMANMGSIASLVMAVVINEGEEERIAQKLHNHHHSQKRKRLWGLVVCHHTTPRFVPFPLRYACEFLMQVVAIHVNKEFELENQIQEKNILRTQTLLCDMLLRDAPLGIVTQSPNIMDLVKCDGAALLYGNKIWKLGTTPTELQIRDISLWLSEYHMDSTGLSTDSLYDAGYPGALSLGDAICGMAAVTITPKDFLFWFRSHTAAKVRWGGAKHDPTDKDDGRTMHPRSSFKAFLEVVKTRSLPWKDYEMDAI

SEQ ID NO: 9119 - protein, 603 aa, Zea mays
MGSSGGGGTARPHAALLPLLALGSSIPLQSPSQEHATRATGRKGKNMAAANGDACRSVGGVPRPTNPMVTPLLTDLYQFTMAYAYWKAGKHLDRAVFDLYFRKNPFGGEFTIFGGLEECIRFIANFKFTEEEIKFLRSVMPACEDDFFEYLRSIDCSDVEVYAIPEGYAVFPKVPLMRIEGPVAVVQLLETPFLSLVNYASLVTTNAARHRLVAGKSKNLLEFGLRRAQGPDGGISASRYCYMGGFDATSNVAAGRLFGIPIRGTHSHAFVSSFMGLDEITDKTLTSSDGSNTCEDFISLVQNWLIRIQDSSSLHGTFGETSQSELAAFTSYALAFPNSFLALVDTYDVMRSGVPNFCAVALALNDMGYKAVGIRLDSGDLAYLSVEARKFFHAVEKEFVVVGFGKTSITASNDLNEETIDALNKQGHEVDAFGIGTYLVTCYAQAALGCVFKLVEINKQPRIKLSEDVMKVSIPCKKKCYRLYGKEGYPLVDIMTGEDEPGPKIGERLLCRHPFNESKRAYVVPQHVEELLKCYWPGNSSNSREELPSIHEIRTRCIHHLDRMRPDHMRRLNPTPYKVSVSAKLYDFIHFLWLNEAPVGELQ

SEQ ID NO: 9120 - protein, 345 aa, Hernandia lychnifera
DLEPVNPAEVPVTAAGALKSYKLAAKAISLLLSLPSGNISVLCDVLVCEVSDLTGYDRVMAYKFHEDEHGEVIAECCRPDLEPYLGLHYPATDIPQASRFLFMKNKVRMICDCSAFPVKVVQDKRLAQPLSLCGSTLRAAHGCHAQYMANMDSVASLMMSVTIIEDDDEVGSDPQQQQKGRKLWGLVVCHHTSPRFVPLPLRYACELLIQVFGMQLNKEVELANQMREKHILRMQAVPCDMLLRDTPVGIMTRSPNIMDLVKCDGAALYYHNQFWLLGINPTEAQIRDIARWLLERHNGSTGLSTDSLMEAGYPGASFLGNAVCGMAAVRISSNDFLSWFRSHTA

SEQ ID NO: 9121 - protein, 392 aa, Houttuynia cordata
  misc_feature (248)..(248): Xaa can be any naturally occurring amino acid
DLEPVNPSDVPVTAAGALKSYKLAARAISRLQSLPSGDISLLCDVLVREVSDLTGYDRVMAYKFHEDEHGEVVAECKRADLEPYLGLHYPATDIPPASRFLFMKNKMRMICDCLAQPVKVIQDKRLPQPLSLAGSTLRAPHGCHAQYMSNMGSIASLVMSVVVSEGDDDSNNGEKTGRKLWGLVVCHHTSPRFIPFPLRYACEFLIQVFAIQLSKEVELAAQMKEKHILRMQTVLCDMLLRDAPMGIXTQSPNVMDLVKCDGAALYYRCQCWLLGTTPTENQIRDLAEWLLQYHNSSTGLSTDSLVDAGYPGAHELGDAVCGMAAIRITSRDFLIWFRSHTAKEIKWGGEKHDPSDKDAFESKMNPRTSFKTFLEVVKRRSLPWEDVEMDAI

SEQ ID NO: 9122 - protein, 414 aa, Idiospermum australiense
SGKPFYAIIHRVTGSLIIDFEPVKPYEAPMTAAGALQSYKLAAKAITRLQSLPSGSMERLVDTVVQEVFELTGYDRVMAYKFHEDDHGEVISEITKPGLEPYLGLHYPATDIPQAARFLFMKNKVRMICDCHARPVKVYQDEKLTFDLTLCGSTLRAPHSCHLQYMENMDSIASLVMAVVINEGEEDDEVESAQQQQQKRKRLWGLVVCHNTTPRFVPFPLRYACEFLMQVFAIHVSKEFELENQLREKNILRTQTLLCDMLLRDAPLGIVTQSPNIMDLVKCDGAALLYGSKIWRLGLTPTDSQIQDIAMWLSEYHMDSTGLSTDSLYDAGYPKALSIDDVVCGMAAVRITAKDMLFWFRSHAAAEVRWGGAKHDPSDKDDGRRMHPRSSFKAFLEVVKTRSLPWKDNEMDAI

SEQ ID NO: 9123 - protein, 316 aa, Oryza sativa Japonica Group; identical to SEQ ID NO: 9011

SEQ ID NO: 9124 - protein, 395 aa, Idiospermum australiense
DLEPVNPADVLVTAAGGLKSYKLAAKAISKLQSLPSGNISLLCDVLVREVSELTGYDRVMAYKFHEDEHGEVIAECRRSDLEPYIGLHYPATDIPQASRFLFRKNKVRMICDCLAPPVKVIQDKRLAQPLSLCGSTLRAPHGCHAQYMANMNSIASLVISVTVHEDDNETGSEQQQQPKGRKLWGLVVCHHTSPRFVPFPLRYACEFLIQVFGIQLNKEIELAAQMNEKHILRTQTVLCDMLQRNAPVGIITQTPNVMDLVKCDGAALYYRNQFWLLGTTPTEAQIRDIVEWLMEYHSSSTGLSTDSLMEAGYQGAAILGDAVCGMAAIRITSKDFLFWFRSHTAKEIKWGGAKHDPVDQDDDGRKMHPRSSFKAFLEVVKRRSLPWEDVEMDAI

SEQ ID NO: 9125 - protein, 390 aa, Lactoris fernandeziana
PYEVPMTAGALQSYKLAAKAISRLQSLPSGSMERLVDTVVQEVFELTGYDRIMAYKFHEDDHGEVISEVTKPDLEPYLGLHYPATDIPQASRFLFMKNKVRMICDCRAKPVKVYQDEKLSFDLTLCGSTLKAPHSCHLQYMENMGFIASLVMAVVVNEGEEEVDSQESSQQQAPKRKRLWGLVVCHNTTPRFVPFPLRYACEFLMQVFAIHVNKEFELENQILEKNILRTQTLLCDMLFRDAPMGIVTQSPNIMDLVKCDGAVLLYQNKVYRLGLAPTESQIHDIAQWLSEYHKDSTGLSTDSFHDAGYTRARSLGDIVCGMAAVRINSGDMLFWFRSHTAAEVRWGGAKHDPDEKDDGRRMHPRSSFKAFLEVVKYRSFPWKDYEMDAI

SEQ ID NO: 9126 - protein, 206 aa, Zea mays
MPHLAATPPTSSAAAVPAAGRIAFRRPWNTPQPEALRLRLRLRARGVRREDGGGVRTEEQEQTAPRTFYDLLGISADGSPDDVRASYRRLALKYHPDVSPPGAAAENTRRFIEVQEAYETLSDPSRRSSYDRALARGVCRLAFSGRRSQSHHAYYHHQEQGERSGWRRSWEDQIAELKRRSVAKDSEENLSWGARMRRRAEASAAE

SEQ ID NO: 9127 - protein, 341 aa, Lactoris fernandeziana
DLEPVNPSDVPVTAAGALKSYKLAAKAISRLQSLPSGNIPLLCDVLVREVSDLTGYDRVMAYKFHEDEHGEVIAECKRSDLEPYLGLHYPATDIPQASRFLFTKNKVRMICDCSARPVKVIQDKRLAQPLSLGGSTLRAPHGCHAQYMLNMGSVASLVMSVTISEDDDDSASEQKGRKLWGLVVCHHTTPRFIPFPLRYACEFLIQVFGIQLNKEVELAAQVREKHILRTQTVLCDMLLRNAPVGIMTKSPNVMDLVNCDGAALYYRNRCWFLGTTPTESQIRDLAEWLLQYHNSTTGLSTDSLVEAGYPCAHGFGEAVCGMAAVKITSRDFLFWFRSHTA

SEQ ID NO: 9128 - protein, 393 aa, Lemna gibba
DLEPVNPSDVPVTAAGALKSYKLAAKAISRLQSLPSGNISLLCDVLVREVKDLTGYDRVMAYKFHEDEHGEVVSECRGSDLEPYLGLHYPATDIPQASRFLFLKNKVRMICDCSAQPVRIIQDKRLSQPLSLCGSTLRAPHGCHAQYMKNMGSIASLVMSVTINDEGVDHGGEEQQKSRKLWGLVVCHHSSPRFIPFPLRYACEFLMQVFAIQVNKEVEIAAQKREKHILKTQTFFCDMLLREAPVGIFTQSPNVMDLVKCDGAALYYRNQFRLLGVTPTEAQIKDLCDWLMDWHNNTTGLSTDSLSEAGFPGASSLGDAVCGMAAIKITGKDFVFWFRSHVAKEIKWGGAKDESVGRSEEGRKLYPRSSFQAFLEIVKRRSLPWEDVEMDAI

SEQ ID NO: 9129 - protein, 65 aa, Protea pityphylla
MPGQWEYQVGSSVGIEAGDHIWCSRYLLERITEQAGVVLTLDPKPIEGDWNGAGCHTNYSTKSMR

SEQ ID NO: 9130 - protein, 392 aa, Stigmaphyllon puberum
DLEPVNPVDVPVTAAGALKSYKLAAKAISRLQSLPSGNISLLCDVLVKEVRDLTGYDRVVVYKFHEDEHGEVVSECRISDLESYLGLHYPATDIPQASRFLFMKNKVRMICDCLAPPVKVIQDERLPQPLSFCGSTLRSPHGCHAQYMTNMGTIASLVMSVTINEDDDTMDGDQQQMTRKLWGLVVCHHNSPQFVPFPLRYACEFLIQVFGVQINKEVELAAQVREKHILQIQTMLCDMLLRDAPVAIITQSPNVMDLVKCDGAALYFKNKIWLLGVTPSKEQIRDIAQWLLEYHSGNTGLSTDSLMEAGYPGASALGDAVCGMAAVSITSRDFLFWFRSHTAKAVKWGGAKHDPDDKDDLRKMHPRSSFKAFLEVVKWRSMPWEDVEMDAI

SEQ ID NO: 9131 - protein, 72 aa, Calopogonium caeruleum
WEYQVGPSVGIEGGDHIWASRYILERITEQAGVVLSLDPKPIEGDWNGAGCHTNYSTKSMREDGGYELIKKA

SEQ ID NO: 9132 - protein, 559 aa, Arabidopsis thaliana; identical to SEQ ID NO: 8750

SEQ ID NO: 9133 - protein, 392 aa, Mascagnia dipholiphylla
DLEPVNPADVPVTAAGALKSYKLAAKAISRLQSLPSGNISLLCDVLVKEVRDLTGYDRVMVYKFHEDEHGEVVSECRRSDWESYLGLHYPATDIPQASRFLFMKNKVRMICDCLAPPVKVIQDERLPQPLSLCGSTLRSPHGCHAQYMTNMGTIASLVMSVTINEDDDMMDGDQQQMTRKLWGLVVCHHAGPRFVPFPLRYACEFLIQVFGVQIHKEVELAAQVREKHILQIQTMLCDMLLRDAPVVIITQSPNVMGLVKCDGAALYFKNKIWLLGVTPAEEQIRDIAEWLLKYHSGNTGLSTDSLMEAGYPGASVLGDAVCGMAAVSITSRDFLFRFRSHTAKEIKWGGAKHDPDDKDDGRKMHPRSSFKAFLEVVKWRSTPWEDIEMDAI

SEQ ID NO: 9134 - protein, 334 aa, Glycine max
  misc_feature (134)..(134): Xaa can be any naturally occurring amino acid
MASERQALMLILLTTFFFTIKPSQASTTGGITIYWGQNIDDGTLTSTCDTGNFEIVNLAFLNAFGCGITPSWNFAGHCGDWNPCSILEPQIQYCQQKGVKVFLSLGGAKGTYSLCSPEDAKEVANYLYQNFLSXGKPGPLGSVTLEGIDFDIELGSNLYWGDLAKELDALRHQNDHYFYLSAAPQCFMPDYHLDNAIKTGLFDHVNVQFYNNPPCQYSPGNTQLLFNSWDDWTSNVLPNNSVFFGLPASPDAAPSGGYIPPQVLISEVLPYVKQASNYGGVMLWDRYHDVLNYHSDQIKDYVPKYAMRFVTAVSDAIYESVSARTHRILQKKPY

SEQ ID NO: 9135 - protein, 72 aa, Calopogonium mucunoides
WEYQVGPSVGIEGGDHIWASRYILERITEQAGVVLALDPKPIEGDWNGAGCHTNYSTKSMREDGGFEVIKKA

SEQ ID NO: 9136 - protein, 317 aa, Zea mays
MPGMDPGGGGSSRYFHQLLRPQQQQPSPLSPNSHVKMEHHRMSPDKSPVVGEADAGGSGAGGDQPSSSAMVPVEGGGSGTGTPTRRPRGRPAGSKNKPKPPIIVTRDSPNALHSHVLEVAAGADVVDCVAEFARRRGRGVCVLSGGGAVANVALRQPGASPPGSMVATLRGRLEILSLTGTVLPPPAPPGASGLTVFLSGGQGQVVGGSVVGPLVAAGPVVLMAASFANAVYERLPLEGEEEEDETAAGAAGAEPQDQVAQSSAGPPGQQPTASQSSGVTGGDAGMSLYNLAGNVGAYQLPGDSLGGWSGGGVRPPF

SEQ ID NO: 9137 - protein, 463 aa, Oryza sativa; identical to SEQ ID NO: 8264

SEQ ID NO: 9138 - protein, 65 aa, Protea canaliculata
  misc_feature (5)..(5): Xaa can be any naturally occurring amino acid
  misc_feature (24)..(24): Xaa can be any naturally occurring amino acid
MPGQXEYQVGPIVGIEAGDHIWGXRYLLERITEQAGVVLTLDPKPIEGDWNGAGCHTNYSTKSMR

SEQ ID NO: 9139 - protein, 55 aa, Passiflora tryphostemmatoides
  misc_feature (52)..(52): Xaa can be any naturally occurring amino acid
WEYQVGPSVGIEAGDHIWGSRYILERITEQAGVVLTLDPKPIEGDWNGAGCXTNY

SEQ ID NO: 9140 - protein, 72 aa, Bituminaria bituminosa
WEYQVGPSVGIEAGDHIWASRYILERITEQAGVVLTLDPKPIEGDWNGAGCHTNYSTKSMREDGGFEVIKKA

SEQ ID NO: 9141 - protein, 340 aa, Medicago truncatula
MGVDYYKILKVDKNATEEELKKAYRKLAMKWHPDKNPSNKKDAEAKFKEISEAYEVLSDPQKKAIYDQYGEEGLKGQVPPPQDATFFQSGDGPTTFRFNPRNANDIFAEFFGFSSPFGGMGAGGNGMRGGARSFGGMFGGDDHMFSSFDEGRPMRQQGPRKAAAIENRLPCSLEELYKGTTKKMKISREIADASGKTMPVEEILTIEVKPGWKKGTKITFPEKGNEQPNVIPADLIFVIDEKPHGVFTRDGNDLVATQKISLAEALTGYTVRLTTLDGRVLNVPINNVIHPSYEEVIPKEGMPIPKDPSKKGNLRIKFNIKFPARLTSEQKIGIKKLLAP

SEQ ID NO: 9142 - protein, 65 aa, Passiflora umbilicata
GTNGEVMPGQWEYQVGPSVGIEAGDHIWCSRYILERITEQAGVVLTLDPKPIEGDWNGAGCHTNY

SEQ ID NO: 9143 - protein, 148 aa, Triticum aestivum
AYLGDTIEQVCTKKQAGTGPDFPGYRRPTRPAKRRFQRIQEAYSVLSDKGKRAMYDAGLFDPLDDDDQDFSDFMQEMLVMMDSVKNEKPDTLEDLQKMLDDIVNGDGGSRATAGAGGSGGGGGGCGGRVPPEANRRTRVAPYPQPSRR

SEQ ID NO: 9144 - protein, 341 aa, Medicago truncatula
MGLDYYEILEVDKNATDDELKKAYRKLAMKWHPDKNPDNKNDAETKFKLISEAYEVLSDPQKRAIYDQYGESNLKNGMPTAGDNAAPYFQTHDGRRFRFNPRSADGIFAEVFGFSSPYGGMGMRGGGCRGMGMRGQSWVSRSFGDIFGKDVFGESRQTSQAPRRKAPPIENKLPCSLEELYKGTTKKMKISREIAYASGKTVPVEEILTIEIQPGWKKGTKITFPEKGNEQPNVIAADIVFVIDEKPHNVFTRQGNDLVMTQKILLAEGEALSRSYTFQLTTLDGRGLTIAIDNGIDPTYEEVIAGEGMPISKNPSQRGNLRIKFDITFPSMVDAETESQN

SEQ ID NO: 9145 - protein, 166 aa, Glycine max
  misc_feature (56)..(57): Xaa can be any naturally occurring amino acid
  misc_feature (129)..(131): Xaa can be any naturally occurring amino acid
MANLATSLSFFTLALLALASGSNAGSIAIYWGQNGNEGTLAETCATGNYEYAILAXXPTFGNGQTPMINLAGHCDPYSNECTKLSSDIKSCQAKGIKVLLSLGGGAGSYFLASPQDARQVATYLWNNFXXXSSPSRPLGPAVLDGIDFDIEGGSNLYWDDLARYLK

SEQ ID NO: 9146 - protein, 302 aa, Arabidopsis thaliana
MTNMTLRKHVIYFLFFISCSLSKPSDASRGGIAIYWGQNGNEGNLSATCATGRYAYVNVAFLVKFGNGQTPELNLAGHCNPAANTCTHFGSQVKDCQSRGIKVMLSLGGGIGNYSIGSREDAKVIADYLWNNFLGGKSSSRPLGDAVLDGIDFNIELGSPQHWDDLARTLSKFSHRGRKIYLTGAPQCPFPDRLMGSALNTKRFDYVWIQFYNNPPCSYSSGNTQNLFDSWNKWTTSIAAQKFFLGLPAAPEAAGSGYIPPDVLTSQILPTLKKSRKYGGVMLWSKFWDDKNGYSSSIVASV

SEQ ID NO: 9147 - protein, 349 aa, Arabidopsis thaliana
  misc_feature (272)..(272): Xaa can be any naturally occurring amino acid
MGVDYYKVLQVDRSANDDDLKKAYRKLAMKWHPDKNPNNKKDAEAKFKQISEAYDVLSDPQKRAVYDQYGEEGLKGNVPPPNAATSGASYFSTGDGSSSFRFNPRSADDIFAEFFGFSTPFGGGGGGTGGQRFASRMFGDDMYASFGEGAGGGGAMHHHHHHHHHAAARKVAPIENKLPCSLEDLYKGTTKKMKISREIVDVSGKAMQVEEILTIGVKPGWKKGTKITFPEKGNEHPGVIPADLVFIIDEKPHPVFTREGNDLIVTQKVSLXADALTGYTANIATLDGRTLTIPITNVIHPEYEEVVPKEGMPLQKDQTKKGNLRIKFNIKFPARLTAEQKAGFKKLIG

SEQ ID NO: 9148 - protein, 48 aa, Passiflora vespertilio
SVGIEAGDDIWWSRYIIERITEQVGVVVTLDPKPIEGDWNGAGCHTNY

SEQ ID NO: 9149 - protein, 288 aa, Bradyrhizobium liaoningense
FPTLEQLPLWGFDGSSTQQAEGHSSDCVLKPVAVFPDAARTNGVLVMCEVMMPDGKTPHPSNKRATILDDAGAWFGFEQEYFFYKDGRPLGFPASGYPAPQGPYYTGVGYSNVGDVARKIVEEHLDLCLAAGINHEGINAEVAKGQWEFQIFGKGSKKAADEMWMARYLMLRLTEKYGIDIEFHCKPLGDTDWNGSGMHANFSTEYMRTVGGKEYFEALMAAFDKNLMDHIAVYGPDNDKRLTGKHETAPWNKFSYGVADRGASIRVPHSFVNNGYKGYLEDRRPNSQ

SEQ ID NO: 9150 - protein, 430 aa, Arabidopsis thaliana; identical to SEQ ID NO: 799

SEQ ID NO: 9151 - protein, 302 aa, Arabidopsis thaliana
MTNMTLRKHVIYFLFFISCSLSKPSDASRGGIAIYWGQNGNAGNLSATCATGRYAYVNVAFLVKFGNGQTPELNLAGHCNPAANTCTHFGSQVKDCQSRGIKVMLSLGGGIGNYSIGSREDAKVIADYLWNNFLGGKSSSRPLGDAVLDGIDFNIELGSPQHWDDLARTLSKFSHRGRKIYLTGAPQCPFPDRLMGSALNTKRFDYVWIQFYNNPPCSYSSGNTQNLFDSWNKWTTSIAAQKFFLGLPAAPEAAGSGYIPPDVLTSQILPTLKKSRKYGGVMLWSKFWDDKNGYSSSILASV

SEQ ID NO: 9152 - protein, 280 aa, Bradyrhizobium liaoningense
GSELEQLPLWGFDGSSTQQAEGHSSDCVLKPVAVFPDAARTNGVLVMCEVMMPDGKTPHPSNKRATILDDAGAWFGFEQEYFFYKDGRPLGFPASGYPAPQGPYYTGVGYSNVGDVARKIVEEHLDLCLAAGINHEGINAEVAKGQWEFQIFGKGSKKAADEMWMARYLMLRLTEKYGIDIEFHCKPLGDTDWNGSGMHANFSTEYMRTVGGKEYFEALMAAFDKNLMDHIAVYGPDNDKRLTGKHETAPWNKFSYGVADRGASIRVPHSFVNNGYKGYL

SEQ ID NO: 9153 - protein, 1106 aa, Ustilago maydis 521
MGASQSSHKPGVAGGTATDANGDPAFVDYYELLHIEQTATSDEIRKAYRKLALKHHPDKNPDNVEQANKIFHKLQEAYEILSDDTERAWYDQNRERLLNGEGPDLDDDDVFEAFRSGAAEAPQPTSSARGLTAKALLRFFDPSLAKDLTEGDNGFYATYRRLFERLAQEERIAAPYPGEEKDSTLPSADAYPSFGYSHTPYSNAKGQQAAIHQTPVKDFYNVFMNFQSRKSFGWFDKYDVRDAPDRRVKRLMEKENKRARDAARREYNDAVRSLAAFIRKRDPRYKKFQAELNSTGPGSTADLARRKAEAEKIRLEREARAQSYQAQSWQQPDYHFSDEDDEEEEDVNDDDADSDFESVQKDGSRSLAGQDGALDSLDHSYAAWDCVACDRVFQSEAAFRNHERSAKHNKAVQKLQREMQDEEDELGLGLDADDIAIDASLADMHLDGSMAQTKADTNVSAGFSIPAFASEGAAGKSKKQKKQAKKRRQMEEVAGRTLDEDGFVVQDLNRKQAKPRASEEASPANEPSNDTGANKDTLVIHVVDDDDQLDGDAETNVCDQVGAGDEESVPPKPSASQKHDAAKSKTGPDQLQATDKGALSGTKDDPWAGLEDPYIPKSAFSVSLPPPLPPLTRPAGSFDIFGYGSLIFKPPPYVIGATPCYIKGFVRRFAQHSVDHRGTHERPGRVVTLVKASDWHPLRRAAKQYLDYREKNGYSAMYVPLYTKSKEQDGAQEETVLKNALVYVGLPSNPAFVGPQSLDALAQRIYTCAGPSGPNAEYLLKLANAVRELAPQSVDQHLFSLEKRLLLLQEQKVDPAMLIAQEAKQPSCKKVTTDSIEDEEDQQDARGWKGKKGSKDTDSTRLQDDGVTDASVFSPRTIRYTKLRIYPLPLHFVWLSVQRCLQAEWQNRENSAKLMMCGCCPYRSSDKVRSEQMPALAECAHSVTDGQETKQPIRSRWKQITNREYTHRKHTDTEFKVQTAQDDECLRGSTFRGLFLEIGACVISLEWKDNHHLEAVAHNLEATANVDVAEVTSGARRRALYLDMLDACTAQSQLNCEMFLNSTCTTTKLARKAKALNALSSGSTATSLGTDDSRFEAKQDDDAGQA

SEQ ID NO: 9154 - protein, 391 aa, Magnolia x soulangeana
DFEPVKPYEVPMTAAGALQSYKLAAKAIARLQALSSGSMEKLVDTVVQEVFELTGYDRVMAYKFHEDDHGEVISEITKPGLEPYLGLHYPATDIPQAARFLFMKNKVRMICDCNAKPVKVYQDEKLTFDLTLCGSTLRAPHSCHSQYMENMSSIASLVMAVVINEGVDEEEGMEPAQQEQQQLKRKRLWGLVVCHNTTPRFVPFPLRYACEFLMQVFAIHVNKELELENQIQEKNILRTQTLLCDMLLRDALVGIRTQNPNIMDLVKCDGAALFYNNKIWRLGLTPTDSQMRDISVWLSEYHMDSTGLSTDSLYDAGYPGALALGDVVCGMAAVRINPKDMLFWFRSHTAAEVKWGGAKHDPSDKDDGRRMHPRSSFKAFLEVVKTKSLPW

SEQ ID NO: 9155 - protein, 194 aa, Rhizobium leguminosarum
DVFPTLEQLPLWGFDGSSTQQAEGRSSDCVLKPVAIYPDPARTNGALVMCEVMMPDGVTPHASNARATILDDEDAWFGFEQEYFFYQNGRPLGFPEQGYPAPQGPYYTGVGYSNVGDVAREIVEEHLDLCLAAGINHEGINAEVAKGQWEFQIFGKGSKKAADQIWMARYLLQRLTEKYGIDIEYHCKPLGDTD

SEQ ID NO: 9156 - protein, 358 aa, Magnolia x soulangeana
PFYAIVHRIDIGLVIDLEPVNPADVPVTAAGALRSYKLTAKAISRLQSLPSGNISLLCDVLVREVSELTGYDRVMAYKFHEDEHGEVIAECRGSDLEPYLGLHYPATDIPQASRFLFMENKVRMTCDCLAPPVKVIQDKKLAQPLILCGSTLRAPHGCHSQYMANMGSIASLVMSVTINEDDDDDTSVSNGRRRKLWGLVVCHHTSPSFVPFPLRYACEFLVQVFGIQLNKEVELPAQMREKHILRMQTVFCDMLLRDAPVGIITQSPNVMDLVKCDGAAFYYRNQFRLLGTTPTEAQIRDIAGWLLEYHDGTTGLSTDSLTEAGYPGAADLGDDVCGMAAIKITSKDYLFWFRSHTA

SEQ ID NO: 9157 - protein, 551 aa, Kluyveromyces lactis NRRL Y-1140
MFHPRLLLLSLVQLLLTSAFDINAKDNVAVYWGQASAGTQESLGTYCASDNVDVVVLSFLYQFPDNLAIDFASACSTTFDDGLLHCPSIAADIESCQAKGKKVFLSLGGAIGSYGFTDDSQAEEFATTLWNTFGEGTADNVERPFDTAVVDGFDFDIENNNPTGYASLATKLRSLYAKGSKDYYLAAAPQCVYPDASVGDALANADIDIAFVQFYNNYCNVDKQFNWDTWADFVENTSPNKDIKLYLGLPGAASAAGSGYISDLSLLKSTVQTIGENSHFGGIMLWDASQGFTNQVDGEPYVAQVKSILEANTDSTSSQSATSSVQSSSSTATTPDSTLITSTSSKASSISQISSTTQQGVEPTTTSGSTSSPDSISSTTTISSTKTVVNGKVSIASSTDVTTSQQAVTQSTAISVTSSTEVTTSQQPTTKSTTTLQPTTTAAPTTIPEPSRTTLQPSTTQSSDSTQSTDSWAVTRAKELNEQFVKGELNGKDSCSDGEISCTADGKIAICNYGAWVYTECAAGTTCFAYDSGDSVYTSCNFTYLKPDVVF

SEQ ID NO: 9158 - protein, 301 aa, Oryza sativa Japonica Group; identical to SEQ ID NO: 7577

SEQ ID NO: 9159 - protein, 801 aa, Oryza sativa Indica Group; identical to SEQ ID NO: 2302

SEQ ID NO: 9160 - protein, 389 aa, Nelumbo nucifera
PYEVPMTAAGALQSYKLAAKAIARLQALPSGCMDRLCDTVVQEVFELTGYDRVMAYKFHEDDHGEVVSEITKPGLEPYLGLHYPATDIPQAARFLFMKNKVRMICDCRAKHVKVLQDEKLPFDLTLCGSTLRAPHSCHLQYMENMDSIASLVMAVVVNEGDEEGEASGSSQQQKRKKLWGLVVCHNTTPRFVPFPLRYACEFLIQVFAIHVNKEIELENQILEKNILRTQTLLCDMLMRDALLGIISQSPNVMDLVKCDGAALLYKNKIWQLGTTPTEFQIHDIASWLSEYHMDSTGLSTDSFYDAGFPGALSLGDAVCGMAAVRITSKDMLFWFRSHTAAEVRWGGAKHDPDEKDDGRRMHPRSSFKAFLEVVKTRSLPWKDYEMDAI

SEQ ID NO: 9161 - protein, 197 aa, Bradyrhizobium yuanmingense
KTQIKEFASFPTLEQLPLWGFDGSSTQQAEGHSSDCVLKPVAVFPDGARTNGVLVMCEVMMPDGKTPHASNKRATILDDAGAWFGFEQEYFFYKDGRPLGFPTSGYPAPQGPYYTGVGFSNVGDVARKIVEEHLDLCLAAGINHEGINAEVAKGQWEFQIFGKGSKTAADQMWMARYLMLRLTEKYGIDIEFHCKPL

SEQ ID NO: 9162 - protein, 391 aa, Nelumbo nucifera
DLEPVNPADVPVTAAGALKSYKLAAKSISRLQSLPSGNISLLCDVLVREVSDLTGYDRIMVYKFHEDEHGGVVAECRRPDLESYLGLHYPATDIPQASRFLFMKNKVRMICDCLAPPVKVIHDKKLAQPLSLCASTLRVPHGCHAQYMANMGSIASLVMSVTINDDDNEMESDQPKGRKLWGLVVCHHTSPRFVPFPLRYACEFLVQVFGIQLDKEVELAAQLREKHILKTQTLLCDMLLRNAPVGIFTESPNVMDLVKCDGASLYYKNKFWLLGITPTEAQIRDIAGWLLEHHDGSTGLSTDSLMEAGYPGASVLGDAVCGMAAIKITSKDFLFWFRSHTAKKIKWGGAKHDPVVKDGGRKVHPRSSFKAFLEVVKRRSLPWEDVEMDAI

SEQ ID NO: 9163 - protein, 362 aa, Arabidopsis thaliana
MEGKFAISESTNLLQRIKDFTQSVVVDLAEGRSPKISINQFRNYCMNPEADCLCSSDKPKGQEIFTLKKEPQTYRIDMLLRVLLIVQQLLQENRHASKRDIYYMHPSAFKAQSIVDRAIGDICILFQCSRYNLNVVSVGNGLVMGWLKFREAGRKFDCLNSLNTAYPVPVLVEEVEDIVSLAEYILVVEKETVFQRLANDMFCKTNRCIVITGRGYPDVSTRRFLRLLMEKLHLPVHCLVDCDPYGFEILATYRFGSMQMAYDIESLRAPDMKWLGAFPSDSEVYSVPKQCLLPLTEEDKKRTEAMLLRCYLKREMPQWRLELETMLKRGVKFEIEALSVHSLSFLSEVYIPSKIRREVSSP

SEQ ID NO: 9164 - protein, 415 aa, Nymphaea odorata
GKPFYAIVHRVVSGLVMDFEPVKPSELPITAAGALQSYKLAGKAISRLQSLPGGSITRLCDTVVEEVHQLTGYDRVMTYKFHDDDHGEVVSEIRKPDLEPYLGLHYPATDIPQAARFLFMKNKVRMICDCRAKPVKVYQDENLKTDLTLCGSTLRAPHSCHLQYMENMSSIASLVMAVVINEGEDEGEDETDPNQRSQKRKRLWGLVVCHNTSPRFVPFPLRYACEFLAQVFAIHVNKEVELENQNALKKNILRTETLLCDMLLRGSPLGIVSQTPNIMDLVKCDGAAFLYGSKLYLLGRTPAESQIRDIAIWLSEYHKDSTGLSTDSLCEAGYPGALAIGSPVCGMAAVRITANDMLFWFRSHTASEIRWGGAKHDPEEKDDGRRMHPRCSFKAFLEVVKTRSLPWKDFEMDAI

SEQ ID NO: 9165 - protein, 196 aa, Bradyrhizobium yuanmingense
TQIKEFASFPTLEQLPLWGFDGSSTQQAEGHSSDCVLKPVAVFPDGARTNGVLVMCEVMMPDGKTPHPSNKRATILDDSGAWFGFEQEYFFYKDGRPLGFPTAGYPAPQGPYYTGVGYSNVGDVARKIVEEHLDLCLAAGINHEGINAEVAKGQWEFQIFGKGSKTAADQMWMARYLMLRLTEKYGIDIEFHCKPL

SEQ ID NO: 9166 - protein, 368 aa, Xylella fastidiosa Temecula1
MSKRDYYQVLGVPRTASEDDLKKAYRRCAMKYHPDRNPGDAAAEAAFKECKEAYEVLADTKKRKLYDTHGHAAFEHGVGSGNTPDMNDIFGDIFGNIFGGARASRRGADVGYMVELDLEEAVAGVERQIQIPTLVECTHCHGSGSEDGHVETCGTCRGSGQVRIQRGIFAMQQTCPHCGGRGVIIRNPCKVCNGAGRVEDHKTLSVKIPAGVDNGDRIRLSGEGEQGPDGVPPGDLYVEVRVREHPIFQRDGDDLHCEVPVRISQAALGDIVRVATLDGEAEIRIPAETQSGKLFRLRGKGVRSVRSRTEGDLYCRIVVETPVNLTAEQRKLLEQFEMTFAGEDARKHSPKSATFLDGVKSFWDRMTS

SEQ ID NO: 9167 - protein, 407 aa, Nymphaea alba
PFYGILHRIDVGLVIDLEPVNPTDVPVTAAGALKSYKLAAKAISRLQALPSGNIGLLCDVLVREVSELTGYDRVMAYKFHEDHHGEVIAECKKPDLEPYLGLHYPATDIPQASRFLFMKNKVRMICDCTAPSVKVIQDKQLEAAVELCGSTLRSPHGCHAQYMVNMGSIASLVMSVVIMNHDEEPANDNPQKGSKLWGLVVCHHTSPRFIPFPLRYACEFLIQVFAVQLNKEVELAAQLREKHILRTQTVLCDMLLRDAPVGIVTPSPNVMDLVKCDGAALYYGKQFWLLGTTPTETQVRDIAGWLYECHGGSTGLSTDSLMEAGYSGAVALGDAACGMAAVKITYRDFLFWFRSHTAKEIKWGGAKHDTVDKDAGKRMHPRSSFKTFLEVVKHRSHPWENAEMDAI

SEQ ID NO: 9168 - protein, 392 aa, Aspidopterys elliptica
DLEPVNPADVPVTAAGALKSYKLAAKAISRLQSLPSGNISLLCDVLVKEVRDLTGYDRVMVYKFHEDEHGEVVSECLRSDLESYLGLHYPATDIPQASRFLFMKNKVRMICDCVAPPVKVIQDERLPQPLSLCGSTLRSPHGCHAQYMTNMGIIASLVMSVTVNEDDDMVDGDQPQMARKLWGLVVCHHTSTRFVPFPLRYACEFLIQVFGVQINKEVELAAQVREKHILQIQTMLCDMLLRDAPVAIITQSPNVMDLVKCDGAALYFKNKTWLLGVTPTEEQIRDIAEWLLEYHSGNTGLSTDSLMEAGYPGASALGDAVCGMAAVSITSRDFLLWFRSHTAKEIKWGGAKHDPDDKDDGRKMHPRSSFKAFLEVVKWRSMPWEDIEMDAI

SEQ ID NO: 9169 - protein, 448 aa, Piper nigrum
SGKPFYAIVHRVTGSLIVDFEPVKPLEVPMTAAGALQSYKLAAKAISRLQSLPSGGMERLVDTVVQEVFELTGYGRVMAYKFHEDDHGEVISEVTAPDLDPYLGLHYPATDIPQAARFLFMKNKVRMICDCHAKPVKVYQDEKLPFDLTLCGSTLRAPHSCHLHYMANMGSIASLVMAVVINEGACSSATDHAVEQHSSSSSSSASYAAATATAAAAGGGGGSNIDTTSATSRRKMLWGLVVCHNTKPRFVPFPLRYACEFLMQVFAIHVNKELELERQIREKNILRTQTLLCDMLLRDAPMGIVNQSPNIMDLIKCDGAALLYKQQVFPLGVAPSDAELRQLARWLSSSHRDSTGLSTDSLHDAGYPNASCLGNVVCGMAAVKITPSDLLFWFRRHTAAEVRWGGAKHHPTDRDDGKRMHPRSSFKAFLEVVKTRSLPWQNYEMDAI

SEQ ID NO: 9170 - protein, 284 aa, Zea mays
MGRKGRKARVSRDADVDGSEDEMAAAPAAAAGRSLYEILGVEKTASQQEIKKAYHKLALHLHPDKNPGDEEAKEKFQQLQKVISILGDAEKRALYDETGITDDDALVGEAANDLQEYFRTMYKKVTEADIEEFEAKYRGSDSEKTDLKELYTKYKGNMNRLFCTMICSEPKLDSHRFKDIIDGAIAEGELKSTKAYEKWSKKISEMEPPTNPLERRAKSRKKSEENDLILAISQRRAERKNQFNSILSNIMSKCDSKASSSEPTEEEFELARQRLESKMAKRRK

SEQ ID NO: 9171 - protein, 432 aa, Nicotiana sylvestris
MAQILAPSGEWQMRMTKSSTDANPLTSKMWSSVVLKIIKELAVKSSAKFRFFALESDSGTVNQSEQLLNLDVTPYTDKIIAEYIWIGGSGIDMRSKSRTISKPVKHASELPKWNYDGSSTGQAPGEDSEVILYPQAIFKDPFRGGNNILVICDAYTPAGEPIPSNKRHKAAQIFSDSKVVSEVPWFEIEQEYTLLQQNVKWPLGWPVGGYPGTQGPYYLCAGADKSFGLDISDAHYKACLYAGINISGTNGEVMPGQWEFQVGPSVGIEAGDHIWCARYILERITGQAGVVLSLDPKPIEGDWNGAGCHTNYSTLSMREDGGFEVIKKANLNLSLRHKEHINAYGEGILEKLTGNHETASIDKFSWGVAFRGASIRVGADTEKQGKGYLEDRRPASNMDPYVVTGLLAETTILWEPTNEAEALAAQKLALKV

SEQ ID NO: 9172 - protein, 341 aa, Piper nigrum
DLEPVNPADVPVTAAGALKSYKLAAKAISRLQSMPNGDIALLCDVLAREVSDLTGYDRVMAYKFHEDEHGEVIAECKRSDLEPYLGLHYPATDIPQASRFLFMKNKVRMICDCLAPPVKVVQDKRLGQPLSLAGSTLRAPHGCHSQYMSNMGSIASLVMSVMVCEGDEDSNGEKTARKLWGLVVCHHTSPRFIPFPLRYACEFLIQVFAIQLSKEVELAAQVKEKHVLRMQTVLCDMLLRDAPMGIMTQSPNVMDLVMCDGAALYYHSQCWLLGATPTENMVRDIAEWLQQYHGTSTGLSTDSLVEAGYPGAHELSDAVCGMAAITITNRDFSFWFRSHTA

SEQ ID NO: 9173 - protein, 392 aa, Caucanthus auriculatus
DLEPVNPADVPVTAAGALKSYKLAAKAISRLQSLPSGNISLLCDVLVKEVRDLTGYDRVMVYKFHEDEHGEVVSECHRSDLESYLGLHYPATDIPQASRFLFMKNKVRMICDCVAPPVKVIQEERLPQPLSLCGSTLRSPHGCHAQYMTNMRIIASLVMSVTVNEEDDMVDGDQPQMARKLWGLVVCHHTSTRFVPFPLRYACEFLIQVFGVQINKEVELAAQVREKHILQIQTMLCDMLLRDAPVAIITQSPNVMDLVKCDGAALYFKNKTWLLGVTPTEEQIRDIAEWLLEYHSGNTGLSTDSLMEAGYPGASALGDAVCGMAAVSITSRDFLLWFRSHTAKEIKWGGAKHDPDDKDDGRKMHPRSSFKAFLEVVKWRSMPWEDIEMDAI

SEQ ID NO: 9174 - protein, 394 aa, Sagittaria sp. Mathews 383
PYEVPMTAAGALQSYKLAAKAISRLQSLPGGSMQKLCDTVVQEVFELTGYDRVMAYKFHEDDHGEVVSEVTKPGLDPYLGLHYPATDIPQAARFLFMKNKVRMICDCRAKPVKVYQDEKLAFDLTFCGSTLRAPHSCHLQYMENMDSIASLVMAVIVNEGDEEDEVLGSRAQQQQQQQQRRKRLWGLVVCHNRTPRFIPFPLRYACEFLMQVFAIHVNKEFELENQMREKNILRTQTLLCDMLFRDALLGIISQNPNIMDLVRCDGAALVYQSKIWRLGMAPTESQICDIAAWLSEYHMDSTGLSTDSLHDAGYPGVLALGDSVCGMAAARITSKDILFWFRSHTAAEIRWGGAKHDPADEDDGRRMHPRSSFKAFLEVVKTRSMPWKDYEMDA

SEQ ID NO: 9175 - protein, 238 aa, Zea mays
  misc_feature (36)..(36): Xaa can be any naturally occurring amino acid
  misc_feature (45)..(45): Xaa can be any naturally occurring amino acid
  misc_feature (55)..(55): Xaa can be any naturally occurring amino acid
  misc_feature (76)..(76): Xaa can be any naturally occurring amino acid
  misc_feature (115)..(115): Xaa can be any naturally occurring amino acid
  misc_feature (140)..(140): Xaa can be any naturally occurring amino acid
  misc_feature (149)..(149): Xaa can be any naturally occurring amino acid
  misc_feature (199)..(199): Xaa can be any naturally occurring amino acid
LEAGREEIPLHCEIPTFNQSQYPRVVTEDFVSLPSXKANLGKDGXWHPSMDSGDXFPIFRITAGKLDILLAQDEEXMSFGAHSHTLRGIVDIKILNHLINIRTPYCMDATPKTRXADLNGGTLISYKRKDQFLDIAQVPXDHVNEFKSXIEKFNIFNTNNSWVNLYPINRLRKAEALEMEIIPNLQEADGGKVLQLKTXCDAAIQTFEQYILQLMLPSQCCSQMKATSDLMLVHADLN

SEQ ID NO: 9176 - protein, 397 aa, Sagittaria sp. Mathews 383
DLEPVNLSDVPVTAAGALKSYKLAAKAISRLQSLSSGNISLLCDVLVREVRDLTGYGRVMAYKFHEDEHGEVISESRRSDLEPYLGLHYPATDIPQASRFIFMKNKLRMICDCTAQPVKVIQDKKFTQPLSLCGSTLRAPHGCHAQYMANMGSIASLVMSATISDEDEDDASSGQQRKRRKLWGLVVCHLTSPRFVPFPIRYACEFFMQVFAIQLNKEVELAAQTMEKYIFRTQTFLCDMLLRDAPVGIFTQSPNAMDIVKCDDAALYYKNQFWLLGITPAEGQIRGIAGWLRDCHNTTTGLSTDSLTAFSEAGYRGASTLGDAVCGMTAIKFTSRDFIFWFRSHTAKEIKWRGAKHDPVDKDDDGRKMHPRSSLKAFLDVVKRRSLPWEDVEMDAI

SEQ ID NO: 9177 - protein, 266 aa, Parkia platycephala
YWGQNGGEGTLTSTCESGLYQIVNIAFLSQFGGGRRPQINLAGHCDPANNGCRTVSDGIRACQRRGIKVMLSIGGGAGSYSLSSVQDARSVADYIWNNFLGGRSSSRPLGDAVLDGVDFDIEHGGAYYDALARRLSEHNRGGKKVFLSAAPQCPFPDQSLNKALSTGLFDYVWVQFYNNPQCEFNSGNPSNFRNSWNKWTSSFNAKFYVGLPASPEAAGSGYVPPQQLINQVLPFVKRSPKYGGVMLWDRFNDLKTKYSSKIKPSV

SEQ ID NO: 9178 - protein, 486 aa, Physcomitrella patens subsp. patens; identical to SEQ ID NO: 5588

SEQ ID NO: 9179 - protein, 372 aa, Candidatus Kuenenia stuttgartiensis
MGRDYYQILGVSRNAGSDEIKKAYRQLAMKYHPDRNPGNKESEQMFKEAAEAYGVLSDAEKKKLYDQYGEEGLKATGTRGYSSYEDIFDAFGDIFGGGSIFDEFFGKGRGGGEAGKRGASLKCDIEMGFKEVATGVEKKIELMRREICDACRGTGAKEGTSPVTCPYCGGKGQVQQSQGFFTLRTTCPKCRGTGKIIESPCRKCGGTKRYPRRATISVKIPAGVEDGTRLRLVGQGEPGENGAPSGDLYCDVHVTPHPIFQRHGNDVLCEVPISFAQAALGCKIDVPTLSGNIIQVKVPKGIQNNEIIPIKGEGFPNIHRHGKGNLLVQVVVETPTKISSRQEELLKEFAELEKNNISSRQKKFIEKMKQVS

SEQ ID NO: 9180 - protein, 392 aa, Malpighia stevensii
DLEPVNPADVPVTAAGALKSYKLAAKAISRLQSLPSGNISLLCDVLVKEVRDLTGYDRVMVYKFHEDEHGEVVSECRRSDLESYLGLHYPATDIPQASRFLFMKNKVRMICDCVAPPVKVIQDDRLPQPLSLCGSTLRSPHGCHAQYMTNMGIIASLVMSVTVNEDDDMVDGDQPQMARKLWGLVVCHHTSTRFVPFPLRYACEFLIQVFGVQINKEVELAAQVREKHILQIQTMLCDMLLRDAPVAIITQSPNVMDLVKCDGAALYFKNKTWLLGVTPTEEQIRDIAEWLLEYHSGNTGLSTDSLMEAGYPGASALGDVVCGMAAVSITSRDFLFWFRSHTAKEIKWGGAKHDPDDKDDGRKMHPRSSFKAFLEVVKWRSMPWEDVEMDAI

SEQ ID NO: 9181 - protein, 374 aa, Saccharophagus degradans 2-40
MSKRDYYEVLGVSKDVSPQELKKAYRKVAMKYHPDRNSDDPNSEDKFKEASEAYEVLSDAQKRAAYDQYGHAGVDGNAGMGGGAGAGNFSDIFGDVFGDIFGGGGGRRRGGPSRGSDLRYTLDLSLEDAVKGTTVKIRVPTLVSCKPCGGSGAKPGTSPQTCTTCGGHGQVRMQQGFFSVQQTCPNCRGQGKMITDPCKECHGHGRVEETKTLSVKVPPGVDTGDRIRLAGEGEAGADGGPAGDLYVQVDVQDHAFFQREGRNLYCEVPISLFDACLGGELEVPTLDGRVKLKIPAETQTGKLFRLRGKGVTPVRGGAAGDLMCRVIIETPVNLTKKQKELLEELKASMKGEKNSPKQESWFEGMKNFFGDLKM

SEQ ID NO: 9182 - protein, 72 aa, Amphicarpaea edgeworthii
WEYQVGPSVGIEAGDHIWASRYILERITEQAGVVLTLDPKPIEGDWNGAGCHTNYSTKTMREDGGFEVIKKA

SEQ ID NO: 9183 - protein, 302 aa, Oryza sativa
MAPRLCCSSQFLLAVSFLAAFAAVSNAGKVAVYWGQGAGNGDGTLAETCATGLYDFVNIAFLNVYGSGLTPVLNLAAHCNPDAGTCKSLSSEISSCQQSGVKVLLSLGGERGQYSLSSADDARGVADYLWNTFLGGSSDSRPLGDAVLDGIDFDIEKDGDHYDELAMALSSKCNGACVLTAAPQCPYPDAHLDAAIKTGVFSHVWVQFYNNRQCQYASGDASALQAAWAQWTSGVPAPADVFLGLPTAPAAAPSGGYIDADTLLSQVLPAVEGAAANYGGVMLWNRWRDVTAGYGAKLKGKV

SEQ ID NO: 9184 - protein, 392 aa, Madagasikaria andersonii
DLEPVNPADVPVTAAGALKSYKLAAKAISRLQSLPSGNISLLCDVLVKEVRDLTGYDRVMVYKFHEDEHGEVVSECRRSDLESYLGLHYPATDIPQASRFLFMKNKVRMICDCVAPPVKVIQDERLPQPLSLCASTLRSPHGCHAQYMTNMGIVASLVMSVTVNEEDDMVDGDQPQMARKLWGLVVCHHTSTRFVPFPLRYACEFLIQVFGVQINKEVELAAQVREKHILQIQTMLCDMLLRDAPVAIITQSPNVMDLVKCDGAALYFKNKTWLLGVTPTEEQIRGIAEWLLEYHSGNTGLSTDSLMEAGYPGASALGDAVCGMAAVSINSRDFLLWFRSHTAKEIKWGGAKHDPGDKDDGRKMHPRSSFKAFLEVVKWRSMPWEDMEMDAI

SEQ ID NO: 9185 - protein, 535 aa, Oryza sativa; identical to SEQ ID NO: 7735

SEQ ID NO: 9186 - protein, 302 aa, Mesorhizobium sp. BNC1
MRDPYEVLGVSKSASAKDIKAAFRRLAKKYHPDQRPDDPQAKERFAEVNQAYEILGDEKKRTAFDNGEIDAAGKPRYQDFAEAGADPFAGFRRGGGGPGRAHFEFRTSGVGGDAGDIFSEIFGQAFRGNQGARSARPEGIGDINVTLDVSVEDIATEAKVNAVFPDGRRIAVKLPRYVEDGQTIRLKGQGAETPFGERGDALVKLRLRPHPQYRVEGRDLHVDLPVSLRDAVLGAKVAVGTPTGKVAVTIPAWSSSDRTLRLKGRGLPLKAGGNGDLYTHVRIMLPEGGDPALEALFRKADA

SEQ ID NO: 9187 - protein, 62 aa, Passiflora vitifolia
GEVMPGQWEYQVGPSVGIDAGDHIWCSRYILERITEQAGVVLSLDPKPIEGDWNGAGCHTNY

SEQ ID NO: 9188 - protein, 302 aa, Arabidopsis thaliana
MTNMTLRKHVIYFLFFISCSLSKPSDASRGGIAIYWGQNGNEGNLSATCATGRYAYVNVAFLVKFGNGQTPELNLAGHCNPAANTCTHFGSQVKDCQSRGIKVMLSLGGGIGNYSIGSREDAKVIADYLWNNFLGGKSSSRPLGDAVLDGIDFNIELGSPQHWDDLARTLSKFSHRGRKIYLTGAPQCPFPDRLMGSALNTKRFDYVWIQFYNNPPCSYSSGNTQNLFDSWNKWTTSITAQKFFLGLPAAPEAAGSGYIPPDVLTSQILPTLKKSRKYGGVMLWSKFWDDKNGYSSSILASV

SEQ ID NO: 9189 - protein, 300 aa, Arabidopsis thaliana
  misc_feature (28)..(28): Xaa can be any naturally occurring amino acid
MSSYMHPLLGQELPLQRPEDSRTPPDQXNNMELNRSEADEAKAETTPTGGATSSATASGSSSGRRPRGRPAGSKNKPKPPTIITRDSPNVLRSHVLEVTSGSDISEAVSTYATRRGCGVCIISGTGAVTNVTIRQPAAPAGGGVITLHGRFDILSLTGTALPPPAPPGAGGLTVYLAGGQGQVVGGNVAGSLIASGPVVLMAASFANAVYDRLPIEEEETPPPRTTGVQQQQPEASQSSEVTGSGAQACESNLQGGNGGGGVAFYNLGMNMNNFQFSGGDIYGMSGGSGGGGGGATRPAF

SEQ ID NO: 9190 - protein, 194 aa, Rhizobium leguminosarum
DVFPTLEQLPLWGFDGSSTMQAEGRSSDCVLKPVAIYPDPARTNGALVMCEVMMPDGVTPHPSNARATILDDEDAWFGFEQEYFFYQNGRPLGFPEQGYPAPQGPYYTGVGYSNVGDVAREIVEEHLDLCLAAGINHEGINAEVAKGQWEFQIFGKGSKKAADQIWMARYLLQRLTEKYGIDIEYHCKPLGDTD

SEQ ID NO: 9191 - protein, 718 aa, Marchantia polymorpha
MPQNKKPPTGAASKAYSVHQPNIFSREVQLSRNTRGSLEIFGGGPQTSSLLFSRTRSAWKDALHCAEPVSEGSVSCNKDTIRPTLAEASSSPKIPTVSLTEDLMDGGPIDNLAVDSREDDVSKWLADAGKSVESPKSSMSYQARLSDCLGEDSEFSDSYMRSVVSIMSDSSVAPDRSVRDLEWDGVLPTQMETNVTRTPDWSNEVVSQRAVQWGYGVVLKPTLSRGSGSAETERISRLSWTTGASDASSGMGTSSRTTSEGSSGESTFSSIIPGVSRNVKEALTSFQLAFVVCDALNPEYPVLYASAGFFSMTGYTAKEVVGRNCRFLQGQYTDAKDIEMIRDALVNRKSFSGKLLNYKKDGIPFWNLLTISPIKDEEGRIIKYIGMQAEVTENGRTSSSMNEEPISAYASRISSAELRDGSLDISGSPLPSVKHGSATVCHPSCPSAREFDFDSPAVNRYSLSSSRHSMDARSKSISSQKSVRVSAENFASSPGIAPRVNIIDVEEPSVRSECGSIDTSKSGKRTSGIIRLFKKLNGKFSSPKGGLRDKNDGLLNSTKVFVDEVFNFDDEESETDDVERKERRSGIDFNTSSFTQSDGMCRGRGSSQSRTSPDKQPACGKSGDTAGIRGQNDLHLGIEQHCDFHTSQKPVQGNRRLALGTGRRSAQHVTTEGRLNELKVYTMEKDRRHSVASMPSSGTDVNVNGKSQFCIVHQKSPS

SEQ ID NO: 9192 - protein, 381 aa, Oryza sativa Japonica Group; identical to SEQ ID NO: 180

SEQ ID NO: 9193 - protein, 302 aa, Arabidopsis thaliana
MTNMTLRKHVIYFLFFISCSLSKPSDASRGGIAIYWGQNGNEGNLSATCATGRYAYVNVAFLVKFGNGQTPELNLAGHCNPAANTCTHFGSQVKDCQSRGIKVMLSLGGGIGNYSIGSREDAKVIADYLWNNFLGGKSSSRPLGDAVLDGIDFNIELGSPQHWDDLARTLSKFSHRGRKIYLTGAPQCPFPDRLMGSALNTKRFDYVWIQFYNNPPWSYSSGNTQNLFDSWNKWTTSIAAQKFFLGLPAAPEAAGSGYIPPDVLTSQILPTLKKSRKYGGVMLWSKFWDDKNGYSSSILASV

SEQ ID NO: 9194 - protein, 712 aa, Marchantia polymorpha
MPLLKKPPTGASSKAYSVHQPNIFSREVELSRNTRGSLEIFGGGPQTSPLLFSRTRSAWKDALQCAESHLQEHDTGKVVPSVSGTSPPSSQRPLISGSGDHPSVVSSAALYPRCCVQDDVSKWLTDAEVSGDTSELPSSVSRPLEFVSDTRDNTDVNLEASSKTLSGYPVEPTKTRVEQDWDEVLKHRRGKKISGFSEISDEALSERAAQWGYGVVLKPSNNRGSGSAETEGISRLSWTTGSSDTSSALGKSSRTTSEGSSACSSFSPMIPGLSKNVKEALASFQLAFVVCDALNAEYPILYASAGFFSMTGYTAKEVVGRNCRFLQGQYTDAHDIAMIRGALREGNIYTGKLLNYKKDGSPFWNLLTISPIRDDGGRLIKYIGMQAEVTESAAIGKALDQNGVPADVKNLFEAGRKKTKDNRTAGGVTSETRVHRKISEESNCQRTSRSQYSLSSSRQSFEVSSNVTLALDVHTPLKTGTEVAAFSAEAVDSGGFLEVPKALRGESSCMVDTKNTKRTSSLLKMFKKLNGRFSKRGSRDYSHEDPIAVEDHNDVVSDPDDEDVDDFEGKQRRSSFYSSTESLVGKQELDQTSEFMRVGKTNRQSRQFSEERRDCAGRMDCEIPLRQERFSGDHSRPGSSEHGIGRKVVSYGRRSAEYPVGAVNAFLKNEGLASHAIDRRHSIATVPSVTRPSFSVDGKSQFCIVHPTAPGH

SEQ ID NO: 9195 - protein, 82 aa, Oxalis peduncularis
GINISGTNGEVMPGQWEYQVGPSVGIEAGDHIWASRYILERITEQAGVVLTLDPKPIDGDWNGAGCHTNYSTKSMRDEGISL

SEQ ID NO: 9196 - protein, 196 aa, Bradyrhizobium elkanii
TQIKEFASFPTLEQLPLWGFDGSSTQQAEGHSSDCVLKPVACYPDAARENGVLVMCEVMMPDGKTPHVSNKRATVLDDEGAWFGFEQEYFFYKDGRPLGFPEEGYPAPQGPYYTGVGYKNVGSVARKIVEEHLNLCLAAGINHEGINAEVAKGQWEFQIFGKGSKTAADQMWMARYLMLRLTESYGIDIEFHCKPL

SEQ ID NO: 9197 - protein, 95 aa, Oxalis flagellata
LYAGINISGTNGEVMPGQWEYQVGPSVGIEAGDHIWASRYILERITEQAGVVLTLDPKPIDGDWNGAGCHTNYSTKSMRDEGGFEVIKKAILNLS

SEQ ID NO: 9198 - protein, 92 aa, Oxalis andina
  misc_feature (41)..(41): Xaa can be any naturally occurring amino acid
GINISGTNGEVMPGQWEYQVGPSVGIEAGDHVWASRYILEXITEQAGVVLTLDPKPIEGDWNGAGCHTNYSTKSMRDEGGFEVIKKAILNLS

SEQ ID NO: 9199 - protein, 392 aa, Saruma henryi
PYEVPMTAAGALQSYKLAAKAISRLQSVPSGCLDRLIDTVVQEVYELTGYDRVMAYKFHEDDHGEVISEVTKPDLEPYLGLHYPATDIPQAARFLFMKNKVRMICDCRAKSVKVYQDEHLSFDLTLCGSTLRAPHSCHLQYMGNMSSIASLVMAVVINEGEEDDDGPDSTQQQAQPKRKRLWGLVVCHNTTPRFVPFPLRYACEFLMQVFAIHVNKELELENQIREKNILRTQTLLCDMLLRDAPLGIVTQSPNIMDLIKCDGAALLYENKVYRLGVTPTESQLHEIVQWLSEHHMDSTGLSTDSLHEAGYPKALSLGDIVCGMAAVRITTHDMLFWFRSHTAAEVKWGGAKHDPSDKDDGRRMHPRSSFKAFLEVVKTRSLPWKDYEMDAI

SEQ ID NO: 9200 - protein, 391 aa, Saruma henryi
DLEPVNPDDVPVTAAGALKSYKLAAKAISRLQSLPSGNISLLCDVVVREVSDLTGYDRVMAYKFHEDEHGEVIAECKRSDLEPYHGLHFPASDIPQASRFLFMKNKVRMICDCSAPPVKVIQDKRLAQPISLGGSTLRAPHGCHAQYMANMGSIASLVLSVTISEDDDETCSKQKGRKLWGLVVCHHTSPRFIPFPLRYACEFLIQVFGIQLNKEVELAAQMRETHILRTQTMLCDMLLRDAPMTIVTQSPNVMDLVKCDGAALYYRKESWLLGVTPTKAQIQDLAEWLLKDHNGTTGLSTDSLVEAGYPRAHNLGDMVCGMAAVRITNQDFLFWFRSHTAKEVKWGGAKHDPADKDDDRGKMHPRSSFKAFLEVVKRRSLPWEDVEMDAI

SEQ ID NO: 9201 - protein, 414 aa, Saururus cernuus
SGKPFYAIVHRVTGSLIIDFEPVKPFEVPMTAAGALQSYKLAAKAISRLQSLPSGSMERLVDTVVQEVFELTGYDRVMAYKFHEDDHGEVISEVTIPHLEPYIGLHYSATDIPQAARFLFMKNKVRMICDCHAKPVKVYQDDKLSFDLTLCGSTLRAPHSCHLQYMENMGSIASLVMAVVVNEGGDEDKGPDSSQQLGDNRRKRLWGLVVCHNTRPRFVPFPLRYACEFLTQVFAIHVSKELELERQIREKNILRTQTLLCDMLLRDAPMGIVNQSPNIMDLIKCDGAALFYKDKVFRLGNAPSETDIRDIAQWLFAHHMDSTGLSTDSLHDAGYPKAAFLGNLVCGMAAVKITCSDMLFWFRTHTAAEIRWGGAKHDHSERDDGKRMHPRSSFKAFLEVVKTRSLPWKDYEMD

SEQ ID NO: 9202 - protein, 391 aa, Saururus cernuus
DLEPVNPSDVPVTAAGALKSYKLAAKAISRLQSLPSGNISLLCDVLVREVSDLTGYDRVMAYKFHEDEHGEVVSECKRADLEPYLGLHYPATDIPQASRFLFMKNKVRMICDCLAQPVKVIQDKRLAQPLSLAGSTLRAPHGCHAQYMANMGSIASLVMSVMVSEGDDDSNEEKTGRKLWGLVVCHHTSPRFIPFPLRYACEFLIQVFAIQLSKEVELAAQMREKHILRMQTVLCDMLLRDAPMGIMTQSPNVMDLVKCDGAALYYRYQCCLLGTTPTENQIRDITEWLLQYHNSSTGLSTDSLVEAGYPGAHELSDAVCGMAAIRITSKDFLFWFRSHTAKEIKWGGEKHDPLDKDAFESKMNPRTSFKTFLEVVKRRSLPWEDVEMDAI

SEQ ID NO: 9203 - protein, 442 aa, Candida albicans
MVNLLKKLHITKSHQSNHSNSDSNSLNSNTSMDNHQQQQQLQQYQQQFQQPQQQLYPGEQIVHPAAAQTGQNTTNVTAVSSSNITQSATSSLHSQQLQHVDVSKSAAEEAIRRSLLPERSTVSKGKYSLTDFSIMRTLGTGSFGRVHLVRSVHNGRYYAIKVLKKHQVVKMKQVEHTNDERRMLKLVEHPFLIRMWGTFQDSKNLFMVMDYIEGGELFSLLRKSQRFPNPVAKFYAAEVTLALEYLHSHDIIYRDLKPENILLDRNGHIKITDFGFAKEVSTVTWTLCGTPDYIAPEVITTKPYNKSVDWWSLGVLIFEMLAGYTPFYDSTPMKTYEKILAGKIHYPSFFQPDVIDLLTKLITADLTRRLGNLINGPADIRNHPWFSEVVWEKLLAKDIETPYEPPITAGVGDSSLFDHYPEEQLDYGSQGEDPYASYFLDF

SEQ ID NO: 9204 - protein, 401 aa, Trochodendron aralioides
GKPFYAIVHRVTGSLIIDFEPVKPYEVPMTAAGALQSYKLAAKAIARLQSLPSGSIERLCDTLVQELFELTGYDRAMVYKFHEDDHGEVVSEITKPGLEPYLGLHYPATDIPQAARFLFMKNKVRMICDCRAKNVKVLQDEKLPFDLTLCGSTLRAPHSCHLQYMENMNSIASLVMAVVVQEGDEQARALVPHSLRRRKRLWGLLVCHHSTPRFVPFPLRYACEFLAQVFAIHVNKELELENQILEKNILRTQTLLCDMLMRDAPLGIVSQSPNIMDLVKCDGAVLLYKNRTWRFGSTPSELQIHDIALWLSEYHMDSTGLSTDSLYDAGFPGALTLGDGVCGMAAVRITSKDMLFWFRSHTAAEVRWGGAKHEPGEKDDGRRMHPRSSFKAFLEVVKSRS

SEQ ID NO: 9205 - protein, 197 aa, Bradyrhizobium yuanmingense
KTQIKEFASFPTLEQLPLWGFDGSSTQQAEGHSSDCVLKPVAVFPDGARTNGVLVMCEVMMPDGKTPHPSNKRATILDDSGAWFGFEQEYFFYKDGRPLGFPTAGYPAPQGPYYTGVGYSNVGDVARKIVEEHLDLCLAAGINHEGINAEVAKGQWEFQIFGKGSKTAADQMWMARYLMLRLTEKYGIDIEFHCKPL

SEQ ID NO: 9206 - protein, 390 aa, Trochodendron aralioides
DLEPVNPADVPVTAAGALKSYTLAAKAISRLQSLPSGNLSLLCDVLVREVSELTGYDRVMVYKFHEHKHGEVVAECRISDLEPYLGLHYPATDIPQASRFLFMKNKIRTICDCLAPPVKVIQDKRLVQPLSLCGSTLRAPHGCHAQYMENMGSIASLVMSVMNHEDEDEIESDRKGRKLWGLVVCHHTSPRFVPFLLRYACEFLIQVFGIQLNKEVELAAQLREKHILRTQTVLCDMLLRDAPVGIVTQSPNVMDLVKCDGAALYYRNTIWLLGVTPTEAQIRDIAGWLLEYHNGSTGLSTDSLMEAGYSDALLLGDAVCGMAAVKITSKDFLFWFRSHTAKEIKWGGVKHDPVDKDDGRKMHPRSSFKAFLEVVKRRSLPWEDVEMDAI

SEQ ID NO: 9207 - protein, 295 aa, Ostreococcus tauri
MSRRRGSGKDFYAALGVAPTADENEIRKAYRKLAMKYHPDKNRADTSGQSEKKFKEVSEAYEVLSDPKKRELYDAYGEEGLENERGGYIRAILWGRRDAGWWILRRWKQRKKAPKIEQTLKVSLEEMFYGAQKNFSVTRKVIRNGRQESVQETLTIDIKPGWKSGTKLTFQEKGDETPTTIAADIVFTLEQKPHPHFEREGNDLVRTMKVDLNEALLGTSFSVYTLDGKAIPVTVDEIISPTFVKVLPGEGMPVSKAPGSRGDMRIKFDIRFPKGPLTSAQKSALRTALENGVQY

SEQ ID NO: 9208 - protein, 63 aa, Protea mucronifolia
MPGQWEYQVGPIVGIEAGDHIWCSRYLLERITEQAGVVLTLDPKPIEGDWNGAGCHTNYSTKS

SEQ ID NO: 9209 - protein, 88 aa, Triticum aestivum
  misc_feature (27)..(27): Xaa can be any naturally occurring amino acid
MVVFDVCVYCNIDNLWDAVAKLGEISXNEKAGFISLVSRYLSGEADQIEWSKIQTLTDEVVVLYDTLAPFSEDLDALKALLDKLVVLK

SEQ ID NO: 9210 - protein, 47 aa, Pueraria phaseoloides
RITEQAGVVLSLDPKPIEGDWNGAGCHTNYSTKSMREDGGFEVIKKA

SEQ ID NO: 9211 - protein, 218 aa, Triticum aestivum
MVKLTMIARVTDGLPLAEGLDDGRDQKDSDFYKQQAKLLFKNLSKGQHEASRMSIETGSYFFHYIIEGRVCYLTMCDRSYPKKLAFQYLEDLKNEFERVNGSQIETAARPYAFIKFDTYIQKTKKLYLDTRTQRNIAKLNDELYEVHQIMTRNVQEVLGVGEKLDQVSEMSSRLTSDTRIYADKAKDLNRQAFIRKYAPVAIVIGVVIILFWAKNKIW

SEQ ID NO: 9212 - protein, 341 aa, Zea mays
MGSRDYYEILNVDRSAIDDDLRRAYRRLAMRWHPDKNPAGKAEAETRFKEITEAYNVLSDADKRAVYDQYGEEGLRGDVPQPGGGGGTDDIFAEFFGSTPFTYCSTASSGRQPPPPPKWDSGFGRAFRRAQGGGGGAASSRMAPPPPPVESRLACTLEELCMGGTKKMRISRNLVDASGKTKTESEILWIEVKPGWKKGTKITFAGKGNQQWNQLPADLVFVVDEKPHPVYRRDGNDLLAEVRVTLAQALGGTVVVLTALDGRELAVDVGGGGEDEDDEDDAPVVCPGYELVLPGEGMPIAREPGRRGNLRIRFDVAFPERLTRRQRAEIKRALEDSTGVC

SEQ ID NO: 9213 - protein, 473 aa, Zea mays
MAATAVSVDEKLDKLRAEVAKLSQISENEKAGFISLVSRYLSGEAEQIEWSKIQTPTDEVVVPYDTLTSPPEDLEETKKLLDKLVVLKLNGGLGTTMGCTGPKSVIEVRNGFTFLDLIVIQIESLNKKYGCNVPLLLMNSFNTHDDTQKIVEKYSNSNIEIHTFNQSQYPRIVTEDFLPLPSKGKSGKDGWYPPGHGDVFPSLNNSGKLDILLAQGKEYVFVANSDNLGAIVDIKILDHLINNQNEYCMEVTPKTLADVKGGTLISYEGRVQLLEIAQVPDEHVNEFKSIEKFKIFNTNNLWVNLKAVKRLVEAEALKMEIIPNPKEVDGVKVLQLETAAGAAIRFFDKAIGINVPRSRFLPVKATSDLLLVQSDLYTLVDGFVIRNPSRANPANPSIELGPEFKKVANFLARFKSIPSIVELDSLKVSGDVWFGSGITLKGKVTITAKSGVKLEVPDGAVFENKDVNGPEDL

SEQ ID NO: 9214 - protein, 72 aa, Teramnus labialis
WEYQVGPSVGIEAGDHIWASRYILERITEQAGVVLSLDPKPIEGDWNGAGCHTNYSTKSMREDGGYEVIKKA

SEQ ID NO: 9215 - protein, 187 aa, Debaryomyces hansenii CBS767
MDQKKKCKILISRITPNSEPQATIESGQYNIHYLIDNSIIYLSICDKSYPRKLAFSYLSEISHEFWNSHGQEALSNSARPFGFSSFDNFLGKTKKIYQDQRAQSNLDKLNNDLADVKKVMTKNIEDLLYRGDSLDKMSDLSSSLRNDSIKYRKHAQKINFDALLRQYAPIVGCGLFFVFLVWYMFLR

SEQ ID NO: 9216 - protein, 65 aa, Protea intonsa
  misc_feature (12)..(12): Xaa can be any naturally occurring amino acid
MPGQWEYQVGPXVGIEAGDHIWCSRYLLERITEQAGVVLTLDPKPIEGDWNGAGCHTNYSTKSMR

SEQ ID NO: 9217 - protein, 72 aa, Teramnus labialis
WEYQVGPSVGIEAGDHIWASRYILERITEQAGVALSLDPKPIEGDWNGAGCHTNYSTKSMREDGGYEVIKKA

SEQ ID NO: 9218 - protein, 366 aa, Sorghum bicolor; identical to SEQ ID NO: 5635

SEQ ID NO: 9219 - protein, 344 aa, Agrobacterium tumefaciens str. C58
MTKFKLEYIWLDGYKPVANLRGKTQIKEFDEFPTLEQLPLWGFDGSSTQQAEGHSSDCVLKPVAIYPDPARTNGALVMCEVMMPDGVTPHASNSRATILEDEDAWFGFEQEYFFYQDGRPLGFPEQGYPAPQGPYYTGVGFKNVGSVAREIVEEHLDLCLEAGINHEGINAEVAKGQWEFQVFGKGSKRAADQIWIARYLLLRLCEQYGIDVEFHCKPLGDTDWNGSGMHCNFSTKFMREVGGKDYFEALMAAFAKNWQEHIDVYGPDNHLRLTGKHETAPWNKFSYGVADRGASIRVPHSFVNNGYRGYLEDRRPNSQGCPYQIASVVLKTIAEVPLAKSAAA

SEQ ID NO: 9220 - protein, 410 aa, Arabidopsis thaliana
MSAKKLEGSSAPANRRDPYEVLCVSKDANDQEIKSAYRKLALKYHPDKNANNPDASELFKEVAFSYSILSDPEKRRHYDNAGFEALDADGMDMEIDLSNLGTVNTMFAALFSKLGVPIKTTVSANVLEEAMNGTVTVRPLPIGTSVSGKVEKQCAHFFGVTISEQQAESGVVVRVTSTAQSKFKLLYFEQDSSGGYGLALQEEREKTGKVTSAGMYFLHFQVYRMDTTVNALAAAKDPESAFFKRLEGLQPCEVSELKAGTHIFAVYGDNFFKTASYTIEALCAKTYEDTTEKLKEIEAQILRKRNELRQFETEYRKALARFQEVTNRYTQEKQTVDELLKQRDTIHSTFSVVKTPSGNNLSNGSSSKAQGDESKGDGDSAGEEGGTENRDKSKRKWFNLNLKGSDKKLG

SEQ ID NO: 9221 - protein, 1012 aa, Chlamydomonas reinhardtii
MAPKQRCLYEVLEVAREAEDGEIKKAYRKMALMWHPDKNAHRAEEAAERFKEIQNAYEILSDKHERAWYDDHRDQIMRSGERHQAGGGSGGYEAGGERPAEDEEIFSFFSTSCFSGFGDGPKGFYGVYAEVFANLAKREQEAWEAREREQIRRRMEEENRRKRRKARRDWMDTIRELVAFVKKRDKRVAKAQAEEAARRAQREAEDAERRKREREERLARAAAYEEADWVRNTPSHHHHGEEDGEGSEEDEAEEEVFECVVCDKVFRSDKQIKNHERSKKHAEAVAALRAVLEEEEAAILDLDLDLDGSGAGAASVAGGGGGGGGGGGKGGRGGSGMDGAATGGGGGSKKKKKAKRRAQKAAGGSAMQSRDAGGEDEEAEEAEGEEEAEEEARAAPAPAPASAAAGKGKGKAQQAKGKAAAPPPPPPPPKSESEEEEEEEEEEQDEDDDAMLARMMAAHARVGGGKQQRQSKGGRGGKQQQQEDEKGEEEEEDEEEEEAEAPAARKAEAAADIEDDEEEEDDEDEDAMLARMMRSKQAAAASGPAARKGGGGGGKKAAPAPAVESDEEDDEQDEEEEEEAPPAASSSGRQQQQQPAAPKQAQAGGGKVAKGGAAAAAKPAASKPAPASKRGGGGGGGAATVGVPAGSGFVASDDDSDEEDGSQATTKKEKRKAKAAARKAAATAPGPGQTACLVCVPVTFEQCFGAGNILRPPVPLHHVHPGDAGDEVLFLRSGRQLRREQISRLAEENCRIEHSCGADTPAAIIAHGVRHSVVRANMNISGFTSISQELAEHLGLAYQVLGGGGKEPLRGRPEPISALVDPIQIQLLNTDGGPLATFTAYLVFVTTDSHVDLQIAGDVVGGRSCIGDGQWSIGLPGSGALVPLPRLLPRRWRAGEPRTMPTTTTFSVAPDTYAEALARVAARAGDRARLAAAAAADTAAAEAAGAAFPVLGAGSEDPVAAGLPPLPPALRSAHWAEVAATDLPAGDTECVVCAWSLTGAADGRRRLEQQQQ

SEQ ID NO: 9222 - protein, 910 aa, Mycoplasma pneumoniae M129
MAEAKRDYYEVLGLSRDADDNDIKKAFRKLAKKYHPDRNKAPDAAQIFAEINEANDVLSNPKKRANYDKYGHDGVDNEGGFAFQADVFDSFFEEIEKSGAFDNLSESNTKKKEKTKTKKKGWFWGKSKQEESTSDTTEYADVDAGLEDYPPQSDYPDDIPDVDARIEEVDQSAYADDIPDVDAGMDWEQNAEVANSASEIIPDVDAGLADEFNTSSAAPQASDWEAMIGNPEYGYFDAAGEWNWKGFFDEAGQWVWLEETEPSSVSNDETTTDSDAVTAATTVEETDQDSWTANSAPEPVDVETPVELQPETEPEPIITLSSEPVEAPASVVIEPTPEIEETTSAVEMDASVKADVSDEADATNEPTEQDTISEPEQETDAAALEEINHTTADLEPAEVSATNDLEQDVVEKVNFSEPESTVDTAATDPVVEQATETSTNGFKFFNFSSFVLSDQNPNPQTPTHHEEDAAAPEPTVDETSGESTAPEVTIAESTVELETAAEINNPATFVEEYLQPTKTTVVDKLDEPTVAKPTVSDSENSVAPEPEFVAGPEQTFSWKPAISETEEIPLTAVEPASETQTLIAEDVTSPVTPTATAIPAPSINAVPTAPVAETFEAAVDFLKEAAKIEAQLPLVPTVPEQIDGTDPSLLTQWDEYLEKTRKLFHKLFLTEQLPFIVKTDQFEIVDPNLDEHNVNLIYTEHVPQICFLNEQLKEIRYTRKLVDPQTQVTTTESITLEVQLSHKSQTEAIAIFKGFGHDYGSGCGDLKVVLKVIPSVFFQLQADGLHTAALVDPLVAYNGGLIDVFGPVNSFKVDIEGGIANNDLIEFNQLGVLRTKTKRGSLYVHLYYSSVAKKGTKTNCQVQQFFDLVHVEYKLLNYNLKQLHNYHSALTAQKKTLDRKSYQCLAVESH

SEQ ID NO: 9223 - protein, 299 aa, Canavalia ensiformis
DISSTEIAVYWGQREDGLLRDTCKTNNYKIVFISFLDKFGCEIRKPELELEGVCGPSVGNPCSFLESQIKECQRMGVKVFLALGGPKGTYSACSADYAKDLAEYLHTYFLSERREGPLGKVALDGIHFDIQKPVDELNWDNLLEELYQIKDVYQSTFLLSAAPGCLSPDEYLDNAIQTRHFDYIFVRFYNDRSCQYSTGNIQRIRNAWLSWTKSVYPRDKNLFLELPASQATAPGGGYIPPSALIGQVLPYLPDLQTRYAGIALWNRQADKETGYSTNIIRYLNATAMPFTSNLLKYPS

SEQ ID NO: 9224 - protein, 389 aa, Oryza sativa Indica Group
MADEKLAKLREAVAGLSQISDNEKSGFISLVARYLSGEEEHVEWAKIHTPTDEVVVPYDTLEAPPEDLEETKKLLNKLAVLKLNGGLGTTMGCTGPKSVIEVRNGFTFLDLIVIQIESQYPRVVADEFLPWPSKGKTCKDGWYPPGHGDIFPSLMNSGKLDLLLSQVTPKTLADVKGGTLISYEDKVQLLEIAQVPDAHVNEFKSIEKFKIFNTNNLWVNLKAIKRLVEADALKMEIIPNPKEVDGVKVLQLETAAGAAIRFFDHAIGINVPRSRFLPVKATSDLQLVQSDLYTLVDGFVTRNPARTNPSNPSIELGPEFKKVGCFLGRFKSIPSIVELDTLKVSGDVWFGSSITLKGKVTITAQPGVKLEIPDGAVIENKDINGPEDL

SEQ ID NO: 9225 - protein, 378 aa, Amanita muscaria
MRFVQIDVNILPLSILLGASNLSVMANQYHNDLLAPYLALDQGGKFHAEYVWIDGDGGLRSKTTTVDQKVTDISQLRVWDFDGSSTNQAPSGNSDVYLRPSAIFKDPFRGGENILVLSETYNNDGTPNRTNHRHHTAKVMELAKDEIPWFGIEQEYTLFDADGSPYGWPKGGFPGPQGPYYCGAGTGKVFARDLIEAHYRACLYAGVNISGINAEVMPSQWEFQVGPCEGISMGDHLWMARYLLIRVAEQWGVKVSFHPKPLQGDWNGAGAHTNYSTLAMREPGGMKYIEAAIEKLAKRHDEHIAVYGEDNEMRLTGRHETGHIGTFSSGVANRGASIRVPRHVANKGYGYLEDRRPASNIDPYRVTGIIIETTILDK

SEQ ID NO: 9226 - protein, 316 aa, Rhodothermus marinus
MAQAVKDYYEILGVPENATEEEIKKAYRKLAREWHPDRNPDKPNAEERFKEIQEAYSVLSDPEKRRQYDMMRKNPFGAFGGFGPGNGSRFYRTPEGTYVHFETSGNLEDLLDEEFGFGGLGDIFSRFFGGFGRTGTRHDPFARARRPRDVEVRVQLPFEQALRGGKTDITLPDGQKVRINIPKGVRPGFKIRLKDGGPTIAGVPQGNVYIIFEVEPHPRFRREGDDLYTTITINPLEAMLGTTREIVDAYGRRIKVRIPPGTQPGERLRIRGHGVETDTHTGDLYVEVQLEIPRNLSAEQQRILREAAEKAGLIRS

SEQ ID NO: 9227 - protein, 302 aa, Arabidopsis thaliana
MTNMTLRKHVIYFLFFISCSLSKPSDASRGGIAIYWGQNGNEGNLSATCATGRYAYVNVAFLVKFGNGQTPELNLAGHCNPAANTCTHFGSQVKDCQSRGIKVMLSLGGGIGNYSIGSREDAKVIADYLWNNFLGGKSSSRPLGDAVLDGIDFNIELGSPQHWDDLARTLSKFTHRGRKIYLTGAPQCPFPDRLMGSALNTKRFDYVWIQFYNNPPCSYSSGNTQNLFDSWNKWTTSIAAQKFFLGLPAAPEAAGSVYIPPDVLTSQILPTLKKSRKYGGVMLWSKFWDDKNGYSSSILASV

SEQ ID NO: 9228 - protein, 302 aa, Arabidopsis thaliana
MTNMTLRKHVIYFLFFISCSLSKPSDASRGGIAIYWGQNGNEGNLSATCATGRYAYVNVAFLVKFGNGQTPELNLAGHCNPAANTCTHFGSQVKDCQSRGIKVMLSLGGGIGNYSIGSREDAKVIADYLWNNFLGGKSSSRPLGDAVLDGIDFNIELGSPQHWDDLARTLSKFSHRGRKIYLTGAPQCPFPDRLMGSALNTKRFDYVWIQFYNNPPCSYSSGNTQNLFDSWNKWTTSIAAQKFFLGLPAAPEAAGSGYIPPDVLTSQILPTLKKSRKYGGVMLWSKFWDDKNGYSSSISASV

SEQ ID NO: 9229 - protein, 302 aa, Arabidopsis thaliana
MTNMTLRKHVIYFLFFISCSLTKPSDASRGGIAIYWGQNGNEGNLSATCATGRYAYVNVAFLVKFGNGRTPELNLAGHCNPAANTCTHFGSQVKDCQSRGIKVMLSLGGGIGNYSIGSRKDAKVVADYLWNNFLGGKSSSRPLGDAVLDGIDFNIELGSPQHWDDLARSLSKYSHRGRKIYLTGAPQCPFPDRLMGSALNTKRFDYVWIQFYNNPPCSYSSGNTQNLFDSWNKWTTSIAAQKFFLGLPAAPEAAGSGYIPPDVLTSQILPTLKNSRKYGGVMLWSKFWDDKNGYSSSILASV

SEQ ID NO: 9230 - protein, 302 aa, Arabidopsis thaliana
MTNMTLRKHVIYFLFFISCSLSKPSDASRGGIAIYWGQNGNEGNLSATCATGRYAYVNVAFLVKFGNGQTPELNLAGHCNPAANTCTHFGSQVKDCQSRGIKVMLSLGGGIGNYSIGSREDAKVIADYLWNNFLGGKSSSRPLGDAVLDGIDFNIELGSPQHWDDLARSLSKFSHRGRKVYLTGAPQCPFPDRLMGSALNTKRFDYVWIQFYNNPPCSYTSGNTQNLFDSWNKWTTSIAAQKIFLGLPAAPEAAGSGYIPPDVLTSQILPTLKKSRKYGGVMLWSKFWDDKNGYSSSILASV

SEQ ID NO: 9231 - protein, 482 aa, Arabidopsis thaliana
MDLFRVWSGMDFLAWRGMAYTLLLLNFVFACQLLLLQPLVSALDGQSVDAAELFERASQSIKVKRYSDALDDLNAAIEADPALSEAYFKRASVLRHFCRYEDSENSYQKYLEFKSGDSNAEKELSQLHQAKSALETASTLYESKDIAKALEFVDKVVLVFSPACSKAKLLKVKLLMVSKDYSGAISETGYILKEDENNLEALLLRGRAYYYLADHDIAQRHYQKGLRLDPEHSELKKAYFGLKKLLKKTKSAEDNANKGKLRVSAEEYKEAIALDPEHTANNVHLYLGLCKVSVRLGRGKDGLNSCNEALNIDAELIEALHQRGEAKLLLEDWEGAVEDLKQAAQNSQDMEIHESLGKAEKALKMSKRKDWYKILGISRTASISEIKKAYKKLALQWHPDKNVGNREEAENKFREIAAAYEILGDDDKRARFDRGEDLEDMGGGGGGGYNPFHGGGGGGQQYTFHFEGGFPGGGGGFGGFGF

SEQ ID NO: 9232 - protein, 357 aa, Arabidopsis thaliana
MEGKFAISESTNLLQRIKDFTQSVVVDLAEGRSPKISINQFRNYCMNPEADCLCSSDKPKGQEIFTLKKEPQTYRIVQQLLQENRHASKRDIYYMHPSAFKAQSIVDRAIGDICILFQCSRYNLNVIHLIILLCCRLVMGWLKFREAGRKFDCLNSLNTAYPVPVLVEEVEDIVSLAEYILVVEKETVFQRLANDMFCKTNRCIVITGRGYPDVSTRRFLRLLMEKLHLPVHCLVDCDPYGFEILATYRFGSMQMAYDIESLRAPDMKWLGAFPSDSEVYSVPKQCLLPLTEEDKKRTEAMLLRCYLKREMPQWRLELETMLKRGVKFEIEALSVHSLSFLSEVYIPSKIRREVSSP

SEQ ID NO: 9233 - protein, 235 aa, Hyacinthus orientalis
GGLNSQHIFAYINTTIYPLTSIPLILYCMLPAICLLTGKFIVPPISNVASIWFISLFLSIFATGILEMRWSGVGIDEWWRNEQFWVIGGVSAHLFAVFQGLLKVLAGIDTNFTVTSKASDEDGDFTELYMFKWTTLLIPPTTLLVVNLVGVVAGISYAVNSGYQSWGPLFGKLFFAFWVIVHLYPFLKVPMGRQNRTPTIVVVWSILLASIFSLLWVRIDPFTTRVTGPQCCNVE

SEQ ID NO: 9234 - protein, 770 aa, Medicago truncatula
MVNQENLLLYEKIWIKRTLQRAIDLLILLLLFSLLCYRIFFIISNKTFTIPWFLAFSCESWFTYTWIILLNTKWSPAVTKTYPNRLLQRLPENELPCVDLFVTTADPVLEPPIITLNTVLSLLALDYPANKLACYVSDDGCSVFTFYGLLEASKFAKFWVPFCKKYNIQVRAPFRYFSQVTNSDDDSAEFKQEWLKMKDMYDNLSHKIEDVTRNSTSFQFEGEYAVFLNTEKRNHPSIVKDQVLMLEIEQTKKTNITRWQVILENYDSLSDGLPHLIYISREKRPKYEHNYKAGAMNVLTRVSGLMTNAPFMLNVDCDMVVNNPKIIQHAMCILMDSKNGKDVAFVQCFQQFYDGIKDDPFGNQWVASFEYIIKGMGGLQGPFYGGTNTFHRRNAIYGLYPDEIQYGRKGKITEKMLIQQFGSSKEFVKSVTHAFEGSGNSIDGISPSNLLDKAIQVSDCGYEYGTSWGKQMCWLYGSISEDVPTGLNMQRKGWRSECCTPEPTAFMGCAPGGLLTTMIQQKRWSSGLTVVFFSKHSPVMCTLFGKIQFRAGLSYCWLTNWGLRSVFEVSYAALVAYCIITNTSIFPKGLGLWIPLTLFVIYTIHTLQEYLSKGLSLRFWWNNQRMITMRSTSVWFIGFLSAMLKLLGISDTIFEVTQKESPTSGVIGDDANAGRFTFDESPAFVVGTTILLVQLTALVVKILGVQLVVHSGNGCGLGELMCSVYLVVCYWPFLKGLFARGKYGIPLSTIFKSALLTFIFVHFSRIAVVS

SEQ ID NO: 9235 - protein, 467 aa, Vitis vinifera
MDGVAWRGFVYTIFILNFVFACQLLLLPPLVSAVGDKPGNSAELFERVSQSVKVKRYSEALDDLNAAIEADPTLSEAYWHRASILRQICRYEESEKTYKKFLELNPGNSAAEKELSQLSQSQSALDTASNLFETGGFTKALDYIDKVVLVFSPACAKAKLLKVKLLLAAKDYSSAISETGYMLKEDENNLEALLLRGRAYYYLADHDVAIRHYQKGLRLDPEHGELKKAYFGLKNLLKKTKSAEDNVNKGKLRLAVEDFKGALSLDPNHLAHNVHLHLGLCKVLVQLGRGKDALISCTEALNIDEDLIDALVQRGEAKLLTEDWEGAVEDLKSAAQRSPQDMNIREALMRAEKSLKLSKRKDWYKILGVSKTAPVSEIKRAYKKLALQWHPDKNVDNREEAEAQFREIAAAYEVLGDEEKRTRYDRGEDIEDMGMGGGGGGGFNPFGGGGQQFTFHFEGGFPGGFNF

SEQ ID NO: 9236 - protein, 432 aa, Debaryomyces hansenii CBS767
MFLKRILLLLAFYLLKNVAAFDASSNSNVAVYWGQNSGGGQKSLSTYCASDAVDIVLLSFLYSFPGDLAIDFSNACSDSFSDGLSHCTQIGKDIKTCQDNGKIVLLSLGGAIGNYGFDSDSEGQDFAKTLWNKFGGGSDDERPFDDAIVDGFDFDLENKQQTGVSALGKELRSYFAKDSSKSYYLSAAPQCPYPDESVGDLLSEVDVDFAFIQFYNNYCKLGSSFNWDTWQDYATNTSPNKDIRLFLGLPGDSNSAGSGYSSASDVESYLSDIKSNKNFGGISLWDAASSWRNTNNGKNFAQQMKSLLGSSKSDGTTTSSSETASTGSTSKSASTEATSIKATSTTSTGVGSTADIKAAPTSTNDGNVLTTYTRPSTFKTITTTGTVSYIVTLSQSPTFEDGLYAGNDYHNSAPPDGQYDNSKFNNGQWNGN

SEQ ID NO: 9237 - protein, 267 aa, Oryza sativa
  misc_feature (237)..(237): Xaa can be any naturally occurring amino acid
MASSRLALPAAIFCAVVVAASLGGAAATGKTGRITVYWGQTSSEGGLREACGTGLYSTVIISFLTDFGGGNYKLNLAGHAWSAVGPDVKYCQSKGVLVLLSIGGGVGRYSLASQADAKAVADHLWNFYLGGTSTKSRPFGDAVLDGVDFDIELGSNAHYGDLARYLKAYSGRKPGGRKVWLTAAPQCPFPDRMLGEALRTGLFDRVHVQFYNNPVCNYRASNVAAFTSAWNKWAASXLPGSSVYLGLPAASGAANNGYVAPATLKET

SEQ ID NO: 9238 - protein, 416 aa, Treponema pallidum subsp. pallidum
MVFGCSLRRRCFRRPAFVPVSRAHPVFLCVRANVDKDSLDGVIVAKKDYYEVLGISKTASGEEIKKAYRRLAIQFHPDRNQGNKEAEERFKEATEAYEVLIDAQKRAAYDRYGFDGLKDMHGAHGFNSSAFQGFEDIFGGGFSDIFENIFGTSSRRGGSGNDGSGGSGRGANLRYDLQISFEEAVYGKKSELHYVRDETCITCKGAGSASGGRKMCPDCKGTGQIRRSTGFFSIAQSCARCGGEGTIIESPCARCAGSGIERKKQKIIVSIPAGVEEGRRITIPRQETPVAQAVPTGTCTCLCLFVRMSISNVKVLTCTVQLRYRTQAILGAQVTVRALDGSAQQVRVPAGTQGGALLRVKGMGVPLARGAGDLYVKVLVRIPTTLSARSRALLAEISQEEGENAHPPLLELSSLK

SEQ ID NO: 9239 - protein, 102 aa, Triticum aestivum
TQSDLYTLVDGFVIRNPARVNPANPSIELGPEFKKVANFLARFKSIPSIVELDSLKVSGDVWFGSGITLKGKVTITAKSGVKLEIPDGAVLENKDVNGPEDL

SEQ ID NO: 9240 - protein, 102 aa, Triticum aestivum
HYRTSLYKKAGWYRSGIPGISSTHASGEELPSLNENRSRCMRQLERMRPDHLRKLNPTPYKVSVSAQLYDFIHFLWLNEAPSRRTAMKTDDNGSIQHRIESR

SEQ ID NO: 9241 - protein, 403 aa, Chlorobium tepidum TLS
MKRDYYEILGVARSADKDEIKKAYRKLALKYHPDKNPDNKEAEEKFKEVNEAYEVLSNDDKRRRYDQFGHAGVGSSAASGSGPGGAGYGDINDIFSAFNDMFSGGGGRARTGGSPFSGFEDVFSGGFSGSGSGRRRSAGIQGTDLKIRLKLTLEEIAKGVEKTIKIKKLVTCRECNGTGSKSGKTEICPTCHGSGEVRQATKTMFGQFMNISVCPTCGGEGRVVKDRCPSCYGEGIKQGEATVKITVPAGVQDGNYLTLQGQGNAGPRGGAPGDLIVVIEEKPHELFKRNGDDIIYDLSVGFPDLVMGTKIEVPTLDGHVKLTIPAGTQPNTMLRIGGKGIGHLRGGGSGDLYVRVNVFVPKEVSGKDRDLLKELKKSTVICPNHGDENHEKSIFEKAKDIFS

SEQ ID NO: 9242 - protein, 303 aa, Arabidopsis thaliana
  misc_feature (52)..(52): Xaa can be any naturally occurring amino acid
MTNMTLRKHVIYFLFFISCSLSKPSDASRGGIAIYWGQNGNEGNLSATCATXGRYAYVNVAFLVKFGNGQTPELNLAGHCNPAANTCTHFGSQVKDCQSRGIKVMLSLGGGIGNYSIGSREDAKVIADYLWNNFLGGKSSSRPLGDAVLDGIDFNIELGSPQHWDDLARTLSKFSHRGRKIYLTGAPQCPFPDRLMGSALNTKRFDYVWIQFYNNPPCSYSSGNTQNLFDSWNKWTTSIAAQKFFLGLPAAPEAAGSGYIPPDVLTSQILPTLKKSRKYGGVMLWSKFWDDKNGYSSSILASV

SEQ ID NO: 9243 - protein, 305 aa, Oryza sativa
MMTSRMFSAMQMLIMVVVALAGLAAGARAGDIAIYWGQNGNEGTLAQTCATGNYRFVIVAFLPVFGKGQTPVLNLAGHCDPASNGCTGVGADIKSCQSLGIKVMFSIGGGVGNYGLSSRDDAKQVAAYLWNNYLGGTSPSRPLGDAVMDGIDFDIESGGGMYWDDLARYLKAYSRQGSSKKPVYLTAAPQCPFPDASLGVALSTGLFDYVWVQFYNNPPCQYSSSNGVGNLASAWKQWTSIPAGRVFLGLPAAAEAAGSGFVETSDLVSKVLPVVKKSPKYGGIMLWSRYYDGLTGYSDKVKSSV

SEQ ID NO: 9244 - protein, 84 aa, Brassica napus
  misc_feature (2)..(2): Xaa can be any naturally occurring amino acid
  misc_feature (6)..(6): Xaa can be any naturally occurring amino acid
  misc_feature (11)..(11): Xaa can be any naturally occurring amino acid
  misc_feature (17)..(17): Xaa can be any naturally occurring amino acid
  misc_feature (20)..(20): Xaa can be any naturally occurring amino acid
  misc_feature (25)..(25): Xaa can be any naturally occurring amino acid
  misc_feature (30)..(30): Xaa can be any naturally occurring amino acid
  misc_feature (33)..(34): Xaa can be any naturally occurring amino acid
  misc_feature (39)..(39): Xaa can be any naturally occurring amino acid
  misc_feature (42)..(42): Xaa can be any naturally occurring amino acid
  misc_feature (44)..(44): Xaa can be any naturally occurring amino acid
MXATTXNLPQXKSAVDXLTXMSENXRSGFXNLXXRYLSXEAXHXEWSKIQTTTDENRCSPIKWLPVEVSRDQESFWNKPWLSLK

SEQ ID NO: 9245 - protein, 662 aa, Hypocrea jecorina
MSWKLTKSMSLLFPLSPTFRPPTSPSPSPFDWQNETDWPCAELKDTHLGPLSAFSRSPSTSTITDKDEKGTSPGATTPTSENAIAASEALSQAPVVKKPGILVVTIHEGQGFSLPEQHRSAFASSHQSSRSSGGALAGSVRPDGQRVAGSYTNGARPHSSGGGFGSLPTNHGRISGKYMPYALIDFDKVQVFVNSVEGSPENPLWAGGNTQYKFDVSRVTELVIHLYMRNPAAPPGSGRSQDIFLGVARINPRFEERQPTTDDAKSSKKDREKAADAQRQKGEGHSGVEWVDVQYGTGRIKVGVEFVETRAGKLKIEDFELLKVVGKGSFGKVMQVRKKDTNRIYALKTIRKAHIISRSEVAHTLAERSVLAQINNPFIVPLKFSFQSPEKLYFVLAFVNGGELFHHLQKEHRFDVNRSRFYTAELLCALECSHGFSVIYRDLKPENILLDYQGHIALCDFGLCKLDMKDEDRTNTFCGTPEYLAPELLLGQGYNKTVDWWTLGVLLYEMLTGLPPFYDENTNEMYRKILSEPLHFSDVVPPAAKDLLTKLLNRDPKKRLGANGSAEIKAHPFFHDIDWRNVLQRKYEPTFKPSVTDAMDTANFDPEFTSEAPQDSYVEGPMLSQTMQDQFQGFSYNRPIAGLGDAGGSVRDPSFVGSLQDN

SEQ ID NO: 9246 - protein, 421 aa, Microcystis aeruginosa PCC 7806
MKNYYEILQIPRNASNNQIKAAFRRLARQYHPDYNPNDPEAVTKFREIEQAYRVLSDKDKRKEYDRSLSPEIPTFQRSAEDFYQQGWHYAQEKNYQLAIAFYQQAIAINPQFWQAYLQRAEVYYHNQQDRQVLSDCRQVLQLKPDCSQAYYYLGLSRQRLGYTQSSLEAYGKAIAIDQNNPQFYYQRGLALEELSELPAARKDFQIAAKKFKQQGNFRRYHAIINKLKYVHKSYRQQQSIKWSKTLFIIFNLLKISFLSLLKPKTGLAESFFKLDRNQALATGILAAIVSSFFIAFTWQNWTVKSEFLLLLGWAAFPFITLTLSSWLGRKLSNKYGSFTGDIFLAGLIILPFSIIILLTSYLSINGDIIGAIIGVTGGYLTGILYYSYRHLSNISSQISLLLLPFVLGFLTVNIWGVYYYL

SEQ ID NO: 9247 - protein, 616 aa, Oryza sativa Japonica Group
MSMTEVPSKRSSESGSRRNSRSGTRSSLQKINEVPDQGNRTRKSGLRAFMGFLGMGHGSVEKNMLKPRDEDPLIDSDDERPESFEDEFRRKEMRRGIDLATTLERIEKNFVITDPRLPDNPIIFASDSFLQLTEYNREEILGRNCRFLQGPETDRATVRKIRDAIDNQAEVTVQLINYTKSGKKFWNLFHLQPMRDQKGDVQYFIGVQLDGTEHVQDDAAKEGVVLVKKTADNIDEAAKELPDANLRPEDLWANHSKVVLPNPHMKDTASWRAIQKVLESGESIGLKHFRPVKPLGSGDTGSVHLVELLNTGEYFAMKAMDKSIMLNRNKVHRATAERQILDLLDHPFLPTLYASFQTKTHICLITDYCPGGELFVLLDNQPLKVLHEDAVRFYAAEVVVALEYLHCQGIIYRDLKPENILLHRDGHISLTDFDLSCLTSCRPQVFLPEDADEKKGRKNGSYPIFFAEPMRASNSFVGTEEYIAPEIITGAGHTSAVDWWALGILLYEMLYGYTPFRGKTRQRTFANILHKDIRFPASISVSLAARQLMYRLLHRDPANRLGSYEGANEIKGHPFFRGINWPLIRATAPPKLEIPLFSKDDMEKKGLVTNNRTDMF

SEQ ID NO: 9248 - protein, 340 aa, Glycine max
MGMDYYGILEVDRNASDEELKRAYRKLAMKWHPDKNPTNKKEAEIQFKQISESYEVLSDPQKRAIFDRYGEGGLNGGMQTPDEGVASFFRTGDGPTAFRFNPRNANNIFAEVFGCSSPFGGMGRGFGCGGSGRGRGMGMGGGSWVSRSFGGMFGNDMFREGRSMNQGPRRKAPPIENTLLCSLEELYKGSTRKMKISREITHASGRIFLVEEILNIEIHPGWKKGTKITFPEKGNEQPNVIAADLVFIIDEKPHSVFTRDGNDLVVTQKISLTEAEALTGYTIQLTTLDGRGLNIVVKNVTNPDYEEVITGEGMPISKDPTKKGNLRIKFNIEIPDIVGA

SEQ ID NO: 9249 - protein, 185 aa, Brassica rapa subsp. pekinensis
FGFQLNMELQLALQMSEKRVLRTQTLLCDMLLRDSPAGIVTQSPSIMDLVKCDGAAFLYHGNYYPLGVAPTEAQIKDVVEWLLANHADSTGLSTDSLGDAGYPGAAALGDAVCGMAVAYITKRDFLFWFRSHTAKEIKWGGAEHHPEDKDDGQRMHPRSSFKAFLEVVKSRSQPWETAEMDAIHS

SEQ ID NO: 9250 - protein, 854 aa, Oryza sativa Japonica Group
MASKGTEGGHGGVERKEQQQQRGYQLPRDSRGSLEVFNPSSASSFRTAAAAPKSASPFLAIPDREEDNVVAQQRAAEWGLVLQTDHHTGLPQGVSARPSSGSARTSSEDNPQQQQSAAAIPRVSEELRAALSAFQQTFVVSDATHPNHPIMYASAGFFNMTGYTSKEVVGRNCRFLQGSGTDPHEIDKIRQSLANGSNYCGRILNYKKDGTPFWNLLTIAPIKDEDGRLLKFIGMQVEVSKYTEGKKDTVVRPNGLSESLIKYDARQKDHARSSVSELLLALKNPRSLSESSNNTLKRKSQESLSMSMTEVPSKRSSESGSRRNSRSGTRSSLQKINEVPDQGNRTRKSGLRAFMGFLGMGHGSVEKNMLKPRDEDPLIDSDDERPESFEDEFRRKEMRRGIDLATTLERIEKNFVITDPRLPDNPIIFASDSFLQLTEYNREEILGRNCRFLQGPETDRATVRKIRDAIDNQAEVTVQLINYTKSGKKFWNLFHLQPMRDQKGDVQYFIGVQLDGTEHVQDDAAKEGVVLVKKTADNIDEAAKELPDANLRPEDLWANHSKVVLPNPHMKDTASWRAIQKVLESGESIGLKHFRPVKPLGSGDTGSVHLVELLNTGEYFAMKAMDKSIMLNRNKVHRATAERQILDLLDHPFLPTLYASFQTKTHICLITDYCPGGELFVLLDNQPLKVLHEDAVRFYAAEVVVALEYLHCQGIIYRDLKPENILLHRDGHISLTDFDLSCLTSCRPQVFLPEDADEKKGRKNGSYPIFFAEPMRASNSFVGTEEYIAPEIITGAGHTSAVDWWALGILLYEMLYGYTPFRGKTRQRTFANILHKDIRFPASISVSKSSVIFF

SEQ ID NO: 9251 - protein, 302 aa, Arabidopsis thaliana
MTNMTLRKHVIYFLFFISCSLSKPSDASRGGIAIYWGQNGNEGNLSATCATGRYAYVNVAFLVKFGNGQTPELNLAGHCNPAANTCTHFGSQVKDCQSRGIKVMLSLGGGIGNYSIGSREDAKVIADYLWNNFLGGKSSSRPLGDAVLDGIDFNIELGSPQHWDDLARSLSKFSHRGRKVYLTGAPQCPFPDRLMGSALNTKRFDYVWIQFYNNPPCSYTSGNTQNLFDSWNKWTTSIAAQKLFLGLPAAPEAAGSGYIPPDVLTSQILPTLKKSRKYGGVMLWSKFWDDKNGYSSSILASV

SEQ ID NO: 9252 - protein, 605 aa, Mucor racemosus
MADFTDSLIKNIGVHSSSPVMTSVNMGQLGEKLRQARTTTLASLSQALSKKPEAAAAAATAPNAVNESTTTPTTMQLPASEKATSQLEINVVEARNLTIADARKADTYCIVHYEGNTTSTLDKVDDGILPSTPLVIKSQVASGAFKAFEIMMSASSPKWMHRVNFDVTAGNKEITVFVYDRGNKLPNGEDRFLGMSSIVPNLVNKKTVELIFPLHGRPDDDQEVTGDVRLQVTFIDPKKANLKPEDFRIVRMIGQGSVGKVYEVIKRDSGRTYAMKVLSKRLLLAENEVDTAFNERNVLVQSLSSPFIANLKYSFQTTNHLFLVMDYFPGGELFDFLERERCLSEKRCQFFAAEIVCAFDNIHARNIVYRNLKPESILLDAHGHIALTDFGLCKQLKNKMDLIQGVPQVITQEYLAPEMVMQKPYGMAADWWSLGVLMFELLTGSPPFHSVEQGELFRQILEAPIKFPAGGCITEEAKDFICQLLERDPAKRLGSHGDVAQVKAHPFFKDLNWDVVYKKQMQLPFVPEVEEQLREEAIAAAAAISIPVTNSKTESTNANVMPVADQSKFKGFSYIREDVMAKKGEHRLGVNPEDEDPEVDFWFRQ

SEQ ID NO: 9253 - protein, 1099 aa, Vitis vinifera
MASKSFKASRSSLSTTSDVSDSIHNKPPLPPTVTFGRRTSSGRYISYSRDDLDSELGSGEFMNYTVHIPPTPDNQPMEGSMDPSISQKVEEQYVSNSLFTGGFNSVTRAHLMDKVIESETSHPQMAGAKGSSCAILGCDAKVMSDERGADILPCECDFKICRDCYLDAVKTGGGICPGCKEPYKALDLDELAVENGRPLPLPPPAGMSKMERRLSLMKSTKSVLMRSQTGDFDHNRWLFETRGTYGYGNAIWPKDGVFGNGKEDDASEPQELVSKPWRPLTRKLKIPAAVLSPYRLLIFVRMVALGLFLEWRVTNKNEDAVWLWGMSVVCEIWFAFSWLLDQLPKLCPINRSTDLNVLKEKFETPSPNNPTGKSDLPGIDIFVSTADPEKEPPLVTANTILSILAADYPVEKLACYVSDDGGALLTFEAMAEAASFANTWVPFCRKHDIEPRNPETYFNLKRDPYKNKVRPDFVKDRRRVKREYDEFKVRINGLPDSIRRRSDAYHAREEIKAMKLQRQNRDDEAVETVKVPKATWMADGTHWPGTWMNPGSEHSKGDHAGIIQVMLKPPSDEPLQSTADDTRLIDLTDVDIRLPLLVYVSREKRPGYDHNKKAGAMNALVRASAIMSNGPFILNLDCDHYIYNSQAMREGMCFMMDRGGDRICYVQFPQRFEGIDPSDRYANHNTVFFDVNMRALDGLQGPVYVGTGCLFRRIALYGFDPPRSKEHHPEMSLSLLPKRFGNSNFLIDSIPNGRPPGALTIPRELLDASTVAEAISVISCWYEDKTEWGNRVGWIYGSVTEDVVTGYRMHNRGWKSVYCVTKRDAFRGTAPINLTDRLHQVLRWATGSVEIFFSRNNALLASPRMKLLQRVAYLNVGIYPFTSIFLIVYCFLPALSLFSGQFIVQTLNVTFLTYLLVITVTLCMLAVLEIKWSGIELEEWWRNEQFWLIGGTSAHLAAVLQGLLKVIAGIEISFTLTSKSGGDDIDDEYADLYVVKWTSLMIPPITIMMTNLIAIAVAFSRTIYSVLPQWSRLLGGVFFSFWVLAHLYPFAKGLMGRRGRTPTIVFVWSGLIAITISLLWVAISPPSGSTQIGGSFEFP

SEQ ID NO: 9254 - protein, 302 aa, Arabidopsis halleri subsp. gemmifera
MTNINLIKHVIYLLFFISCFLTKPSDTSRGGIAIYWGQSGNEGNLSATCATGRYAYVNVAFLVKFGNGQTPELNLAGHCNPAANTCTHFGSQVKYCQSRGIKAMLSLGGGIGNYSIGSKEDAKVVADYLWNNFLGGKSSSRPLGDAVLDGIDFNIELGSPQHWDDLARSLSKLTHRGRKVYLTGAPQCPFPDRLMGNALNTRRFDYVWIQFYNNPPCSYTSGNTQNLFDSWNKWTTSITAQKIFLGLPAAPEASGSGYIPPDVLTSQILPTLKKSRKYGGVMLWSKFWDDKNGYSSSILATV

SEQ ID NO: 9255 - protein, 302 aa, Turritis glabra
MTNINLLKHVIYFLILISCFVTKPSDASRGGIAIYWGQNGNEGNLSATCATGRYAYVNVAFLVKFGNAQTPELNLAGHCNPAANTCTHFGSQVKDCQSRGIKVMLSLGGGIGNYSIGSREDAQVVADYLWNNFLGGKSSSRPLGDAVLDGIDFNIELGSPQHWDDLARSLSKFSHRGRKVYLTGAPQCPFPDRLMGSTLNTRLFDYVWIQFYNNPPCSYTSGNTQNLFDSWNKWTTSITAQKIFLGLPAAPEGAGSGYIPPDVLTSQILPILKKSRKYGGVMLWSKFWDDKNGYSSSILASV

SEQ ID NO: 9256 - protein, 302 aa, Arabidopsis kawasakiana
MTNINLIKHVIYLLFFISCFLTKPSDASRGGIAIYWGLDGIEGNLSATCATGRYAYVNVAFLVKFGNGQTPELNLAGHCNPAANTCTHFGSQVKYCQSRGIKVMLSLGGGIGNYSIGSKEDAKVVADYLWNNFLGGKSSSRPLGDAVLDGIDFNIELGSPQHWDDLARSLSKLSHRGRKVYLTGAPQCPFPDRLMGNALNTRRFDYVWIQFYNNPPCSYTSGNTQNLFDSWNKWTTSITAQKIFLGLPAAPEASGSGYIPPDVLTSQILPTLKKSRKYGGVMLWSKFWDDKNGYSSSILATV

SEQ ID NO: 9257 - protein, 755 aa, Medicago truncatula
MVMENKTSLPLYEKIWVKHTFSRVMDSFTLLLLFLLLAYRVSSYNNHNFSCFVAFLCESWFTITWITTMSTKWTPAHTKTFLDRLLLRVSDSELPALDMFVTTADPVLEPPIITVNTVLSLLALDYPANKLACYVSDDGCSTLTFYALVEAAKFAEIWVPFCKKYNVQCRAPFRYFCDEAMANNNDLPQFKHDWLKMKEEYEQLSSKIENAAQKSIPCQLMGEFAVFSQTQARNHPTIIRVIRENKGISDVMPHIIYISREKRPKQPHHHKAGAMNVLTRVSGLMTNAPFMLNLDCDMYVNNSKIVLHALCILLDSKGEKEVAFAQCPQRFYDAVKDDAYGNQLVALPMYIGSGFAGLQGIIYAGTNCFHRRKVMYGLSPPNEIQNAKKGQGFTNGTFLSEKETMQKFGTSKGFVESATHILEGITSDLHKSLDLEAASKVASCDYEYNTAWGKQVGWLYGSTSEDVLTGLKFHTKGWRSELCSPDPIAFMGCSPQDNLGQMAQHKRWSTGLLDIFLSKHCPIFGTLFGKLQFRECLSYIWITNWALRSIPEICYALLPAYCIITNSSFLPNKELSMWIPTTLFVIYNVSNLIEHVKSGLSIRTWWNNQRMGRITTMNSCFLGFLTIILKNLRISDTNFEITKKEQVPSNESTNENAGRFIFNESLIFLPGTTILLVQLIAIFTSWLGWKPLIKSGADGYGAGEVFCSAYVVLCYLPFLKGLFGKGKYGIPLSTICKSMVLALLFVHLCGTTIAN

SEQ ID NO: 9258 - protein, 397 aa, Mycobacterium nonchromogenicum
MAQREWVEKDFYKELGVSSDASEKDIKSAYRKLASELHPDRNPNNPAAAERFKAVSEAYSVLSDEAKRKEYDETRRLFAGGGFGRRFNGGGGFGGANFDRFSTGGDGNEFNLNDLFGAAGQTGGANIGDLFGGLFGRGAQQRPSRPRRGNDLETESELSFLEATKGVEMPLRLTSAAPCTNCHGSGARPGTSPRVCGSCNGSGVISSNQGAFGFSEPCTDCRGSGSIIEHPCAECKGTGRAARTRTINVRIPPGVEDGQRIRLAGQGEAGLRGAPSGDLYVTVRVRPDKVFGRDGDDLTVTIPVSFAELALGTTLSVPTLDGKVGVRVPKGTADGRILRVRGRGVPKRGGGSGDLLVTVKVAVPPNLEGAAQQALEAYAAAERASGFDPRAGWAGNR

SEQ ID NO: 9259 - protein, 928 aa, Gibberella zeae PH-1
MDRSPVPVTGAPVIQAFGGLNGYWGQLGSEPLKAYCDSHPEYITLSFVNQAPEQNPSNLPGTNFAGHCAGGTYGNSNLLSECYTIQEGIPYCKDRGVKILLSIGGVYSDEGSNYKVTTDDKGRDFADFLYKSFGPHNEHSNPIRPFDSIDNDGNTVHAAVDGFDFDIEHDLPNGPYIAMINRLRELDEGLTITGAPQCPTSDEYFYMKDMIKSAKFDALFVQFYNNPWCDAVSQGHEGESFNYDKWVEIIEESDCSKDAKLYVGLPASEEAAPGGGYLEPEDLKDLVCELTTKPHFGGVSLWDLTRGAGNIIEGKSYNEHVMDALKYGCDLVSVPTTTTSAMTTTTEEASTSTNITTTEATTVHTTTTSDVSTTSGASSTEDATSTDITTASDVSSMEEATATSDVSASASTDATTSMDATSTDTAASTDTAASTEAVASTYTTAATNSDASTSADVATSMDAATSTDATASADATASTDVTTSSDASVSTDATASTETTATGANTSSVVTDPAASGVSATATESSADTATDSTTDSASKSDVLSATSDLTVTSDTSSVTGAASSSTIDAPVESDTATGTAATTNVSGATEPTTIATAYSTYRGWNTTSTGAAAYTQAYGNPTTLAHSGSLTTEGSPAYTNYPGNTGAVSMTTSTVCTTRVHTVTQCPPEVVDCLFGSVTTETIPLYTTVCPVTDKAKHTGYATQYAPPPQYETRTVYTTSVHAINKCAPGVVDCPYGSVTTETIPVYTTICPVTETYNQAPTDVPVNHEIKTLYTSQAHTVAQCQPENPNCQVGAVTTEIASWTTAIVPAHETQLMKAYKPAAELPKPLTVESHLNGTVYTSVVVPPATLKTATKPGVFEQARPTYKQTAQEQHSGAAAPTGGRNDKGPIETYAPAPITPATAGASSMVVGLTALAGIALLQVVALW

SEQ ID NO: 9260 - protein, 188 aa, Aspergillus niger
CRDIVEAHYRACLYAGIKISGINAEVMPSQWEYQVGPCDGIEMGDHLWMSRFLLHRVAEEFGVKISFDPKPIKGDWNGAGLHTNVSSASMRAEGGMKVIEAAMKKLEARHVEHIAVYGEGNEERLTGRHETGNIDKFSYGVADRGGSIRIPRQVAKDGKGYFEDRRPASNACPYQITGIIVETLMGGN

SEQ ID NO: 9261 - protein, 419 aa, Methanococcus maripaludis S2
MEIYKLQDLYLLIRTNTKNIVINKNTYIRNIKADYSFHLFDSYLYYFLLKCGETVITSEERNLAAKKLLKLANGMYEDIIRGKRPKLTFPIRSLANAKFDVEKGTFAILGKEKDRMLTVNQAKIFAQTIKMMEFSKGLLDTNDFSTLREAYYVSKNWGEARFDDQQPSNGVIEDIEAASEFLREDLGFIPEEDGAAVIGPLRIVDRTAEGDEIKIDCTKLGSGAYSIPNDVTKLEFETKADFILAIETAGMFARLNAEGFWKKHNCILISLKGVPARATRRFIKRLNEEYKLPILVFTDGDPYGYLNIYRTLKVGSGKAVHLADKLAVPEARLIGVTPQDIVDYELPTHPLKDHDIKRLKDGLKNDDFVKSFPQWQNALVQMADSKVRAEQQSLAKYGLKYVVEEYLPAKVEDSSTWLP

SEQ ID NO: 9262 - protein, 471 aa, Solanum tuberosum
  misc_feature (155)..(155): Xaa can be any naturally occurring amino acid
MATATTLSLADAEKLNNLKSAVAGLNQISVNEKAGFINLVGRYLSGEAQHIDWSKIQTPTDEVVVPYDKLAPLSEDPAETKKLLDKLVVLKLNGGLGTTMGCTGPKSVIEVRNGLTFLDLIVKQIEALNAKFGCSVPLLLMNSFNTHDDTLKIVXKYVNSNIDIHTFNQSQYPRLVTEDFAPLPCKGNSGKDGWYPPGHGDVFPSLMNSGKLDALLATGKGICLCCKLRYLEILNHLILNKNEYCMEVTPKTLADVKGGTLISYEGKVQLLEIAQVPDEHVNEFKSIEKFKIFNTNNLWVNLSAIKRLVEADALKMEIIPNPKEVDGVKVLQLETAAGAAIKFFDRAIGANVPRSRFLPVKATSDLLLVQSDLYTLTDEGYVIRNPARSNPSNPSIELGPEFKKVANFLGRFKSIPSIIDLDSLKVTGDVWFGSGVTLKGKVTVAAKSGVKLEIPDGAVIANKDINGPEDI

SEQ ID NO: 9263 - protein, 110 aa, Glycine max
NSARGRFLPVKATSDLLLVQWDLYTLQDGLVIRNQARANPENPSIELGPEFKKVSYFLSRFKSIPSIAELDSLTLAGDVWFGAGATLKSEGRDSTLGARKSLQRVLFFKI

SEQ ID NO: 9264 - protein, 344 aa, Vantanea guianensis
DLEPVNPADVPVTAAGALKSYKLAAKAISRLQSLPSGNISMLCDVLVKEVSDLTGYDRVMVYRFHEDEHGEVVAECHRPDLEPYLGLHYPATDIPQASRFLFMKNKVRMICDCLALPVKVIEDKRLAQPLSLCGSTLRSPHGCHAQYMADMGSIASLVMSVTINEDDDEMDSDQQTGRKLWGLVVCHHTSPRFVPFPLRYACEFLIQVFGVLINKEVELAAQMREKHILRTQTVLCDMLLRDAPVAIITQSPNVMDLVKCDGAALYYRNKFWLLGVTPTEAQVRDIAEWLLEYRRGSTGLSTDSLMEAGYPGASVLGNAVCGMAAVSITSKNFLFWFRSITSEF

SEQ ID NO: 9265 - protein, 126 aa, Oryza sativa
  misc_feature (16)..(16): Xaa can be any naturally occurring amino acid
  misc_feature (23)..(23): Xaa can be any naturally occurring amino acid
  misc_feature (33)..(35): Xaa can be any naturally occurring amino acid
  misc_feature (45)..(45): Xaa can be any naturally occurring amino acid
  misc_feature (50)..(52): Xaa can be any naturally occurring amino acid
  misc_feature (55)..(55): Xaa can be any naturally occurring amino acid
APAGPAQTRDREKAGXTSPTARXRSGQEEQPEXXXKGRGTNKIVXPHHTXXXPPXDPKDTKTPPNKLAVRKPTGGLSTTRGCTGPKSATEPPNGSTDPDSTVNQIEAPTKKKGNKEPPLVINSLHT

SEQ ID NO: 9266 - protein, 306 aa, Vitis vinifera
MGVDYYNILKVNRNASEDDLRRAYRRLAMIWHPDKNPSNKREAEAKFKQISEAYDVLSDPQKRQIYDLYGEEALKSGQHHNHHPNPSFRFNPRDADDIYEENRVYKDGFFRTSNGDYGSQALRKAAPVENLLPCSLEELYKGAKKKMKISRTISDAFGKIRTVEEILSIDIKPGWKKGTKITFPEKGNQEPGVIPADLIFVVDEKPHLVFKRDGNDLIVDREITLLEALTGKALELKTLDGRSLEIQLTDIVKPGYEMVVPNEGMPISKEPSRKGNLRIKFDVNYPSRLTSEQKSDLKRVLGGSSS

SEQ ID NO: 9267 - protein, 295 aa, Capsicum annuum
MTINLLLPSILFLALIQTSIARSGIAIYWGQNGNEATLNDTCASGNYAYVNLSFLNKFGNGQTPEINLAGHCNPAVNGCTILGPQIKFCQKLGVKVMLSMGGGVGNYSLASKKDAKDVARYLYNNFLGGRSSFRPLGNARLDGIDFDIELGSSLYYEDLAQYLKRYSKLGRKMYLTAAPQCPFPDRLLGTALNTGLFDNVWIQFYNNPSCQYTTNNVDDLKNSWTRWTTSVNARRIFLGLPAAPQAAGSGFIPAEVLTGGILPVIKKSRKYGGVMLWSKFWDEQTGYSASIVKSV

SEQ ID NO: 9268 - protein, 362 aa, Arabidopsis thaliana; identical to SEQ ID NO: 9163

SEQ ID NO: 9269 - protein, 313 aa, Bacteroides fragilis YCH46
MAYIDYYKILGVDKNASQDDIKKAFRKLARKYHPDLNPNDPSAKDKFQEINEANEVLSDPEKRKKYDEYGEHWKHADEFEAQKKARQHAGGGGGGFSGFGGDGGSYWYSSDGEGFSGGDAGGFSDFFESMFGHRGGGGRGNAGFRGQDFNAELHLSLRDAARTHKQVLNVNGKQVRITIPAGVADGQVIKLKGYGGEGINGGPAGDLYITFKIAEDSVFKRLGDDLYVDVEMDLYTAVLGGEKVIDTLEGKVKLKIKPETQNGTKVRLKGKGFPVYKKEGQFGDLIITYSVKIPTNLTDRQKELFRELQQSMN

SEQ ID NO: 9270 - protein, 1120 aa, Oryza sativa
GEVRRGKNRTHPQYTLDARLHAVFEQSGASGRSFDYTQSLRASPTPSSEQQIAAYLSRIQRGGHIQPFGCTLAVADDSSFRLLAYSENTADLLDLSPHHSVPSLDSSAVPPPVSLGADARLLFAPSSAVLLERAFAAREISLLNPLWIHSRVSSKPFYAILHRIDVGVVIDLEPARTEDPALSIAGAVQSQKLAVRAISRLQALPGGDVKLLCDTVVEYVRELTGYDRVMVYRFHEDEHGEVVAESRRNNLEPYIGLHYPATDIPQASRFLFRQNRVRMIADCHAAPVRVIQDPALTQPLCLVGSTLRSPHGCHAQYMANMGSIASLVMAVIISSGGDDDHNISRGSIPSAMKLWGLVVCHHTSPRCIPFPLRYACEFLMQAFGLQLNMELQLAHQLSEKHILRTQTLLCDMLLRDSPTGIVTQSPSIMDLVKCDGAALYYHGKYYPLGVTPTEVQIKDIIEWLTMCHGDSTGLSTDSLADAGYPGAAALGDAVSGMAVAYITPSDYLFWFRSHTAKEIKWGGAKHHPEDKDDGQRMHPRSSFKAFLEVVKSRSLPWENAEMDAIHSLQLILRDSFRDSAEGTSNSKAIVNGQVQLGELELRGIDELSSVAREMVRLIETATVPIFAVDTDGCINGWNAKVAELTGLSVEEAMGKSLVNDLIFKESEETVNKLLSRALRGDEDKNVEIKLKTFGPEQSKGPIFVIVNACSSRDYTKNIVGVCFVGQDVTGQKVVMDKFINIQGDYKAIVHNPNPLIPPIFASDENTCCSEWNTAMEKLTGWSRGEVVGKLLVGEVFGNCCRLKGPDALTKFMIVLHNAIGGQDCEKFPFSFFDKNGKYVQALLTANTRSRMDGEAIGAFCFLQIASPELQQAFEIQRHHEKKCYARMKELAYIYQEIKNPLNGIRFTNSLLEMTDLKDDQRQFLETSTACEKQMSKIVKDASLQSIEDGSLVLEKGEFSLGSVMNAVVSQVMIQLRERDLQLIRDIPDEIKEASAYGDQYRIQQVLCDFLLSMVRFAPAENGWVEIQVRPNIKQNSDGTDTMLFLFRFACPGEGLPPEIVQDMFSNSRWTTQEGIGLSICRKILKLMGGEVQYIRESERSFFHIVLELPQPQQAASRGTS

SEQ ID NO: 9271 - protein, 295 aa, Capsicum annuum
MTINLLLPSILFLALIQTSIARSGIAIYWGQNGNEATLNDTCASGNFAYVNLSFLNKFGNGQTPEINLAGHCNPAVNGCTILGPQIKFCQKLGVKVMLSMGGGVGNYSLASKKDAKDVARYLYNNFLGGRSSFRPLGNARLDGIDFDIELGSSLYYEDLAKYLKRYSKLGRKMYLTAAPQCPFPDRLLGTALNTGLFDNVWIQFYNNPSCQYTTNNVDDLKNSWTRWTTSVNARRIFLGLPAAPQAAGSGFIPAEVLTGGILPVIKKSRKYGGVMLWSKFWDEQTGYSASIVKSV

SEQ ID NO: 9272 - protein, 1128 aa, Oryza sativa Japonica Group; identical to SEQ ID NO: 8457

SEQ ID NO: 9273 - protein, 295 aa, Capsicum annuum
MTINLLLPSILFLALIQTSIARSGIAIYWGQNGNEATLNDTCASGNFAYVNLSFLNKFGKGQTPEINLAGHCNPAVNGCTILGPQIKFCQKLGVKVMLSMGGGVGNYSLASKKDAKDVARYLYNNFLGGRSSFRPLGNARLDGIDFDIELGSSLYYEDLAKYLKRYSKLGRKMYLTAAPQCPFPDRLLGTALNTGLFDNVWIQFYNNPSCQYTTNNVDDLKNSWTRWTTSVNARRIFLGLPAAPQAAGSGFIPAEVLTGGILPVIKKSRKYGGVMLWSKFWDEQTGYSASIVKSV

SEQ ID NO: 9274 - protein, 432 aa, Capsicum annuum
MAQILAPSAQWQMRMTKSSTDASPLTSKMWSSVVLKQNKKLAVKSSAKFRVFALQSDNATVNRMEQLLNLDVTPYTDKIIAEYIWIGGSGIDMRSKSRTISKPVQHASELPKWNYDGSSTGQAPGEDSEVILYPQAIFKDPFRGGNNILVICDAYTPAGEPIPTNKRHKAAQIFSDPKVVSEVPWFGIEQEYTLLQPNVKWPLGWPVGAYPGPQGPYYCGAGADKSFGRDISDAHYKACLYAGINISGTNGEVMPGQWEFQVGPSVGIEAGDHIWCARYLLERITEQAGVVLTLDPKPIEGDWNGAGCHTNYSTLSMREEGGFEVIKKAILNLSLRHKEHISAYGEGNERRLTGKHETASIDQFSWGVANRGCSIRVGRDTEKQGKGYLEDRRPASNMDPYVVTGLLAETTILWEPTLEAEALAAQKISLKV

SEQ ID NO: 9275 - protein, 101 aa, Zea mays
AKVLCTSPCFYVTIYINITNKVLLDQFFDHAIGINVPRSRFLPVKATSDLQLVQSDLYTLVDGFVTRNSARTNPSNPSIELGPEFKKVGSFLGRFKSIPSI

SEQ ID NO: 9276 - protein, 401 aa, Arabidopsis thaliana; identical to SEQ ID NO: 748

SEQ ID NO: 9277 - protein, 366 aa, Rhodopirellula baltica SH 1
MSDSFILCSGKTATGTKKVFRRLASMTKCKLEYIWLDGYQPTQSMRSKTKIVEDFSGKVEDAEMWSFDGSSTEQAPGGASDCLLKPVFCLPDPDRLGTGFLVMCEVMNADGTPHRSNGRATIKDDDNDFWFGFEQEYTIFDPETKKPIGFPAEGFPGPQGPYYCSVGAGKAVGREIVEEHLELCLQAGLNVEGINAEVMMGQWEFQIFAKGAAQAGDEIWLARYLLDRTGEKYGMEINYHCKPVKGDWNGSGMHANFSNTTLRTCGSKEVYEAICQAFEPRITEHIDVYGADNDQRLTGLHETQSIDKFSYGISDRGASIRIPIATVEKGWKGWLEDRRPASNADPYMVASAIIATVKTANVPAGV

SEQ ID NO: 9278 - protein, 393 aa, Mycobacterium terrae
MAQREWVEKDFYKELGVSSDASEKEIKSAYRKLASELHPDKNPNNPAAADRFKAVSEAYSILSDESKRKEYDETRRLFAGGGFGRRFNGGGGFDRFSTGGDGSEFNLNDLFGQAGQAGGANIGDLFGGLFGRGAQQRPSRPRRGNDLETDSELSFLEATKGVEMPLRLTSAAPCTNCHGSGARPGTSPRVCASCNGSGVISSNQGAFGFSEPCTDCRGSGSIIEHPCSECKGTGRAARTRTINVRIPPGVEDGQRIRLAGQGEAGLRGAPSGDLYVTVRVRPDKVFGRDGDDLTVTIPVSFSELALGTTLSVPTLDGKVGVRVPKGTADGRILRVRGRGVPKRGGGHGDLLVKVKVAVPPNLEGPAQEALEAYAAAERSSGFDPRAGWAGNRS

SEQ ID NO: 9279 - protein, 458 aa, Pyrus pyrifolia
MATGVIDKLKSHVATLSQISENEKNGFINLVARSVSGEAQHVDWSKIETPTDEVVVPHAGLEPAPKDTAEIKALLDKLVVLKLNGGLGTTMGCTGPKSVIEVRDGLTFLDLIVMQIEHLNDKFGSSVPLLLMNSFNTHDDTQKIVEKYSKANVQIHTFNQSQYPRLVVDDFTPLPSKGQTGKDGWYPPGHGDVFPSLKNSGKLDLLLSQGREYVFISNSDNLGAIVDLKILHHLIKNKNEYIMEVTPKTLADVKGGTLISYEGKVQLLEIAQVPEEHVDEFKSIEKFKIFNTNNLWVNLNAIKRLVDADALKMEIIPNPKEVNGVKVLQLETAAGAAIKFFDHAIGINVPRARFLPVKATSDLLLVKSDLYNVRDGFVIRNKLRRDPQNPVIQLGPEFKKVDDFLSRFKSIPSLLECDGLRVDGDIWFGSGIKLKGNVHCSVSSEEMLNIPDNITLRE

SEQ ID NO: 9280 - protein, 1130 aa, Hordeum vulgare subsp. vulgare
MSSSRPATSSSSRNRQSTQERMLAQTTLDAELNAEFEESSDSFDYSKLVEAQRDTPTVLQEGRSEKVIAYLQHIQRGKMIQSFGCLLALDEKSFNLIAFSENAPEMLTTVSHAVPSVDDPPRLDIGTNVRSLFTEQGATALHKALGFADVSLLNPILVQCKTSGKPFYAIVHRATGCLVVDFEPVNPTEFPATAAGALQSYKLAAKAISKIQALPGGSMELLCNTVVKEVFELTGYDRVMAYKFHEDNHGEVFAEITKPGLEPYLGLHYPATDIPQAARFLFMKNKVRMICDVRARTLKVIEDEALPFDISLCGSSLRAAHSCHLQYMENMNSIASLVMAVVVNESEEDDEAESEQPAQQQKKKILWGLVVCHHESPRYVPFPLRYACEFLAQVFAVHVNKEFEVQKQLREKSILRMQTILSDMLFKEASPLTIVSGTPNIMDLIKCDGAALLYGDKVWRLGNAPTESQIRHIALWLSEVHMDSTGLSTESLHDAGYPGASALGDMVCGIAVAKINSNDILFWFRSHTAEEIRWGGAKNDPSDQDDSRRMHPRLSFKAFLEVVKMKSLAWSDYEMDAIHSLQLILRGALDDVAKPTGKASLDEQIGDLKLDGIAELQAVTSEMVRLMETATVPILAVDGNGLVNGWNQKAAELTGLRVDDAIGRHILTLVEESSVPVVQRMLYLALQGKEEKEVRFDMKTHGPKRDDGPVILVVNACASRDLHDDVVGVCFVAQDMTVHKLVMDKFTRVKGDYMAIVHNPNPLIPPIFGADEFGWCSEWNAAMTKLTGWHREEVLDKMLLGEVFDSSNASCLLKNKDAFVGLCVLINSALAGEETEKAPFGFFDRSGKYTECLLSVNSRANEDGLITGVFCFIHIPSHELQQALQVQQASEQASLRRLKAFSYMRHAINNPLSGMLYSRKALKNTDLNEEQMRQIHVSDNCHHQLNKILADLDQDNIMENSSCLDLEMAEFVLQDVVVAAVSQVLIACQGKGIRISCNLPERFMKQLVYGDGVRLQQILSDFLSISVKFSPVGGSVEISAQATKNSIGENLHLIDLELRIKHRGLGVPAELMAQMFEEENTEQSEEGLGLLVSRNLLRLMNGDVRHLREAGMSIFILTAELACAPTAMRQ

SEQ ID NO: 9281 - protein, 458 aa, Pyrus pyrifolia
MATGVIDKLKSHVATLSQISENEKNGFINLVARSVSGEAQHVDWSKIETPTDEVVVPHAGLEPAPKDTAEIKALLDKLVVLKLNGGLGTTMGCTGPKSVIEVRDGLTFLDLIVMQIEHLNDKFGSSVPLLLMNSFNTHDDTQKIVEKYSKANVQIHTFNQSQYPRLVVDDFTPLPSKGQTGKDGWYPPGHGDVFPSLKNSGKLDLLLSQGREYVFISNSDNLGAIVDLKILHHLIKNKNEYIMEVTPKTLADVKGGTLISYEGKVQLLEIAQVPEEHVDEFKSIEKFKIFNTNNLWVNLNAIKRLVDADALKMEIIPNPKEVDGVKVLQLETAAGAAIKFFDNAIGINVPRARFLPVKATSDLLLVKSDLYNVRDGFVIRNKLRRDPQNPIIQLGPEFKKVDDFLSRFKSIPSLLECDGLRVDGDIWFGSGIKLKGNVHCSVSSEEMLNIPDNITLRE

SEQ ID NO: 9282 - protein, 420 aa, Physcomitrella patens subsp. patens
MADTGGQDGSTAASRLNAGRRDPYEVLGLPRDATDQQIKSTYRKLALKYHPDKNTGNPEAADKFKEVAYSYGILSDPEKRRQYDAGGFDAFDLEGLDMELDLSNLGTVNTMFAALFSKLGVPIKTTISATVLEEALNGTVTIRPLPLGRPVNDKVEKQGAHFFGITISEAQAEAGVVVRVVSSVQSKFKLLYFEQEENGGLGLALQEDSVKTGKVTSAGMYFLHFQVYRLDPTINALAIAKDPDAAFFKRLEGLQPCEMSKLTAGTHIFAVYGDNFFKSASYTIEAICAESYLETAVKLKDIETQLLSKRNELKQFEVEYREVLARFQAVTNKYAQEKQAVDELLKSREKIQESFTSVPTTPKKMSGGSSSSAKVIGGDSATSADENESPPTEDPNVDKANKSKKWFNLNFKSGIGATGK

SEQ ID NO: 9283 - protein, 466 aa, Zea mays
MASAAAGAPKRCYYEVLGLSRDCSPTDIKLAFRRLALSLHPDKQPPGSDLALATAAFQELQHAHSVLSDPQERAYYDSHRSQIIFSHPASAGAKSASTVPDLFAFFSSSAFSGFSDTGRGFYKVYGDVFDRVFAQELAYARRMGVPEPAAPPVIGNLDSPYAQVTAFYSYWLGFGSGMDFGWAAAWDAARGESRRVRRLMEEDNKKAMRKARREYNDAVRGLAAFCKKRDKRVVDMVLKKKLEEEKRKAEEKERRKEEDKRKKERAMAYQEHEWARAEEGLYDEDEEEEMRAKKELLYCAACNKKFKSDKQWKNHEQSKKHRNKIAELRKTFREEESLKKAEEGEGDWNEVDMGFDFKPTQESDDASAFSDAAEELAEEFESNYAGNGHHGKCEVQPEGSVHVNDVDDIMEGPSSSNVNNGAVIMVLQLPSPLPVLCCSRRNKLFSHLEETGHAMLKSLVGSAWFS

SEQ ID NO: 9284 - protein, 219 aa, Chlamydomonas reinhardtii
MVRLTLIARVQDGLPLAEGLDSEKDVEIDKYKSQAKSLLKKFSQQPSHQAARLSVESGAYTFHYLLDAGVCYLTLTEKGYPKKLAFQYLEELTNEFSRLYGPQVHTVSRPYAFIKFDTFIQKTKKLYMDTRTQRNLSKLNDDLAEVHSIMTRNIQEVLGQGEKLDNMAKMSSTLAAESKQYATRAKDLHRQALLRKWVPLGVVVGIVLLLFWVRAKFYT

SEQ ID NO: 9285 - protein, 369 aa, Ustilago maydis 521
MNRFPETDPYEVLGLPQGCSSFDIRMAYKKLALKNHPDRAPPAEKEQATARFKVVGEAYELLSDDRKRREYDASRLGSSQGFGPAEEYQDDLSRKHFGTSPDGVPFSFTWESSADSARRAQAGRRAGRPFGVDGFDPFELFNMMFTNEFRSTNGGVGNVGGGRGGGHDPFGMMNSGHPMGGSIFGDNDPFFQNHRRMADSVGFGFGTPFAATRGPFGPAMGTQFGDPYGSGGPFGAGFASSSSSSSSGSTRMSSTTYGGFSGTSESTTTRIINGHKQTVTRKVDENGNVTVHTITPEGSTVHVNGLQQEHHPLLGNAAPAASTALPGNSHARRPSHVGTAANPIVIDSESEPPNRAREYGGLGSGEFDL

SEQ ID NO: 9286 - protein, 561 aa, Coprinopsis cinerea okayama7#130; identical to SEQ ID NO: 955

SEQ ID NO: 9287 - protein, 788 aa, Synechococcus sp. PCC 7002
MLELVPSFKNKRVTLRKHTLLMRYMILINLIIGAWYLYWRWTESLNLQALWFAIPLVCAETYMFLGGILFFYSIWRPIERNNKNLSALKPQFLSKNFPSVDVFITCYNEPSEMVYTTAQAALSMDYPLEKLRVYILDDGNSSEMRAMAEKLCLQDLQRPALQEIAETIQRQKYLRQSYIAQLNAIKKDLVEIEGFINSYRLIIPSDHQELKNALDWLNHLRPAAVSDRDWIICQTILGEGLDNAIVHAHKNSPQKQSITLEISIFNYAFILRIWDKGDFFDLESHLKGLNDDIEEEAEHGRGISIIRQLVDQFFYIRTDDQQNCLMIIKELSPVDTGDKKEKYQSYIHSLKQLMLSDSLNSQSIIDIYEQKIKKLEAEVDKYTQQLIDLPRCRYIARQKPKDRPHHAKAGNINHAIFSGETNGQLILTLDADHIPKPNFLQRVIPHFYRFNIENGCYELNHVAFVQTPQAFSNLPSDDPFGHNAHFFYGPIQQGKDGMNAAFYTGTNAVLRREALVQMGLQHFSDDYISNENKLEEFEMIGALSSISITEDMNTAMRLHATGWRSIYHNEILAEGLAPDDLRSTLQQKLRWAQGTIQVLLRDNPLFKTGLSFGQRIQYFQTMYSYFSGFFVLILLSCPLISLGTGLIPVGSFGADFAWHFIPAYMLNRITLWISAWGISWRELWRNEQYMIGLFPLQIQAVLSVFTGTSIKFEVTPKQRQSGIYFSLIPVQIFFFLATIMALIWGGFQLLFYDGLSELTYFINAVWCVYHLGLLWSIIRAAYWQPEEQ

SEQ ID NO: 9288 - protein, 397 aa, Pseudomonas fluorescens PfO-1
MGLNEFGEAQEGFAERPQEYEELMAKRDYYEVLGVERGSSEADLKKAYRRLAMKHHPDRNPGDKASEDLFKEANEAYEVLSDSSKRAAYDQYGHAGVDPSMGGGGAGFGGQNFSDIFGDVFSDFFGGGRGGSRGGAQRGSDLRYTLELNLEEAVRGTTVNIRVPTLVNCKPCDGSGAKKGSSPSTCPTCGGIGQVRMQQGFFSVQQTCPRCHGQGKIISDPCDSCHGDGRVEEYKTLSVKVPAGVDTGDRIRLSGEGEAGTQGGPTGDLYVVINVREHDIFQRDGKHLFCEVPISFVDAALGGELEIPTLDGRVKLKIPEGTQTGKQFRVRGKGVAPVRGGGAGDLMCRVAVETPVNLTRRQRELLEEFRSSLADDNSHSPKTTGWFDGVKRFFGDL

SEQ ID NO: 9289 - protein, 454 aa, Asparagus officinalis
MGPPDVVPSEHVEFDFSDVFGPSPTPTSTGVNVFASDGSTPAASDDIVYTEPAVILARSHSLVGPTALVCQSPRLRKHILHEADLELVECPSGVEGEQDKPFSCVAEEHEVPSSENVERVGLEDFDFLKVVGQGAFGKVFQVMKKGTSEIYAMKVVRKDTILEKNHSEYMKAERDILTKIDHPFIVQLRYSFQTKYRLYLVLDFVNGGHLFYQLYHQGLFREDLARIYTAEIVSAVSHLHANGIMHRDLKPENILLDADGHVMLTDFGLAKEFEENTRSNSLCGTIEYMAPEIIQGKGHDKVADWWSVGILLFEMLTGKPPFIGGNRDKIQQKIVKDKLKLPAYLTSEAHSLLKGLLQKEASKRLGGGPAGSNEIKNHKWFKLINWRKLEAREIQPSFKPNVAGKICVANFEERWTSMPLTVSPVASPVAGSGNFSGFTYVKPSVFLQKPSPLG

SEQ ID NO: 9290 - protein, 343 aa, Yarrowia lipolytica CLIB122
MQEALKQALKTPLHPLPLSTPSLLMFNSSSNTNIALYWGQDQAGTQLPLSTYCQSNSADIYVVSFLDSFSGKQTNGTGEMAVSYEGPMTSLGGEISICQSLGRKVLISLGGESGQYGLDSGADGETLAGQLWDTFGGGKNASVQRPFGNVIIDGFDLDIEHGDPVGYGDLVNRLRVLYATDTSKMYYVSAAPQCPFPDEWITQALEQSEVDFAFVQFYNNDCGLDEPKNFNFDQWADFAQTRAANKHMKVFLGVPASRKSADTGYVGVPVLTRYIQKLLNHTSFGGVMMWDASSAFGNRDHGKSYVEYAKGALNGVVSNGAGTNFVSGVVFEVVFAVVVVWIL

SEQ ID NO: 9291 - protein, 82 aa, Zea mays
  misc_feature (12)..(12): Xaa can be any naturally occurring amino acid
  misc_feature (43)..(43): Xaa can be any naturally occurring amino acid
FLFKQGHEVYAXAIGTPLVACFAQAALRGAFKVVWIYKQPLTXRTDYAMKVWNPCTKKCFTVDGTEGYALGGIMTGVVEQRP

SEQ ID NO: 9292 - protein, 157 aa, Musa acuminata
MAGESCNLDKDEAEIFKPSPSSSPSPSPPSPPSSSQPPPPSSVLLKPSEESGIQRPEIPESPPAPTITFAASSTPKLDEEPSNPGEESPAPVRFSNRCSACRKKVGLTGFRCRCGDLFCGRHRYSDAHECSFDYKAAGREEIAKANPVIKAAKIIKI

SEQ ID NO: 9293 - protein, 112 aa, Zea mays
  misc_feature (11)..(11): Xaa can be any naturally occurring amino acid
  misc_feature (53)..(53): Xaa can be any naturally occurring amino acid
VCPIQTPTDDXVLPYDTGASPSTKISTRLQKQLTNLAGIKLNAILGTTMDCTXPRSVIEIHNELPFLDHIENQMESLIKKNGCNVPLLLMNSCNTLDDTHNIGDNHSNPNIQ

SEQ ID NO: 9294 - protein, 474 aa, Triticum aestivum
  misc_feature (103)..(103): Xaa can be any naturally occurring amino acid
MAAAAVAADSKIDGLRDAVAKLGEISENEKAGFISLVSRYLSGEAEQIEWSKIQTPTDEVVVPYDTLAPPPEDLDAMKALLDKLVVLKLNGGLGTTMGCTGPXKSVIEVRNGFTFLDLIVIQIESLNKKYGCSVPLLLMNSFNTHDDTQKIVEKYSNSNIEIHTFNQSQYPRIVTEDFLPLPSKGQTGKDGWYPPGHGDVFPSLNNSGKLDTLLSQGKEYVFVANSDNLGAIVDIKILNHLITNQNEYCMEVTPKTLADVKGGTLISYEGRVQLLEIAQVPDEHVNEFKSIEKFKIFNTNNLWVNLKAIKRLVDAEALKMEIIPNPKEVDGVKVLQLETAAGAAIRFFEKAIGINVPRSRFLPVKATSDLLLVQSDLYTLVDGYVIRNPARVKPSNPSIELGPEFKKVANFLARFKTIPSIVELDSLKVSGDVSFGSGVVLEGNVTIAAKAGVKLEIPDGAVLENKDINGPEDL

SEQ ID NO: 9295 - protein, 110 aa, Oryza sativa
MVKDTKYYDILGVKPDATVDEIKKAYRKLALKLHPDKNPDNDPEQFKQLSQAYEVLSDEKKRSLYDQVGEQGLKEGAGTGGFHGSDPFDIFNMFFGGGSGGPFGGGRQEN

SEQ ID NO: 9296 - protein, 322 aa, Glycine max; identical to SEQ ID NO: 2369

SEQ ID NO: 9297 - protein, 1130 aa, Hordeum vulgare subsp. vulgare
MSSSRPATSSSSRNRQSTQERVLAQTTLDAELNAEFEESSDSFDYSKLVEAQRDTPTVLQEGRSEKVIAYLQHIQRGKMIQSFGCLLALDEKSFNVIAFSENAPEMLTTVSHAVPSVDDPPRLDIGTNVRSLFTEQGATALHKALGFADVSLLNPILVQCKTSGKPFYAIVHRATGCLVVDFEPVNPTEFPATAAGALQSYKLAAKAISKIQALPGGSMELLCNTVVKEVFELTGYDRVMAYKFHEDNHGEVFAEITKPGLEPYLGLHYPATDIPQAARFLFMKNKVRMICDVRARTLKVIEDEALPFDISLCGSSLRAAHSCHLQYMENMNSIASLVMAVVVNESEEDDEAESEQPAQQQKKKILWGLVVCHHESPRYVPFPLRYACEFLAQVFAVHVNKEFEVQKQLREKSILRMQTILSDMLFKEASPLTIVSGTPNIMDLIKCDGAALLYGDKVWRLGNAPTESQIRHIALWLSEVHMDSTGLSTESLHDAGYPGASALGDMVCGIAVAKINSNDILFWFRSHTAEEIRWGGAKNDPSDQDDSRRMHPRLSFKAFLEVVKMKSLAWSDYEMDAIHSLQLILRGALDDVAKPTGKASLDEQIGDLKLDGIAELQAVTSEMVRLMETATVPILAVDGNGLVNGWNQKAAELTGLRVDDAIGRHILTLVEESSVPVVQRMLYLALQGKEEKEVRFDMKTHGPKRDDGPVILVVNACASRDLHDDVVGVCFVAQDMTVHKLVMDKFTRVKGDYMAIVHNPNPLIPPIFGADEFGWCSEWNAAMTKLTGWHREEVLDKMLLGEVFDSSNASCLLKNKDAFVGLCVLINSALAGEETEKAPFGFFDRSGKYTECLLSVNSRANEDGLITGVFCFIHIPSHELQQALQVQQASEQASLRRLKAFSYMRHAINNPLSGMLYSRKALKNTDLNEEQMRQIHVSDNCHHQLNKILADLDQDNIMENSSCLDLEMAEFVLQDVVVAAVSQVLIACQGKGIRISCNLPERFMKQLVYGDGIRLQQILSDFLSISVKFSPVGGSVEISAQATKNSIGENLHLIDLELRIKHRGLGVPAELMAQMFEEENTEQSEEGLGLLVSRNLLRLMNGDVRHLREAGMSIFILTAELACAPTAMRQ

SEQ ID NO: 9298 - protein, 608 aa, Orobanche densiflora
SGKPFYAIIHRVTGSLIIDFEPVKPHEVPMTAAGALQSYKLAAKAIACLQALPGGSMERLCDTMVQQVFELTGYDRVMIYKFHEDDHGEVFTEITKPGLEPYVGLHYPATDISQAARFLFMKNKVRMICDCRANHVKVVQDDNLPFDLALCGSTLRAPHGCHLQYMENMNPIASLVMSVVVSEGDEDGPNSSSSLDKRKRLWGLVVCHNTCPRFIPFPLRYACEFLVQVFSIHVNKELELKNQMLEKNILHTQTLLCDLLLRDVPLGIVSQSPNVMDLVKCDGAILLHKRTKYRLGLTPTDFQIRDIVSWLDEYHQDSTGLSTDSLYDAGFPGALALGHALCGMAAVKITDEDWLFWFRSHTAAEIRWGGAKHELGEKDDGKKMHPRSSFRAFLEVVKTRSLPWKDYEMDGIHSLQLILRNAYKESEEKDLESREIHARLNELQIGGVKEIEAVTSEMVRLIETATAPIFSVGLDGLVNGWNTKISDLTGLNVDEAIGMHFLALVEDSSADTVSKMLGLALQGKEEHDVQFEVKTHGQRRESGPISLIVNACASRDVNENVVGVCFIAQDITTQKSMMDKFTRIEGDYQSIIQNPNPLIPPIFGTDEF

SEQ ID NO: 9299 - protein, 814 aa, Hordeum vulgare subsp. vulgare
AVAQYTLDAGLHAVFEQSGASGRSFDYSQSLLAPPTPSSEQQIAAYLSRIQRGGHIQPFGCTLAVADDSSFRLLAFSENAADLLDLSPHHSVPSLDSSAAPPPVSLGADARLLFSPSSGVLLERAFAAREISLLNPLWIHSRVSSKPFYAILHRIDVGVVIDLEPARTEDPALSIAGAVQSQKLAVRAISRLQALPGGDVKLLCDTVVEHVRELTGYDRVMVYKFHDDEHGEVLAESRRGDLEPYLGLHYPATDIPQASRFLFRQNRVRMIADCHAAAVRVIQDPAMPQPLCLVGSTLRSPHGCHAQYMANMGSIASLVMAVIISSGGEDEHNMTRGVIPSAMKLWGLVVCHHTSPRCIPFPLRYACEFLMQAFGLQLNMELQLAHQLSEKHILRTQTLLCDMLLRDSPTGIVTQSPSIMDLVKCDGAALFYHGKYYPLGVTPTEAQIKDIIEWLTVCHGDSTGLSTDSLADAGYPGATALGDAVCGMAVAYITPSDYLFWFRSHTAKEIKWGGAKHHPEDKDDGQRMHPRSSFKAFLEVVKSRSLPWENAEMDAIHSLQLILRDSFRDAGEGTSNSKAIVNGQVQLGELELRGIDELSSVAREMVRLIETATVPIFAVDTYGCINGWNAKVAELTGLTVEEAMGKSLIKDLIFKESEEIVEKLLSQALRGEEGTNVEIKLKTFGSEQSKGPIFVIVNACSSRDYTKNIVGVCFVGQDITGQKVVMDKFVNIQGDYKAIVHNPNPLIPPIFASDENICCSEWNTAMENLTGWSRGEVVGKLLVGEVFGNCCRLKGPDALTKFMIALHNAIGGQD

SEQ ID NO: 9300 - protein, 462 aa, Candida albicans
MILNLIILLAISIVASASNIAAYWGQNAGGDQQTLGDYCSSSPASIIILSFLDGFPNLSLNFANQCSGTFSSGLAHCSQIGSDIKSCQQQGKTILLSLGGATGNYGFSSDSEAVQFAGTLWNKFGGGKDSERPFDDAIVDGFDFDIENKDQTGYAALATQLRKYFSTGTKSYYLSAAPQCPYPDESVGDLMSQVDLDFAFIQFYNNYCSLNQQFNWNSWSNYARGKSIKLYLGLPGSSSSAGSGFVGLSTVQRVVASIKGDSSFGGISIWDISSAENGGYLNQLYQALSGSGSPAAPSNSYQPNTPLTRTYGGSTATASAYISVGFTAGATHGSTTTNDLLAWIDSLFGSSQSSVQQYATPVQSVTATPQPVAATTTSAPKPTASAFNWFGWFDGTTTSTTLQTVYSTVPADQTVYVTLTTTVGSQMLQSLFDKRDVIAEAKSTNLQICWLLFIPLLALICS

SEQ ID NO: 9301 - protein, 611 aa, Orobanche fasciculata
SGKPFYAIIHRVTGSLIIDFEPVKPHEVPMTAAGALQSYKLAAKAITRLQALPSGSVKRLCNTMVQEVFELTGYDRVMVYKFHDDDHGEVFAEITKPGLDPYVGLHYPATDIPQAARFLFMKNKVRMICDCKAYHVKVVQDDNLPFDLTLCGSTLRAPHSCHLQYMENMNSIASLVMSVVVNEGDEDVPDSSSGPDKRKRLWGLVVCHNTSPRFVPFPLRHACEFLTQVFAVHVTKEWELENQLLEKNILRTQTLLCDLLLRDSPLGIISGSPNVMDLVRCDGAVLLHKNTIYRLGQTPTDLQIRDIVSWLDEYHRDSTGLSTDSLYDAGFPGALALGNAVCGMTAAKVTDKDWIFWFRSHTAAEVHWSGAKHEPGEKDDGRKMHPRSSFKAFLEVVKTRSLPWKDYEMDAIHSLQLILRNASIENVEKESEGGETHARLNELQLNGVKEIEAVTSEMVRLIETASVPIFAVDLDGLVNGWNTKIADLTGLGVNEAIGRHFLALVEDSSADTVSKMLDLAMQGKEEQNVQFEIKTHGRRSESGPITLIVNACASRDVQENVVGVCFIAHDITTQKSMMDKFTRIEGDYRSIIQSPNPLIPPIFGTDEYGWN

SEQ ID NO: 9302 - protein, 372 aa, Candida glabrata CBS 138
MNFTLADIYDSADISELRARLTADKRAVFFSPVVDDNADKSQQIHNKIQDILTLCKNSVGQQQQGFQLHGLFKKPIEFPLSGRLKGKLLQNKIQKLSITFTLLKEIQRNIEKCTAFTSRDIFYRNVELFKSQRLVVDTVDHIQKALGLTIREDLNITATQKGLIFTAVDIIINSSDTKKIKITKGKSQLIPQFDSNAFIMVCKDDPQMILKVLVIEKDAVYNTIIQKPTEGYIVVTGKGYPDMLTRKFLHRLEQCNSNLQFVILTDPDPHGINIAMKYQGFTTDSIYPCASLIRKGISILELIDGHSSTIAQVLPLSTRDIKLAQNILFSGHSDLYANMRTELQRQLFLTKKGEMNTTIIEHLLSNDRITNY

SEQ ID NO: 9303 - protein, 301 aa, Oryza sativa
MASSSQRRRALPLSFVVIVLLILAGPGPVAGDKTGQIAVFWGRNKTEGSLKEACDTGLYTTVIISFFSVFGHGRYWTDLSGHDVSRVGADVKHCQHAKNIPVLLSVGGDGYQYSLPTANSAKDVADHLWHAYLGGGRRGVFRPFGDAVLDGVDLYIDHGGPANYDVLVRRLAGYRGKPVLLTATPRCVYPDANAAAALGTGLVRRIHPRFYGDRRCSYDSSERRPFYGAWLGWTARYANASVHVGLPAAWDAASDGWINPAALVFDALPLVRGTPNYGGVVLWNRHFDRRSRYGQTIKGML

SEQ ID NO: 9304 - protein, 383 aa, Orobanche gracilis
DFEPAKPHEVPMTSAGALQSYKLAAKAIACLQALPGGSMERLCDTMVQQVFELTGYDRVMIYRFHEDDHGEVFTEITKPGLEPYVGLHYPATDIPQAARFLFMKNKVRMICDCRANHVKVVQDDNLTFHLTLCGSTLRAPHGCHLQYMENMNSITSLVMSVVVSEGDERWAQFFFGPGQEKKTLGLVVCHNTCPRFIPFPLRYACEFLVQVFSIHVNKELELENQMLEKNILHTQTLLCDVPLGIVSQSPNVMDLVKCDGAILLHERTKYRLGITPTDFQIRDIVSWLDEYHQDSTGLSTDSLYDAGFPGALALGHALCGMAAVKITDEDWLFWFRSHTAAEIRWGGAKHELGEKDDGRKMHPRSSFRAFLEVVKTRSLPWKD

SEQ ID NO: 9305 - protein, 355 aa, Pinus sylvestris
MSLLTDLINLDLSDITEKIIAEYIWIGGSGMDIRSKARTLSHPVTDPKDLPKLNYDGSSTGQAPGKDSEVILYPQAIFRDPFRRGNNILVICDTYTPAGEPIPTNKRANAQKYLAIQMLFAEEPWYGIEQEYTLLQKDVNWPLGWPVGGYPGPQGPYYCGTGADKAYGRDIVDAHYKACLYAGINISGINGEVMPGQWEFQVGPTVGISSGDQVWAARYLLERITEVAGVVLSFDPKPIQGDWNGAGAHTNYSTKSMREEGGIKVIKKAIEKLGLRHKEHIAAYGEGNERRLTGRHETADINTFSWGVANRGASIRVGRDTEREGKGYFEDRRPASNMDPYIVTSMIAETNHPLK

SEQ ID NO: 9306 - protein, 417 aa, Triticum aestivum
  misc_feature (223)..(223): Xaa can be any naturally occurring amino acid
TRPVDAPARADKRAAPATTTTTTPPPSSSGGNTTTTTSSRAAVAAPEPAACNLYQGWWTYDAEASQVPLYREAECEFLTEQVTCMRNGRRDDSYQRWRWQPSSCDLPRFDARALLERLRNKRLMFVGDSLNRNQWESMVCLVSSAIPARDQRSLAKFVGPNGSLNVFRAAEYNATVEFYWAPFLVSSNSDDPQAHSVADRVIAWRSIAKHARHWRAADLLVFXTYIWWLNNFEMKVLTRWGAGPGGVPGRGSKTWAQVGGNPHVDPGRTKVFFMGMSPNHGVPEAWGGGPGAIKCAMETQPILNHTGPLYIGTDWRLHGAAEAVLRTMRRVPVHLVDITALSEFRKDAHTSVHTLRQGKLLTPEQQADPRTYADCIHWCLPGLPDTWNHFLYAQIVAAPPPPPAQAQPLPQSSSSSL

SEQ ID NO: 9307 - protein, 146 aa, Arabidopsis thaliana; identical to SEQ ID NO: 8762

SEQ ID NO: 9308 - protein, 169 aa, Triticum aestivum
  misc_feature (7)..(7): Xaa can be any naturally occurring amino acid
ANELAMXIIPNGKSIPADKKGEADISVLQLETAVGAAIKHFKNAHGVNVPRKRFLPVKTCSDLMLVKSDLYTLQHGQLVIDPNRFGPAPLIKLGSDFKKVSSFQSRIPSIPKIVELDHLTITGPVNLGRGVTLKGTVIIVATEGSTIDIPPGSILENVVVQGSLRLLEH

SEQ ID NO: 9309 - protein, 557 aa, Arabidopsis thaliana; identical to SEQ ID NO: 8412

SEQ ID NO: 9310 - protein, 215 aa, Coccidioides immitis RS
MVKSTQISRLDGLMLSASVDDEQAEAQLAEVKGQAKMIFRRLNSNSEPEASIESGQYNLHYIIKDDICFLCIADRSYPRKLAFAYLADIANEFVNMYPPSQYLSSNLRPYAFVEFDSYLQRKKKSYQDSRASANLDRLNDELKDVTKVMTKNIEDLLYRGDSLERMGEMSGRLREDSRKYRKAAVRINWELLIKQYGPFGAVGLLVIILLWWRFF

SEQ ID NO: 9311 - protein, 331 aa, Nostoc punctiforme PCC 73102
MQNLPNFRDYYEILGVSKDASGEEIKKVYRRLARQYHPDLNPGNKESEEKFKDIGEAYEVLSDSAKRSQYDQFSRYWKQKGFAGNKQTPKAKTWQSGASDRNGNQDVDPSQFSDFESFINQVIGVKNKSGASKSSNGNTSDPFRSPRTKVAYTVNTPPRTTRRDIEARLTLPLEKAYQGGNERIRLEDGRSLEVNMPLGMVTGQTIRLRNQGVGGGDLYLKITVEPHPLFKLEGLNILCQVPVTPSEAVLGGQVEAPTLDGPVKMTIPPGVRSGQKFRLGNKGYPSDDGKRGDQLVEIQIVTPKNISQEERELYEKLRQIETFKPRADLLS

SEQ ID NO: 9312 - protein, 172 aa, Vitis vinifera
MESHDETGCQAPEGPILCINNCGFFGSAATMNMCSKCHKDLALKQEQAKLAASSIGSIVNGSSSGNGKEPIVAGTVDVQAGPVEVKAISAEASNDSSSNQIIESKVKEGPNRCTACRKRVGLTGFNCKCGNLFCAVHRYSDKHDCPFDYRTAARDAIAKANPVVKAEKLDKI

SEQ ID NO: 9313 - protein, 267 aa, Zea mays
  misc_feature (111)..(111): Xaa can be any naturally occurring amino acid
MTAGQCGNIQDQEAAPGADLYAVLGLNRECTDAELRVAYRRLAMIWHPDRCSASGSSARVEEAKERFQEIQGAYSVLSDSNKRLLYDVGVYDSEDDDADMADMMSQATPTXSVNVQESFEELQQLFVDMFQDDLDGAGFFGGLPTSRSAQGPSSTSLPPSTSPLRPTPPARSKGAQTPSSFNGAGRRGSTAKRPRTGWAGLEPDLGLSGFCFMVSKSKERPAAWACDGGDERSGSKQRLSTSRDVSGSGGGMSRSRGRAKAVETCGQ

SEQ ID NO: 9314 - protein, 474 aa, Zea mays
  misc_feature (203)..(203): Xaa can be any naturally occurring amino acid
MRYFELDFQYPIGSKRRRSCLCSVHIRLTSLEESWELLPLPEASALVARPGSSPPGLLYPDASHFPFCLLPSPPPYQTNLTESQLARTVKTPKRARARQPKRRSAKEGRKEASKAAAMGLDYYKILGVDKGATDDDLKKAYRKLAMKWHPDKNPNNKKEAENKFKQISEAYDVSVLSDPQKRAVYDQYGEEGLKGQVPPPGAXGGAGSTFFSTGGDGPTVFRFNPRNADDIFAEFFGGSSPFGGMGGSGMPGMRAGGSRFSSSIFGDDMFGSAFGGGGPDGHGMHTGGRAVKAPAIERKLPCSLEELYKGTTKKMKISREIADASGKTMPTIPVEEILTIDVKPGWKKGTKITFPEKGNETPNTIPADLVFIIDEKPHPVFTRDGNDLVVTQKIPLAEALTGYTAHVTTLDGRSLTVPISSVIHPGYEEVVRGEGMPIPKDPSRKGNLRIKFDIKFPARLTADQKSGVKRLLGQ

SEQ ID NO: 9315 - protein, 1171 aa, Oryza sativa Japonica Group
MASGSRATPTRSPSSARPAAPRHQHHHSQSSGGSTSRAGGGGGGGGGGGGGAAAAESVSKAVAQYTLDARLHAVFEQSGASGRSFDYTQSLRASPTPSSEQQIAAYLSRIQRGGHIQPFGCTLAVADDSSFRLLAYSENTADLLDLSPHHSVPSLDSSAVPPPVSLGADARLLFAPSSAVLLERAFAAREISLLNPLWIHSRVSSKPFYAILHRIDVGVVIDLEPARTEDPALSIAGAVQSQKLAVRAISRLQALPGGDVKLLCDTVVEYVRELTGYDRVMVYRFHEDEHGEVVAESRRNNLEPYIGLHYPATDIPQASRFLFRQNRVRMIADCHAAPVRVIQDPALTQPLCLVGSTLRSPHGCHAQYMANMGSIASLVMAVIISSGGDDDHNISRGSIPSAMKLWGLVVCHHTSPRCIPFPLRYACEFLMQAFGLQLNMELQLAHQLSEKHILRTQTLLCDMLLRDSPTGIVTQSPSIMDLVKCDGAALYYHGKYYPLGVTPTEVQIKDIIEWLTMCHGDSTGLSTDSLADAGYPGAAALGDAVSGMAVAYITPSDYLFWFRSHTAKEIKWGGAKHHPEDKDDGQRMHPRSSFKAFLEVVKSRSLPWENAEMDAIHSLQLILRDSFRDSAEGTSNSKAIVNGQVQLGELELRGIDELSSVAREMVRLIETATVPIFAVDTDGCINGWNAKVAELTGLSVEEAMGKSLVNDLIFKESEETVNKLLSRALRGDEDKNVEIKLKTFGPEQSKGPIFVIVNACSSRDYTKNIVGVCFVGQDVTGQKVVMDKFINIQGDYKAIVHNPNPLIPPIFASDENTCCSEWNTAMEKLTGWSRGEVVGKLLVGEVFGNCCRLKGPDALTKFMIVLHNAIGGQDCEKFPFSFFDKNGKYVQALLTANTRSRMDGEAIGAFCFLQIASPELQQAFEIQRHHEKKCYARMKELAYIYQEIKNPLNGIRFTNSLLEMTDLKDDQRQFLETSTACEKQMSKIVKDASLQSIEDGSLVLEKGEFSLGSVMNAVVSQVMIQLRERDLQLIRDIPDEIKEASAYGDQYRIQQVLCDFLLSMVRFAPAENGWVEIQVRPNIKQNSDGTDTMLFLFRFACPGEGLPPEIVQDMFSNSRWTTQEGIGLSICRKILKLMGGEVQYIRESERSFFHIVLELPQPQQAASRGTS

SEQ ID NO: 9316 - protein, 420 aa, Deinococcus radiodurans R1
  misc_feature (122)..(122): Xaa can be any naturally occurring amino acid
MEQDTAWRQEANQTFHTRATFLECARVNLGSGGRADLSRRKRRPMDYYELLGVSRTASADEIKSAYRKLALKLHPDRNKEEGAAEKFAQVSEAYSVLSDTEKRAHYDRFGSAPGAGMPGGDXFGGMGGMGGVGFDPMDIFEQLFGGAAGMGGRGRRGPARGDDLETEVRITLEQARAGEEVEVTVDRLTECEHCHGTRTEPGGKPPVTCSTCNGSGAVRGQARTIFGVVETQQVCPTCKGDGKMVVDPCTVCHGRGRTLKSEPVKVKLPKGIDEGYRIRVAGQGNEGPGGNGDLYVHIEMEPHPELHRQDENLIFPARIGFATAALGGRIQVPTLDGPQEVEVKPGTQHGELHRLRGQGMPRLQGAGTGDLIVDYEIVVPKHLNAEAKDALQAYARAVGDEVPEEHEGLFGKIGKLFGRD

SEQ ID NO: 9317 - protein, 740 aa, Nicotiana tabacum
MGEDGRGREEGEKTNLNLPLFESKAARGRNIYKLFASTVLVGICLIWIYRWINMPRRGESGRWAWIGMFLSELVFGFYWIITQSARLDVIYRFSFNNRLSLRYEEKLPGVDIFVCTADPIMEPPTLVINTILSVMSYNYPPEKLSVYLSDDGGSEYTFYALLEASRFSKYWIPFCKKFNVEPRSPAAYFEDSCSLDDKVFAQEWFNTKKLYEDMKTRIEAAIESGSIPCEIKAQHKGFSEWNSKVTKHDHHSIVQILIDGRNHNMADVDGNRLPTLVYMSREKKPKCPHNFKAGSMNSLIRVSSQISNAPIILNLDCDMYSNDPDAIRESLCFFMDEKKGHEIAFVQYPQRYNNATKNDIYGNVARVTHEIELAGLGGYGAALYCGTGCFHRRESLCGRKVSEEYTTVEWNNKEEKCTYKTVEELEEASKVVANCSYEEGTQWGKQMGLIYGCPVEDIITGLTIQCRGWKSVYYNPSKPAFLGVAPTILDVALVQHKRWSEGLFQIFLSKYCPFIYGHGKIKFAAQMGYCIYLLWAPVSVPTLFYVSVPSLCLLHGVSLFPEVSSLWFLPFAYVLFTAKFVYSLAEAMSCGDTPKSWWNLQRMWMIRRTTAYFFAFIDSVIKQLGLSQTAFALTTKVVDDDVQRRYEQEIMEFGSSSAMFTITATLALLNLISFIWGIKKLALDGVVNTVPQVILCGLIVLVNVPVYEALFFRSDKGSFPSSVLLRSVVLVSIACLLPIY

SEQ ID NO: 9318 - protein, 290 aa, Populus trichocarpa
MHNRGWRSIYCVTKRDAFRGTAPINLTDRLHQVLRWATGSVEIFFSRNNALFATRRMKFLQRVAYFNCGMYPFTSMFLIVYCVLPAISLFSGQFIVQSLSVTFLVLLLAITITLCLLAILEIKWSGITLHDWWRNEQFWLIGGTSAHPAAVLQGLLKVIAGVDISFTLTSKSATPEDADDEFADLYVVKWSFLMVPPITIMMLNLIAIAVGVARTLYSPFPQWSRLVGGVFFSFWVLSHLYPFAKGLMGRRGRVPTIVYVWSGLLSIIISLLWVYISPPGTQDYMKFQIP

SEQ ID NO: 9319 - protein, 387 aa, Agalinis fasciculata
  misc_feature (244)..(244): Xaa can be any naturally occurring amino acid
DFEPVKPYEVPMTAAGALQSYKLAAKAITRLQALPSGSLERLCDTMVQEVFELTGYDRVMIYKFHDDDHGEVLSEITKPGLEPYVGLHYPATDIPQAARFLFIKNKVRMICDCRANHVKVIQDDNLPFDLTLCGSTLRAPHSCHLQYMENMNSIASLVMSVVVNEGNEDGPDSSSHPDKKKRLWGLVVCHNTSPRFVPFPLRYACEFRAQVFAIHVNREIELENQMLEKNILRTQTLLCDMLMXDAPLGIVSQSPNVMDLVKCDGAVLIYKTKKYRLGMTPSDFQIRDIVSWLDEYHRDSTGLSTDSLYDAGFPGALALGDAVCGMAAVRITNTDWLFWFRSHTAAEIRWGGAKHEPGEKDDGRKMHPRLSFKAFLEVVKTRSLPWK

SEQ ID NO: 9320 - protein, 1112 aa, Arabidopsis thaliana; identical to SEQ ID NO: 8833

SEQ ID NO: 9321 - protein, 221 aa, Petalodiscus platyrachis
DIPQASRFLFMKNKVRMICDCQAPPVQVIQEKRLAQPLSLSGSTLRSPHGCHAQYMANMGSIASLVMSVTINEDDDEMDNDQQRGRKLWGLVVCHHTSPRFVPFPLRYACEFLIQVFGVQVNKEVELAAQMREKHILQTQTVLCDMLLRDAPVAIITQSPNVMDLVKCDGAALYYRSKFWLLGVTPTEAQIRDTAEWLLEYHGGSTGLSTDSLMEAGYPGG

SEQ ID NO: 9322 - protein, 344 aa, Oryza sativa Japonica Group
MDYYEILHVDRSATDDDIRRAYRRLAMRWHPDKNHTGKKDAEAKFKDITEAYNVLSDAGKRALYDQYGEEGLRAGGAPPQPGGGGGGADDIFAEFFGSTPFTYCNTGAGTTARAKQQAAWDAGGGGAYFGRGGFARDHGGGGAAASPQPPPVESKLACTLEELYVGVTKNMKISRNVVDASGRMKTESEILSIEVKPGWKKGTKITFPGKGNQQWSQLPADLVFVVDEKPHDVYRRDGNDLVAEARVTLADALGGTVVVLATLDGRELLVEVSGGGVAAGDEDDDDEDPVVYPGYELVVPSEGMPIAREPGRHGSLRIRFDVAFPERLTRRQRAQIKRILDAAG

SEQ ID NO: 9323 - protein, 831 aa, Arabidopsis thaliana
MPTQKDQNSPLSQVIELLKKLLHHFHNLLLYFFILWIGVIVGIIVYPSLQGLSSPSSLTIQSVSQLFFVTPPPPILSPSFQDNGLDMFLIPLKNIMHDMEDNELLWRASMDPKIRDYPYPRIPKVAFMFLTWGPLPLAPLWERFFRGHEGLFTIYVHTNSSYDEFMPQDSVFYGRRIPSKRVDWGNANMVEAERRLLANALLDINNERFILLSESCIPLFNFSTVYSFLIDSTLTHVDSYDLTIGRVRYDRRMYPHIRMHQWRKGSQWFELDRAMALEVVSDTFYWPIFKAYSRCPDEHYIPTLLNMRPSLGLRNANRTLTWTDWSKRRAHPRLFGEWEVNVEFLEWLRMKSVGDCKKNGENKMRLCFLFARKFSSTALDELLRLASIVIYLKSRYSRSAAVGSANSPSNLNICDFKFFEKMSAKKLEGSSAPANRRDPYEVLCVSKDANDQEIKSAYRKLALKYHPDKNANNPDASELFKEVAFSYSILSDPEKRRHYDNAGFEALDADGMDMEIDLSNLGTVNTMFAALFSKLGVPIKTTVSANVLEEAMNGTVTVRPLPIGTSVSGKVEKQCAHFFGVTISEQQAESGVVVRVTSTAQSKFKLLYFEQDSSGGYGLALQEEREKTGKVTSAGMYFLHFQVYRMDTTVNALAAAKDPESAFFKRLEGLQPCEVSELKAGTHIFAVYGDNFFKTASYTIEALCAKTYEDTTEKLKEIEAQILRKRNELRQFETEYRKALARFQEVTNRYTQEKQTVDELLKQRDTIHSTFSVVKTPSGNNLSNGSSSKAQGDESKGDGDSAGEEGGTENRDKSKRKWFNLNLKGSDKKLG

SEQ ID NO: 9324 - protein, 378 aa, Lentisphaera araneosa HTCC2155
MSQDYYELLGVSRSASASELKKAYRKLAVKYHPDKNPGDEVAEAKFKEISEAYEVLSDEGKRRQYDQYGHEAYTQRGEGGGGGMHGDPFDIFSQVFGGGGGGGASSIFESFFGGGGGGGPQPGADLRKDLELTFEEAVFGCKKEISLTKNEACERCDASGAEPGSKMTTCPTCRGNGQVHIKQGFFSINQECPHCHGSGKKIEKPCNTCRGNATVRKEKKVKIDVPAGVDTGSKMRIRGEGDAGEAGAPAGNLYVVFHVRNHDIFERDGDHIYCKIPVSFPTAVLGGSIEVPTLNGKESLKIPAGTQSGTKFRIKGKGVKNLRSHDTGHQIVTIIVEVPTNLNSEQKEALETFADLCGDNVQPMKESFFEKASRFFGG

SEQ ID NO: 9325 - protein, 608 aa, Ajuga reptans
SGKPFYAIIHRVTGSLIIDFEPVKPHEVPMTAAGALQSYKLAAKAITRLQSLPSGSMERLCDTMVQEVFELTGYDRVMIYKFHDDDHGEVFAEVTKPDLEPYVGLHYPATDIPQAARFLFMKNKVRMICDCKANHVKVVQDENLPLDLTLCGSTLRAPHSCHLQYMENMNSIASLVMSVVVNEGNEEGGSESTHPEKRKRLWGLVVCHLTSPRFVPFPLRYACEFLAQVFAIHVNKELELENQMMEKNILRTQTLLCDMLLRDAPLGIVSQSPNVMDLVKCDGAALLYKNKKYKLGLTPTDFQIRDVVSWLDEYHRDSTGLSTDSLYDAGFPGALALGHAVCGMAAVKINDKDWLFWFRSHTASEIRWGGAKHEPGEKDDGRKMHPRSSFRAFLEAVKTRSLPWKDYEMDAIHSLQLILRNAFKEADDKDTDTKMIHTKLNDLQIDGIQELEAVTSEMVRLIETASVPILAVDADGLVNGWNTKIADLTSLPVDKAIGRHFLDLVEDTSADIVSHMLQLALQGKEEQNVQFEIKTHGENSESGPVTLIVNACASRDVKENVVGVCFIAQDITAQKSMMDKFTRIEGDYRAIIQNPNPLIPPIFGTDEF

SEQ ID NO: 9326 - protein, 224 aa, Petalodiscus leandrianus
DIPQASRFLFMKNKVRMICDCQAPPVKVIQEKGLAQPLSLSGSTLRSPHGCHAQYMANMGSIASLVMSVTINEDDDEMDNDQQRGRKLWGLVVCHHTSPRFVPFPLRYACEFLIQVFGVQINKEVELAAQMREKHILQTQTVLCDMLLRDAPVAIIIQSPNVMDLVKCDGAALYYRSKFWLLGVTPTEAQIRDIAEWLLEYHGGSTGLSTDSLMETGYPGAAIL

SEQ ID NO: 9327 - protein, 456 aa, Orobanche pinorum
SGKPFYAIIHRVTGSLIIDFEPVNPHEVPMTAAGALQSYKLAAKAITRLQALPSGSVKRLCDTMVQEVFELTGYDRVMVYKFHDDDHGEVFSEITKPVLEPYVGLHYPATDIPQAARFLFMKNKVRMICDCLANHVKVVQDDNLRFDLTLCGSTLRAPHSCHLQYMENMNSIASLVMSVVVNEGDEDGPDSSSGPNKRERLWGLVVCHNTSPRFVPFPLRYACEFLAQVFAVHVTKELEWENQLLEKNILRTQTLLCDLLLRNTPLGIVSGSPNVMDLVRCDGAVLLHKNTKYRLGLTPTDLQIRDIVSWLDEYHRDSTGLGTDSLYDAGFPGALALGNAVCGMTAARVTDKDWLFWFRSHTAGEVRWSGAKHEPVEKDDGRKMHPRSSFKAFLEVVKTRSLPWRDYEMDAIHSLQLILRNASRENDEKDLEGREIQARLNVLQIDGVKEIEAVTS

SEQ ID NO: 9328 - protein, 57 aa, Zea mays
PRIKLSEDVMKVSIPCKKKCYRLYGKEGYPLVDIMTGEDEPGPKVNNIHVNAYKYSQ

SEQ ID NO: 9329 - protein, 619 aa, Alectra sessiliflora
SGKPFYAIIHRVTGSLVIDFEPVKPHEVPMTAAGALQSYKLAAKAIARLQATPSGSLERLCETMAQEVFELTGYDRVMVYKFHDDDHGEVFTEITKPGLEPYAGLHYPATDIPQAARFLFMKNKVRMICDCRSAHVKVVQDEGLFSDLTLCGSTLRAPHSCHLRYMENMNSIASLVMAVVVNEGNDEESSASSSSTSSHPEKKKRLWGLVVCHHTSPRFVPFPLRYACEFLSQVFSIHVSKELELLNQTQEKNILKTQTMLCDMLLRGNPLAIVTQSPTVMDLVKCDGAVLLYKGKTHRLGLAPSDLQIRDIMSWLDEYHRDSTGTSTDSLLDAGFPGAAALGDAFCGMAAIRITGRDWLFWFRSHTAAEVRWGGAKHEKGDEDDGRRMHPRSSFNAFLEVVKARSVPWRDFEMDAIHSLQLILRNACEKEMEEEERRKDMVVAGEIQARLTELHIDGAREMEAVTSEMVRLIETASVPILAVGVDGLVNGWNTKIADLTGLLVDEAIGQPFLALVEEASVDAVSRMLERALQGHEERNVQFEIKTHGPRAESGPISLVVNACASRDVRENVVGVCFIAQDVTTERSMMDKFTRIEGDYRAIVQNPNPLIPPIFGSDEF

SEQ ID NO: 9330 - protein, 584 aa, Orobanche raddeana
PYEVPMTAAGALQSYKLAAKAIACLQALPGGSMERLCDTMVQQVFELTGYDRVMIYKFHEDDHGEVFTEITKPGLEPYVGLHYPATDIPQAARFLFMKNKVRMICDCRANHVKVVQDDNFPFDLTLCGSTLRAPHGCHSQYMENMNSIASLVMSVVVNEGDEDGPDSSSGPDKRKRLWGLVVCHNTCPRFIPFPLRYACEFLVQVFSIHVNKELELESQMLEKNILRTQTLLCDLLLRDVPLGIVSQSPNVMDLVKCDGAILLHKRTKYRLGLTPTDFQIRDIPSWLDEYHQDSTGLSTDSLYDAGFPGALALGHALCGMAAVKITDEDWLFWFRSHTAAEIRWGGAKHELEEKDDGRKMHPRSSFRAFLEVVKTRSLPWKDYEMDGIHSLQLILRNAYKESEEKDLESREIHAKLNELQIDGVKEIEVLTSEMVRLIETATVPIFSVGVDGLVNGWNTKISDLTGLSVDEAIGMHFLALVEDSSADTVSKMLGLALQGKEEHDVQFEIKTHGTRSESGPISLIVNACASRDVKENVVGVCFIAQDITTQKSMMDKFTRIEGDYRSIIQNPNPLIPPIFGTDEF

SEQ ID NO: 9331 - protein, 218 aa, Phyllanthus cf. decipiens Hoffmann et al. 162
DIPQASRFLFMKNKVRMICDCQAPPVKVVQDKQLAQPLSLCGSTLRSPHGCHAQYMANMGTMASLVMSVTINEDDEETDNDQQIGRKLWGLLVCHHTNPRFVPFPLRYACEFLMQVFGVQVNREVELAAQMREKHILRTQTVLCDMLLRDAPVAIVTQSPNVMDLVKCDGAALYYRKKFWLLGVTPTEAQIKEITEWLLEYHGESTGLSTDSLRKLES

SEQ ID NO: 9332 - protein, 357 aa, Bradyrhizobium sp. ORS278
MLGSHLSIRQRGSMTKYKLEYIWLDGYKPVPNLRGKTQIKEFSSFPTLEQLPLWGFDGSSTMQAEGHSSDCVLKPVAVYPDAARTNGVLVMCEVMMPDGKTPHPSNARATILDDPDAWFGFEQEYFFYKDGRPLGFPEYGYPAPQGPYYTGVGFKNVGDVARKIVEEHLDLCLAAGINHEGINAEVAKGQWEFQVFGKGSRTAADQMWMARYLMLRLTEKYGIDIEFHCKPLGDTDWNGSGMHCNFSTKHMREVGGKEYFEKLMDAFKEARADHIAVYGPDNHMRLTGKHETASIDTFSWGVADRGASIRVPHSFVNNSYKGYLEDRRPNSQGDPYQIASQVLKTISTVPTGAKAAA

SEQ ID NO: 9333 - protein, 558 aa, Oryza sativa
MQQRRKSVFASAPFAMKQAALGAGVAARRNGAPLSLAAVVFALFVFATFLYNEDIKSIADFPFGAGALRAKSPDLHVLQETVGAAHLAAGSIAKRGEEVIVRVLDAPASTAMAAAAGSSSNNSTIEVAKANANANANAADAGVKVDEGQERERDVTLPSVKEGGADEARRREDEEAAEKESSAKAAAATAALRTVVSVPDTCDLYRGNWVYDEVNAPVYKESQCEFLTEQVTCMRNGRRDDSYQKWRWQPTDCDLPRFDARLLLERLRNKRLMFVGDSLNRNQWESMVCLVQSVIPKGKKTLTKFVNGGNSNIFYAHEYNATVEFYWAPFLVESNSDNPQVHSVPDRVIQWHSIAKHAHNWLGVDYLIFNTYIWWLNTLDMKVLKGSFDQGATEYVEVDRPVAYKEVLKTWAKWVDRNIDPNRTTVFFMSMSPNHITPEAWGNYGGIKCAMETLPITNRTTSLDVGTDWRLYAGAQEVLQTFRRVPVHLVDITALSELRKDAHTSVHTLRQGKLLTPEQQSDPKTYADCIHWCLPGLPDTWNQFLYARIASAPWSSDQ

SEQ ID NO: 9334 - protein, 297 aa, Oryza sativa
MALRRHAALLSLAVVLLFAGLAAASPTSQNTGDTVIFWGRNKDEGSLREACDTGLYTTVIISFLSAFGYKPGYYKVDISGHPVSAVGPDIKYCQSKGILILLAIGGQGGEYSLPTPQAAVELNDHLWYSYLGGHRNGVYRPFGDAIVNGIDFFIDQGGRENYNKLAKLLYAHNKDYRGTVGVMLTATTRCEYPDHRLDEALATGLFHRIHVKKFSDGRCPASSWIQSFQKWAKMYPQSRVLVGVVASREVDREAYISPEDLKKLMQYVFSKLPNFGGVMVWDRFYDEKTGFTGRLRA

SEQ ID NO: 9335 - protein, 609 aa, Orthocarpus bracteosus
SGKPFYAIIHRVTGSMIIDFEPVKPHEVPMTAAGALQSYKLAAKAITRLQALSSGSMEQLCGMMVQEVFELTGYDRVMIYKFHDDDHGEVLSEITKPGLDPYVGLHYPATDIPQAARFLFIKNKVRMICDCRANHVKVIQDDNLPFDLTLCGSTLRAPHSCHLQYMENMNSIASLVMSVVVNEGNEDGPDSSSHPDEKKRLWGLVVCHNTSPRFVPFPLRYACEFLAQVFAIHVNKEIELKNQMLEKNILRTQTLLCDMLLRDAPLGIVSQSPNVMDLVKCDGAVLIYKTKKYRLGKTPSDFQIRDIVSWLDEYHRDSTGLSTDSLYDAGFPGALALGDAVCGMAAVRITNTDWLFWFRSHTAAEIRWGGAKHELGEKDDGRKMHPRLSFKAFLEVVKTRSLPWKDFEMDAIHSLQLILRNASNKKAEERDVEGKEIHARLNDLQLDGVQELEAVTSEMVRLIETASVSIFAVDVDGLVNGWNTKIADLTGLPVDKAIGKHFLALVEDSSAEVVNKMLELALQGNEEQNVLFEIKTHDLRSESGPISLIVNACASWDVKGNVVGVCFVAQDITIQKSMMGKFTRIEGDYRAIVQNPNQLIPPIFGTDEF

SEQ ID NO: 9336 - protein, 359 aa, Nanoarchaeum equitans Kin4-M
MDILQKLKQLGEKIYNEFLKNGDPRIEFLTRGNIKTVEYDEEKDIIKLKEKQSVRRFFDVGETRRFTQTLLVAALAKELVESNKHASLREVYYQLKHTIPYINENTFDEQSESDSVIEDLERALRAIREQFGIVADRKGYLYGDITLKDRNRGDEWNCSKLGLGGWGIPSTIEEIDIVDVNADYVLVVEKDAMFERLIEERFPEKNRALLIATKGQPSRGTRRLIRKLRYEVGLPVYVFTDGDPWGFYIYSVIKRGSMNLAMFSEQLATPDAKFIGLTIDDVIKYDLKDVAIQLKPIDVKRVKELMEYPWFKNKEWQRQFNKMLKLNIKAEQDALAKHSLEFVANKYLPEKIEKGEFLP

SEQ ID NO: 9337 - protein, 361 aa, Cryptococcus neoformans var. neoformans JEC21
MVNNTEYYKTLGLSKDASEADIRKAYRKESLKWHPDKNPGDKHAAAEEKFKKISEAYEVLSDPKKKEIYDQFGEDGLKGGGAAGGGGFGGFPGGGGGGYSSFHATDPNDIFNTFFSSMGGGGGGAENIFTSFGGGGSSRGGPRMRSSRMGGGMGGMGGMGGMPGGFGDEPSSSAPPPPGEIIKPLALTLEELYKGGTKRLKITRHLQSGGQAEKILEVAYKAGWKKGTKIKFAGAGNEDEYGQSQTVAFVVEEKPHNRFERVDDDLVVKLNITLSQALLGPDGGGAITKEVEQLDGRRIQVSLPEGQIVQPGQETRIQGEGMPVSKASSVKKSGDLVVKWNVVFPTRLTPEQKKDLRRILG

SEQ ID NO: 9338 - protein, 210 aa, Phyllanthus nummulariifolius
DLPQASRFLFMKNKVRMICDCQAPPVKVVQDKRLAQPLSLCGSTLRSPHGCHAQYMANMGTIASLVMSVTINDGDEETDNDQQIGRKLWGLVVCHHTKPMFVPFPLRYACEFLMQVFGVQVHREVELAAQTTEKHILQTQTVLCDMLLRDAPVAIVTQSPNVMDLVKCDGAALYYRKKFWMLGVTPTEAQIKDITEWLLEYHGESTGLST

SEQ ID NO: 9339 - protein, 231 aa, Oryza sativa Japonica Group
MTGFGSPCGACKFLRRKCVRGCVFAPYFCHEQGAAHFAAIHKVFGASNVSKLLAHLPLADRPEAAVTISYEAQARLRDPIYGCVAHIFALQQQVMTLQAQLASLKAAAPKGIHHQDWCGSNGGRAPAASQPGAYSSNGGAGHGHDSITALLAAGSDYMQHSLYHAFEHSEGAGAVDDGHAAAAAFEAAAESSSCGMAASFAADESVWRSSSSGYQDCEDLQSVAYAYLNRS

SEQ ID NO: 9340 - protein, 794 aa, Candida albicans SC5314
MVQLALFTNNNHNNNSNNNTTNTLNDDTQYDSTTMNTEDTPIIPDKTDKLNGSDSRSSSRNRTRSISFTRFLFNSNNNNNNNKDHTEQSRCPSNETSDNSVGSPEQQNSGFNKLKKMFKTNSSLTQEDGKNSGRTRSASTPLTPPKVKKETSVPVITTTKAPNKEETTTTKIHSPPESPVVQSNPYFQYQGVPAHTNTSQNPQIETAPGRSDMSVALRHNDSVFSLNENGVLKPPKIHYSELSSSSEDNSEPSSPALPKTPMRDLVEKDELHLKPIEDERDLAIPASPFQRALRRVASAPLVHRLLNEKSPEDANNNNNNNTGNNLGGPFSTSTQTSPKKDEPFDINKHIGEVKITGRPRTYTQDRTYSNAATRIVDVQVGPNSFEKVRLLGKGDVGKVFLVREKSSNKLYAMKILNKKEMIERNKIKRALAEQEILATSNHPFIVTLYHSFQSKDHLYLCMEYCMGGEFFRALQTRDTKTICEADAKFYAAEVTAALEYLHLMGFIYRDLKPENILLHQSGHIMLSDFDLSKQSERAKNPEISFHKSGMHLSSAGSSNHHNGPAIDTKACIDGFRTNSFVGTEEYIAPEVIRGKGHTSAVDWWTLGIFLYEMLFGTTPFKGQDRKKTFANVLKKDVKFSDTQQSISSNCRNLIKKLLIKDEEKRLGSKTGASEIKNHAFFKDTQWALLRHQKPPMIPVLTKSTSTSNSNKKYEKPMEDTEEIDDVTSISKSINEQIDDPFSQFNSVTLRYGGEFEDLNQSPMYNPDSSAYTSVAYTMTSNNENSFRQKSFLKR

SEQ ID NO: 9341 - protein, 300 aa, Zea mays
  misc_feature (128)..(128): Xaa can be any naturally occurring amino acid
MGADYYKVLGVDRGASDDDLKKAYRKLAMRWHPDKNSTNKKEAETKFKEISVAYEVLSDPKKRAIYDQLGEEGLKGQPPPGAGGPGTSPFFPGGVHSTAHHFNPRSADDIFKEFFGSPGMGGMRTEPXFKVGLADLYKGVTKKMKISRETIDASGRISNTEDILTIQVKAGWKKGTRITFPDKGNEAPNMKPADIVFIIDEKPHDVFTREGNDLVVTEKISLVEALTGYTARVTTLDGRSLSLHINSIIHPKYEEVMPGEGMPMPKDPTKKGNLRIKFNIMFPSRLTSDQKAGIKRLLGS

SEQ ID NO: 9342 - protein, 373 aa, Campylobacter jejuni RM1221
MEISYYEILEITQNADKETIKKAYRKMALKYHPDRNQGDKEAEDKFKLVNEAYEVLSNDEKRAIYDRYGKDALKGGGFGSSSSGFGGFEDLGDIFSSFFGEGFGSSRRRKSSNDEKIPSDFIVNLKLSFKEAVFGCKKNIDFTYKCSCKTCNGTGAKDGKLQTCPKCQGRGQVGVSQGFITFAQTCPDCQGIGEKASEKCSDCKGLGYNESKNSVELNIPEGVDTGMKLRVNAKGNILKNGTRGDMYVKIIAAEDDTFIRDDDDIYIEFPVFFTQAILGESIKVPTIRGEATLNLPKGAKDGQRFVLEKEGVKDVHSSRIGNQIVQISIKFPTSLNDEQKELLEKLSESFGIKDGMHQEQKGLFEKIANWFKS

SEQ ID NO: 9343 - protein, 1130 aa, Vitis vinifera
MSSGNRGTQSHHQAQSSGTSNLRVYHTDSMSKAIAQYTMDARLHAVYEQSGESGKSFDYSQSVRTTTQSVPEQQITAYLSKIQRGGHIQPFGCMLAVDEATFRVIAFSENAREMLGLTPQSVPSLEKPEILLVGTDVRTLFTPSSAVLLEKAFGAREITLLNPVWIHSKNSGKPFYAILHRIDVGIVIDLEPARTEDPALSIAGAVQSQKLAVRAISHLQSLPGGDINLLCETVVENVRELTGYDRVMVYKFHEDEHGEVVAESKRSDLEPYIGLHYPATDIPQASRFLFRQNRVRMIVDCHATPVLVIQDEGLMQPLCLVGSTLRAPHGCHAQYMANMGSTASLAMAVIINGNDEEAIGGRNLMRLWGLVVCHHTSARCIPFPLRYACEFLMQAFGLQLNMELQLASQLSEKHVLRTQTLLCDMLLRDSPTGIVTQSPSIMDLVKCDGAALYCQGKYYPTGVTPTEAQIKDIAEWLLANHADSTGLSTDSLADAGYPGAASLGDAVCGMAVAYITSRDFLFWFRSHTAKEIKWGGAKHHPEDKDDGQRMHPRSSFKAFLEVVKSRSLPWENAEMDAIHSLQLILRDSFKDATDGSNSKAVMHAQLGELELQGMDELSSVAREMVRLIETATAPIFAVDVDGCINGWNAKVAELTGLSVEEAMGKSLVHDLVYKESEETVDKLLHHALQGSEEDKNVEIKLRTFDSQQHKKAVFVVVNACSSRDYTNNIVGVCFVGQDVTGQKVVMDKFIHIQGDYKAIVHSPNPLIPPIFASDENTVCSEWNTAMEKLTGWSRGDIIGKMLVGEIFGSSCRLKGPDALTKFMIVLHNAIGGQDTDKFPFSFFDQNGKYVQALLTANKRVNIEGQIIGAFCFLQIASPELQQALKVQRQQEKKCFARMKELAYICQEIKNPLSGIRFTNSLLEATDLTEDQKQFLETSAACEKQMSKIIRDVDLDSIEDGSLELERAEFLLGSVINAVVSQVMILLRERDLQLIRDIPEEVKTLAVYGDQVRIQQVLADFLLNMVRYAPSPDGWIEIQVHPRLKQISEEVKLMHIEFRMVCPGEGLPPNLIQDMFHSSRWMTQEGLGLSMCRKILKLINGEVQYIRESERCYFLISIELPVPRRGSKSVD

SEQ ID NO: 9344 - protein, 973 aa, Adiantum capillus-veneris
MSSKTMTYSSSAAEPRSSSSSVVGSKHNRRVVVAQTTADAKLHAVFEQAQSEGDTGGSSFDYMRSIEDARGSVLSERVPAQAVTAYLQRMQRGGLIQPFGCMLALEEGSFRVIAYSENAAEMLDLMPQSVPSVGVQVLVLGIGTDARTLFTYASAAALEKASGAVDVSMLNPITVHCRSSSKPFNAIVHRIDVGLVIDFEPVRPADVAVWAAAGALQSHKLAAKAISRLQALPVGDIDLLCDSVVEEVRELTGYDRVMAYKFHEDEHGEVLAEIRRSDLEPYLGLHYPATDIPQASRFLFMKNRVRMICDCRALPVRVIQDKELRQPLSLAGSTLRAPHGCHSQYMANMGSIASLVMAVVVNDNDEDVSNRSQQPKMRRLWGLVVCHHTTPRAVPFALRSACEFLMQVFGLQLNMELELAAQMREKHILRTQTLLCDMLLRDAPIGIVSESPNIMDLVKCDGAALYYGKNFWLLGTTPIEAQIKDLAEWLLDVHRDSTGLSTDSLADAGYPGAAALGDAVCGMAAAKITTRDFLFWFRSHTAKEIKWGGAKHDPEDRDDGRKMHPRSSFKAFLEVVKRRSLPWEDMEMDAIHSLQLILRGSFQDIDDSDTKTMIHARLNDLKLHGMDELSTVANEMVRLIETATAPIFAVDAGGFINGWNAKVAELTGLTVEEAMSRSLVRDVVVNASMETAERVLDLALQGQEEQNVEIKLKTYGDQAIKGPVILIVNACSSRDFTDNVVGVCFVGQDVTGQKVVMDKFTRIQGDYKTIVQNPNPLIPPIFGADEFGYCSEWNPAMEKFSGWKREDVIGKMLIGEVFGSDLACCKLRGQDSMTKFMIILNAAMGGRDSDRFPFGFFDRYGKYAEALLIANKRTDSDGAITGVFCFLHTASPELQQALQVQKRSARTALDRLKEVAYMKQEIRNPLYGIVFTRKLLDNTNLTDEQKQIMETSSLCEKQLQNILDEDNFEKLDQ

SEQ ID NO: 9345 - protein, 245 aa, Gymnosporia polyacantha
ALSIAGAVQSQKLAVRAISQLQSLPGGDIKLLCDTVVESVRNLTGYDRVMVYKFHEDEHGEVVAESKRSDLEPYMGLHYPASDIPQASRFLFKQNRVRMIVDCHASPVRVIQDDGLMQPLCLVGSTLRAPHGCHAQYMENMGSLASLAMAVIINGNEEEAIGGRSPTRLWGLVVCHHTSARCIPFPLRYACEFLMQAFGLQLNMELQLAAQLLEKHVLKTQTLLCDMLLRDSPTGIVTQSPSIMD

SEQ ID NO: 9346 - protein, 1431 aa, Arabidopsis thaliana
MAQILAASPTCQMRVPKHSSVIASSSKLWSSVVLKQKKQSNNKVRGFRVLALQSDNSTVNRVETLLNLDTKPYSDRIIAEYIWIGGSGIDLRSKSRTIEKPVEDPSELPKWNYDGSSTGQAPGEDSEVILYPQAIFRDPFRGGNNILVICDTWTPAGEPIPTNKRAKAAEIFSNKKVSGEVPWFGIEQEYTLLQQNVKWPLGWPVGAFPGPQGPYYCGVGADKIWGRDISDAHYKACLYAGINISGTNGEVMPGQWEFQVGPSVGIDAGDHVWCARYLLERITEQAGVVLTLDPKPIEGDWNGAGCHTNYSTKSMREEGGFEVIKKAILNLSLRHKEHISAYGEGNERRLTGKHETASIDQFSWGVANRGCSIRVGRDTEAKGKGYLEDRRPASNMDPYIVTSLLAETTLLWEPTLEAEALAAQKLSLNNCMDNVHPFILVLLTVRACPMVEFKLRKHLSQHRQEKKREREGETKTETKEDRSGQNKLSDSSWSFWRRFSVRPELFRNHRRWFLIQKVLGKLSEPSKPSEKTKEADASTVNGASTGFSWDINRCSAGAAATSVWWDINRCPLPNDVDVRRVSPFIKRALEKLGYTGALTTTAIGILTDVPHDFLTQVYSSGIAIHHIPLDIFELSSAVIYWTWDNLPPSNIMLISNELIFSSLLDKLCGFGYNVALEEDKCSETCETAFPCAQFIVVVQGFENFSTHLKSEEHRKNKFSRKWTKKDLLSPFVKVRTGFHGSPSVAPTEDLTVEELPPRLFALDRYPSETKMNAYSKPEYISYIANVLKGKPEMQFLLDSPFGELFKIPKNKASFNAKLVLGLICRQLVTKKVNEMWIVFGGHPIKFGLREFSILTGLECGKYPKKKDVEDVISVKPECESVWKTLFDERFGDTVPTIADLVSWLQEEESMEGWKQLALSLIILVDGVVAAHSNPNRATSKTVEKTKNLEFFCKYPWGRVSFTRTLGRIAKFQTPYDAQQLIRGLLIGFYLFETIPSIAKLGPDDVPNMTFAERSIHRLASLRAIRTSRILECEAADEVEVNYIVKPADNVCPPSLSWDDEVDDPRVDYIEALLIDGHQWQEDEWVGGYARVPKQRKRNAPGPSPKEPAMKKQKSQMDCDNEENAEDCFGEPVPERIIVEMRRSFKELEDQMYQMQEDMKDFVREQIRVALDPKGKRPEQTILSHDSREPPTSMDKAPVTAKKPSRRMSTKGSTGTRKSSRLTRVSHDVDTFALSVGCNSKEEDLDVPGVHTTAVGGRRKPSKPKKNVSFAVDTTELSDSNKEDMQGFIDEQYGANNESDFTTNDGLDSSAAEEEILDTGFLIVPYAGSTQSHLERRPVEEATVDTEMEEVPSNVSARVSEVDLVDNGPKDVVEPGLVGTHTGADEIADADTEMVDNPSGLPSTSAQEETRDVSVATEANGSESEETYEQCF

SEQ ID NO: 9347 - protein, 257 aa, Vitis vinifera
MAHRSLLSLALLSFFFLALISNTNAGTITVYWGQNGNEGSLADTCSSGYYGIVNIAFLDQGIKVLRGASGSYTLTSVEDARQVANYLWNNFLGGQSSSRPLGDAVLDGIDFDIQGGTTQHWDELAKTLSEFSGQRKVYLSAAPQCPFPDAWMGTAIATGLFDYVWVQFYNNPPCQYSGNADNLINSWNQWTTIEAGQVFLGLPAAPAAAGSGYIEQDVLVSQVLPSIKTSPKYGGVMLWSRYYDTNYSAAINILSSV

SEQ ID NO: 9348 - protein, 423 aa, Zea mays; identical to SEQ ID NO: 7182

SEQ ID NO: 9349 - protein, 245 aa, Gymnosporia polyacantha
ALSIAGAVQSQKLAVRAISQLQSLPGGDIKLPCDTVVESVRNLTGYDRVMVYKFHEDEHGEVVAESKRSDLEPYIGLHYPASDIPQASRFLFKQNRVRMIVDCHASPVRVIQDDGLMQPLCLVGSTLRAPHGCHAQYMENMGSLASLAMAVIINGNEEEAIGGRSPTRLWGLVVCHHTSARCIPFPLRYACEFLMQAFGLQLNMELQLAAQLLEKHVLKTQTLLCDMLLRDSPTGIVTQSPSIMD

SEQ ID NO: 9350 - protein, 214 aa, Saccharomyces cerevisiae
MIKSTLIYREDGLPLCTSVDNENDPSLFEQKQKVKIVVSRLTPQSATEATLESGSFEIHYLKKSMVYYFVICESGYPRNLAFSYLNDIAQEFEHSFANEYPKPTVRPYQFVNFDNFLQMTKKSYSDKKVQDNLDQLNQELVGVKQIMSKNIEDLLYRGDSLDKMSDMSSSLKETSKRYRKSAQKINFDLLISQYAPIVIVAFFFVFLFWWIFLK

SEQ ID NO: 9351 - protein, 996 aa, Arabidopsis thaliana
MEPTEKPSTKPSSRTLPRDTRGSLEVFNPSTQLTRPDNPVFRPEPPAWQNLSDPRGTSPQPRPQQEPAPSNPVRSDQEIAVTTSWMALKDPSPETISKKTITAEKPQKSAVAAEQRAAEWGLVLKTDTKTGKPQGVGVRNSGGTENDPNGKKTTSQRNSQNSCRSSGEMSDGDVPGGRSGIPRVSEDLKDALSTFQQTFVVSDATKPDYPIMYASAGFFNMTGYTSKEVVGRNCRFLQGSGTDADELAKIRETLAAGNNYCGRILNYKKDGTSFWNLLTIAPIKDESGKVLKFIGMQVEVSKHTEGAKEKALRPNGLPESLIRYDARQKDMATNSVTELVEAVKRPRALSESTNLHPFMTKSESDELPKKPARRMSENVVPSGRRNSGGGRRNSMQRINEIPEKKSRKSSLSFMGIKKKSESLDESIDDGFIEYGEEDDEISDRDERPESVDDKVRQKEMRKGIDLATTLERIEKNFVITDPRLPDNPIIFASDSFLELTEYSREEILGRNCRFLQGPETDLTTVKKIRNAIDNQTEVTVQLINYTKSGKKFWNIFHLQPMRDQKGEVQYFIGVQLDGSKHVEPVRNVIEETAVKEGEDLVKKTAVNIDEAVRELPDANMTPEDLWANHSKVVHCKPHRKDSPPWIAIQKVLESGEPIGLKHFKPVKPLGSGDTGSVHLVELVGTDQLFAMKAMDKAVMLNRNKVHRARAEREILDLLDHPFLPALYASFQTKTHICLITDYYPGGELFMLLDRQPRKVLKEDAVRFYAAQVVVALEYLHCQGIIYRDLKPENVLIQGNGDISLSDFDLSCLTSCKPQLLIPSIDEKKKKKQQKSQQTPIFMAEPMRASNSFVGTEEYIAPEIISGAGHTSAVDWWALGILMYEMLYGYTPFRGKTRQKTFTNVLQKDLKFPASIPASLQVKQLIFRLLQRDPKKRLGCFEGANEVKQHSFFKGINWALIRCTNPPELETPIFSGEAENGEKVVDPELEDLQTNVF

SEQ ID NO: 9352 - protein, 138 aa, Triticum aestivum
  misc_feature (126)..(126): Xaa can be any naturally occurring amino acid
MDASAGAGSGNAPCAGAGASSCCYYTLLGIRKNASSSDIRAAYRRLAMKWHPDRWASDPGATGEAKRRFQRIQEAYSVLSDKGKRAMYDAGLFDPLDDDDQDFSDFMQEMLVMMDSVKNEPDTLEXLQKMLDDIVNGD

SEQ ID NO: 9353 - protein, 301 aa, Oryza sativa Japonica Group; identical to SEQ ID NO: 7614

SEQ ID NO: 9354 - protein, 428 aa, Brassica rapa subsp. chinensis
MAQILAASPTCQMRLTKPSSIASSKLWNSVVLKQKEQSSSKVRSFKVMALQSDNSTINRVESLLNLDTKPFTDRIIAEYIWIGGSGIDLRSKSRTLEKPVEDPSELPKWNYDGSSTGQAPGEDSEVILYPQAIFRDPFRGGNNILVICDTYTPAGEPIPTNKRARAAEIFSNKKVNEEIPWFGIEQEYTLLQPNVNWPLGWPVGAYPGPQGPYYCGVGAEKSWGRDISDAHYKACLYAGINISGTNGEVMPGQWEFQVGPSVGIEAGDHVWCARYLLERITEQAGVVLTLDPKPIEGDWNGAGCHTNYSTKSMREDGGFEVIKKAILNLSLRHMEHISAYGEGNERRLTGKHETASIDQFSWGVANRGCSIRVGRDTEKKGKGYLEDRRPASNMDPYIVTSLLAETTLLWEPTLEAEALAAQKLSLKV

SEQ ID NO: 9355 - protein, 736 aa, Pinus sylvestris
VPSMEKPQQDVLTIGTDVRTLFTAASAHSLEKAAVAQEISLMNPIWVHCKNSRKPFYAIVHRIDVGMVIDLEPLRTGDAFMSAAGAVQSQKLAVRAISRLQSLPCGDVGLLCDTVVENVRELTGYDRVMVYKFHEDEHGEVVAEIRRSDLEPYLGLHYPATDIPQASRFLFMQNRVRMICDCMATPVKVIQSEELMQPLCLVGSTLRAPHGCHAQYMANMGSIASLVMAVIINGNDDEGGGSGRNSMKLWGLVVCHHTSPRAVPFPLRYACEFLMQALGLQLNMELQLAAQLTEKHILRTQTLLCDMLLRDAPMGIVTQSPSIKDLVKCDGAALYYGGMCWMLGVTPTEAQIKDIADWLLEHHGDSTGLSTDSLADAGYPGAASLGDAVCGMASARITSKDFLFWFRSHTAKEMKWGGAKHHPDDKDDARRMHPRSSFKAFLEVVKRRSLPWDNVEIDAIHSLQLILRGSFRDIDDSGTKTMVHSRLNDLRLQGIDELSSVASEMVRLIETATAPILAVDYNGLVNGWNAKVAELTGLPVGEAMGMSLVQDLVFEQSVERVEKMLHNALRGEEEKNVEMMLKTFGPQKEKEAVILVVNACSSRDFTDNIVGVCFVGQDVTSQKVVMDKFIRIQGDYRSIVQSPNPLIPPIFASDEYACCSEWNAAMEKVTGWTHDEVIGKMLVGEIFGGCCRLKGQDAVTKFTIVLHSAIDGQEIEKFPFAFFDKQGKYVEALLTA

SEQ ID NO: 9356 - protein, 524 aa, Aureolaria pedicularia
SGKPFYAIIHRVTGSMIIDFEPVKPHEVPMTAAGALQSYKLAAKAITRLQALPSGSMERLCDTMVQEVFELTGYDRVMIYKFHDDDHGEVLSEITKPGLEPYVGLHYPATDIPQAARFLFIKNKVRMICDCRANHVKVIQDDKLPIDLTLCGSTLRAPHSCHLQYMENMNSIASLVMSVVVNEGNEDGPDSSSHPDKQKRLWGLVVCHNTSPRFVPFPLRYACEFLAQVFAIHVNKEIELENQMLEKNILRTQTLLCDMLLRDAPLGIVSQSPNVMDLVKCDGAVLIYKTKKYRLGMTPSDFQIRDIVSWLDEYHRDSTGLSTDSLYDAGFPGALALGDAVCGMAAVRITDTDWLFWFRSHTAAEIRWGGAKHEPGEKDDGRKMHPRLSFKAFLEVVKTRSLPWKDFEMDAIHSLQLILRNASNKEAEERDVDGKEIHARLNDLQLDGIQELEAVTSEMVRLIETASVPIFAVDVDGLVNGWNTKIADLTGLPVDKAIGRHFLALVEDSSAEAVNKMLELALQG

SEQ ID NO: 9357 - protein, 389 aa, Bartsia alpina
DFEPAKPYEVPMTAAGALQSYKLASKAIARLQSLPSGSMERLCEAMAQEVFELTGYDRVMIYKFHEDDHGEVLTEITKPGLEPYVGLHYPATDIPQAARFLFMKNKVRIICDCRANHVRVIQDENLPLDLTLCGSTLRAPHSCHLQYMENMNSIASLVMSVVVNEGNEEAGPDDSSQHPDKRKRLWGLVVCHNTSPRFVPFPLRYACEFLAQVFAIHVNKELELENQMLEKNILRTQTLLCDMLLRDAPLGIVSQSPNVMDLVKCDGAILLHKNRKHRLGITPSDFQIRDIVSWLDEYHRDSTGLSTDSLYDAGFPRALALDDIVCGMAAVRITDRDWLFWFRSHTASEIRWGGAKHEPDERDDPRKMHPRSSFKAFLEVVKTRSLPWK

SEQ ID NO: 9358 - protein, 210 aa, Phyllanthus nummulariifolius
DIPQASRFLFMKNKVRMICDCQAPPVKVVQDKRLAQPLSLCGSTLRSPHGCHAQYMANMGTMASLVMSVTINDGDEETDNDQQIGRKLWGLVVCHHTKPMFVPFPLRYACEFLMQVFGVQVHREVELAAQTTEKHILQTQTVLCDMLLRDAPVAIVTQSPNVMDLVKCDGAALYYRKKFWMLGVTPTEAQIKDITEWLLEYHGESTGLST

SEQ ID NO: 9359 - protein, 610 aa, Parentucellia viscosa
SGKPFYAIIHRVTASLIVDFEPVKPHEVPMTAAGALQSYKLASKAISRLQSLPSGSMERLCETMVQEVFELTGYDRVMIYKFHDDDHGEVLTEITKPGLEPYVGLHYPATDIPQAARFLFMRNKVRMICDCRANHVRVIQDQNLPLDLTLCGSTLRAPHSCHLQYMENMNSIASLVMSVVVNEGNEEAGPDELSQHLKRRLWGLVVCHNTSPRFVPFPLRYACEFLAQVFAIHVNKELELENQMLEKNILRTQTLLCDMLLRDAPLGIVSQSPNVMDLVKCDGAILLHKDQKHRLGITPSDFQIRDIVSWLDEYHRDSTGLSTDSLYDAGFPGALALGDIVCGMAAVRITDRDWLFWFRSHTASEIRWGGAKHELGERDDGRKMHPRSSFKAFLEVVKTRSLPWKDFEMDAIHSLQLILRNASSKEMEERKDLEGVEIQARLNELQIDGVQELEAVTSEMVRLIETASVPILAVGVDGLVNGWDTKIADLTGLPVDKAIGVHFLSLVEESSTEAVGKMLELALEGKEEQNVHFEIKNHGPNSDSSPISLIVNACSSRDVRENVVGVCFIAQDITTQKSVMDKFTRIEGDYRAIVQNPNPVIPPIFGTDEF

SEQ ID NO: 9360 - protein, 223 aa, Phyllanthus cf. mantsakariva Hoffmann et al. 266
DIPQASRFLFMKNKVRMICDCQAPPVKVVQDKQLAQPLSLCGSTLRSPHGCHAQYMANMGTMASLVMSVTINEDDEETDNDQQIGRKLWGLVVCHHTNPRFVPFPLRYACEFLMQVFGVQVNREVELAAQTREKHILRTQTVLCDMLLRDAPVAIVTQSPNVMDLVKCDGAALYYRKKFWLRGVTPTEAQIKDITEWLLEYHGESTGLSTDSLMEAGYPGAAS

SEQ ID NO: 9361 - protein, 251 aa, Bartsia alpina
SHTAAEIQWGGAKHEPGDRDDGRNMHPRSSFKAFLEVVKTRCLPWKDYEMDAIHSLQLILRNASSKKRDAGKDLEGVETQAKLSTVKIDGALELEAVTSEMVRLIETALVPIFAVGMDGLVSGWNTMIADLTGLPVNKAMGVNFLSLVEDSSADAVSNMLELALKGKEEHNVHFEIKTHGPSSESGPISLIVNACSSQDVWGNIVGVCFVAQDITTQKRVMDKFTRIEGDYQAIVQNPNLLIPPIFGTDEF

SEQ ID NO: 9362 - protein, 607 aa, Paulownia tomentosa
SGKPFYAIIHRVTGSLIVDFEPVKPHEVPMTAAGALQSYKLAAKAITRLQSLPSGSMERLCDTMVQEVFELTGYDRVMIYKFHDDDHGEVFTEITKPGLEPYAGLHYPATDIPQAARFLSMKNKVRMICDCRANHVKVVQDENLPFDLTLCGSTLRAPHSCHLQYMENMNSIASLVMSAVVNEGDEEGSDSSHPEKRKRLWGLVVCHNTTPRFVPFPLRYACEFLAQVFAIHVNKELELENQMLEKNILRTQTLLCDMLLRDAPLGIVSQSPNVMDLVKCDGAALLYKNKKYRLGLTPSDFQIRDIVSWLDEYHRDSTGLSTDSLYDAGFPGALALGDAVCGMAAVRITDKDWLFWFRSHTAAEIRWGGAKHEPGGKDDGRKMHPRSSFKAFLEVVKTRSLPWKDYEMDAIHSLQLILRNAFKEAEDTDLGSKAIHTRLNDLQIEGIQELEAVTSEMVRLIETASVPILAVDVDGLVNGWNTKIADLTGLPVDKAIGRHFLALVEDSSADTVSKMLELALQGKEERNVQFEIKTHGPRSESGPISLVVNACASRDVKENVVGVCFIAQDITAQKSMMDKFTRIEGDYRAIVQNPNPLIPPIFGTDEF

SEQ ID NO: 9363 - protein, 223 aa, Phyllanthus calycinus
DIPQASRSLFMKNKVRMICDCQAPPVKVVQDKKLAEPLSLCGSTLRSPHGCHSQYMANMGTMASLVISVKINEDDEEIDNDQQIGRKLWGLVVCHHTNPRFVPFPLRYACEFLMQVFGVQVNREVELATQTREKHILQTQSVLCDMLLRDAPIAIVTQSPNVMDLVKCDGAALYYRKKFWLLGLTPTEAQIKDITEWLLEYHGDSTGLTTDSLMEAGYPGAAF

SEQ ID NO: 9364 - protein, 612 aa, Pedicularis densispica
SGKPFYAIVHRVTGSLIVDFEPVKPHDVPMTAAGALQSYKLAAKAITRLQALSSGSLERLCDTMSQEVFELTGYDRVMIYKFHEDDHGEVLSEITKPGLEPYLGLHYPATDIPQAARFLFMKNKVRMICDCRANHVRVIQDDNLHFDLTLCGSTLRAPHSCHLQYMENMNSIASLVMSVVINEGNEDEPESSSSSSHPDKRKRLWGLVVCHNTTPRFVPFPLRYACEFLVQVFAIHVSKEIELENQTLEKNILRTQTLLCDLLLRDAPLGIVSKSPNVMDLVKCNGAILIHKTKKYRLGMTPSDFQIRDIVSWLDEYHRDSTGLSTDSLYDAGFPGALALGDAVCGMAAVRITDKDWLFWFRSHTASEIRWGGAKHEPDDKDDGRKMHPRSSFKAFLEVVKTRSLPWKDFEMDAIHSLQLILRNASNKEAEASDVKGKEIHARLNGLQLDGMQELDAVTSEMVRLIETASVPIFAVGADGLVNGWNTKIADLTGLPVDRATGSHFVSLVDDSSVEAVKKMLELALQGNEEQNVQFEFKTHGPRSESGPVSLVVNACASRDLKENIVGVCFIAQDITTQKSMMDKFTRIEGDYRAIVQNPNQLIPPIFGSDEF

SEQ ID NO: 9365 - protein, 326 aa, Rhizobium leguminosarum bv. phaseoli
MTKFKLEYIWLDGYTPVPNLRGKTQIKEFDEFPTLEQLPLWGFDGSSTMQAEGSSDCVLKPVAIYPDPARTNGALVMCEVMMPDGHAHASNARATILDDEDAWFGFEQEYFFYQNGRPLGFPEQGYPAPQPYYTGVGYSNVGDVAREIVEEHLDLCLAAGINHEGINAEVAKGQWEFQIFGKGSKKAADQIWMARYLLQRLTEKYGIDIEYHCKPLGDTDWNGSGMHCNFSTKYLREVGGKEYFEALMASSDKNLMDHIAVYGPDNDKRLTGKHETAPWNKFSYGVADRGASIRVPHSFIKNDYKGYLEDRRPNSQGDPYQIVRRF

SEQ ID NO: 9366 - protein, 611 aa, Pedicularis foliosa
SGKPFYAIIHRVTGSLIVDFEPVKPHEVPMTAAGALQSYKLAAKAITRLQALPSGSLERLCDTMVQEVFELTGYDRVMIYKFHDDDHGEVLSEITKPGLEPYVGLHYPATDIPQAARFLFMKNKVRMICDCRANHVRVIQDDNLPFDLTLCGSTLRAPHSCHLQYMENMNSIASLVMSVVVNEGNEDGPDSSSSSHPDKKKRLWGLVVCHNTSPRFVPFPLRYACEFLAQVFAIHVNKEFELENQTLEKNILRTQTLLCDMLLRDAPLGIVSKSPNVMDLVKCNGAILIHKTKKYRLGMTPSDFQIRDIVSWLDEYHRDSTGLSTDSLYDAGLPGALALGDAVCGMAAVRITDEDWLFWFRSHTAAEIRWGGAKHEPGEKDDGRKMHPRSSFKAFLEVVKTRSLPWKDFEMDAIHSLQLVLRNASNKEAEERDTNGKEIHAGLNDLQLDGIQELEAVTSEMVRLIETASVPIFAVGVDGLVNGWNTKIADLTGLPVDKAMGSHFVALVDDSSAEAVNRMLELALQGNEEQNVQFEFKTHGPRSESGPVSLVVNACASRDVKENIVGVCFIAQDITTQKSMMDKFTRIEGDYRAIVQNPNQLIPPIFGTDEF

SEQ ID NO: 9367 - protein, 224 aa, Helianthus petiolaris
NIHGRGWRSAITSPDPLAFLGCSATTYPSSLTQQKRWFTGVFEILFTHKNPLLLTIEGNIWFRQALAYFYICLWAVRSVPELCYASLPAYCIIKDSHFLPKVNERASLIFMGIFVIYNLYAYWECKRIGVSLRMWWNLQRMERVNTLTARLFAFVSVMLKLIGLSNTVFEVTQKEHMSNDDDNDNVSVGRFTYDNSPMIMPGVVILLINIMALVNGMLRLSKVD

SEQ ID NO: 9368 - protein, 565 aa, Oryza sativa
MAAVAGSASAGANGSAAAHRVGAPTNPMATALLTDQYQFSMAYAYWKAGKHADRAVFDLYFRKNPFGGEFTVFAGLEECIKFIANFKFTEDDILFLQSVMPMCEDAFFDYLRKTDCSDVEVYSIPEGSVVFPKVPLMRVEGPVAVVQLLETPFVNLINYASLVTTNAARHRHVAGKSKVLLEFGLRRAQGPDGAISASKYCFMGGFDATSNVLAGNLFGIPLRGTHSHAYVSSYMLAESLCGVFGETNQSELAAFASYALGFPTHFLALVGTYDVMRSGIPNFCAVALALHDLGYKASGIRLDSGDLAYLSIEARKVFRTLEKEFNVPAFGKMIITASNDLNEETIDALNKQGHEVDSFGIGTYLVTCYSQAALGCVFKLVEINSRPRIKLSEDVAKCHDGFQVSIPCKKRCFRLYGKEGYPLVDIMMRESEPSPKAGERILCRHPFLESKRAYVVPQHVEELLQCYWPGTSNKPRVELPSLEEIRGRCMQQLEKLRPDHIRRLNPTPYKVIDSETKAAKHWYNIRTPYSELKLEQNKNVVAPCVGCWAGFLVVFMVQGKLKIPE

SEQ ID NO: 9369 - protein, 174 aa, Betula pendula
NEGSLADACATGNYGIVNIAFLSTFGNGQTPSINLAGHCSTVPATNECTAGFSNDIKACQNQGIKVMLSIGGAVVPGGGSYSLSSADDARSVANYLWNNFLGGQSDSRPFGDAVLDGIDFDIEGGGTAEHWDELAKALAEFSQQKKVYLTAAPQCPFPDALLGGALNTGLFDYV

SEQ ID NO: 9370 - protein, 461 aa, Mycosphaerella graminicola
MPSLGFLKKKRTKDSTASNEVASPTSPTIGSPISQTLSRQSNLFSEQNQQSQQQPPQTSGQDSVQQNTSASQSSNAKADDPMNISPQPSAVQQQPAQPQQQYNGSQHDSAHEQNGHNPNQQHVPLLNVSKTAPTVNPLRETKGKYTLNDFQISRTLGTGSFGRVHLVQSKHNSRFYAVKVLKKAQVYKMKQVEHTNDERKMLQRCRNPFLITLWGTWQDSKNLYMVMDFIEGGELFSLLRKSQRFPNPVAKFYAAEVTIALDYLHSMNIIYRDLKPENLLLDRHGHIKITDFGFAKEVPDITWTLCGTPDYLAPEVVSSKGYNKSVDWWSLGILIFEMLAGFTPFWDSGSPLKIYENILKGRVKYPPYIHPDAQDLLSKLITADLTKRLGNLHGGSQDVMNHAWFAEVTWDRLAKKDIDAPYVPPVRGGAGDASLFDKYPEETEAYGATGDDPHRTLFPDF

SEQ ID NO: 9371 - protein, 612 aa, Pedicularis gyrorhyncha
SGKPFYAIVHRVTGSLIVDFEPVKPHDVPMTAAGALQSYKLAAKAITRLQALSSGSLERLCDTMAQEVFELTGYDRVMIYKFHEDDHGEVLSEITKPGLEPYVGLHYPATDIPQAARFLFMKNKVRMICDCRANHVRVIQDDNLHFDLTLCGSTLRAPHSCHLQYMENTNSIASLVMSVVINEGNEDGPESSSSSSHPDKKKRLWGLVVCHNTSPRFVPFPLRYACEFLVQVFAIHVNKEIELENQTLEKNILRTQTLLCDLLLRDAPLGIVSRSPNVMDLVKCNGAILIHKTKKYRLGTTPSDFQIRDIVSWLDEYHRDSTGLSTDSLYDAGFPGALALGDAVCGMAAVRITDKDWLFWFRSHTASEIRWGGAKHEPDEKDDGRKMHPRSSFKAFLEVVKTRSLPWKDFEMDAIHSLQLILRNASNKEAEASDVNGKEIHARLNVLQLDGMQELDAVTSEMVRLIETASVPIFAVGADGLVNGWNTKIADLTGLPVDTATGSHFVSLVDDSSAEAVKKMLELALQGNEEQNVQFEFKTHGPRSESGPVSLVVNACASRDVKENIVGVCFIAQDITTQKSMMDKFTRIEGDYRAIVQNPNQLIPPIFGSDEF

SEQ ID NO: 9372 - protein, 224 aa, Helianthus petiolaris
NIHGRGWRSAITSPDPLAFLGCSATTYPSSLTQQKRWFTGVFEILFTHKNPLLLTIEGNIWFRQALAYFYICLWAVRSVPELCYASLPAYCIIKDSHFLPKVNERASLIFMGIFVIYNLYAYWECKRIGVSLRMWWNLQRMERVNTLTARLFAFVSVMLKLIGLSNTVFEVTQKEHMSNDDDNDNVSVGRFTYDNSPMIMPGVVILLINIMALVNGMSRLYKVD

SEQ ID NO: 9373 - protein, 224 aa, Helianthus petiolaris
NIHGRGWRSAITSPEPLAFLGCSATTYPSSLTQQKRWFTGVFEILFTHKNPLLLTIEGNIWFRQALAYFYICLWAVRSVPELCYASLPAYCIIKDSHFLPKVNERASLIFMGIFVIYNLYAYWECKRIGVSLRMWWNLQRMERVNTLTARLFAFVSVMLKLIGLSNTVFEVTQKEHMSNDDDNDNVSVGRFTYDNSPMIMPGVVILLINIMALVNGMLRLSKVD

SEQ ID NO: 9374 - protein, 309 aa, Trichoderma atroviride
MYFRKAAAVTSLLAALSSAQPSGPELAVYWGAEDDSTTLNDVCSDSSYGIVNLAFLDTFFAAGGFPQLSLSGLDGPSQAQQSAGATGLKDGSSLVDAIQQCQSAGKLVLLSLGGAGADVTLQSDSDGEKIADTLWNLFGGGTDNQELRPFGDIKLDGFDLDNESGNPTGYLAMVQRFKSNFQNDTSKSYFLSAAPQCPFPDASQPQDVCSELDFVWVQFYNNGDCNIAQSDFLNSVQTWSSGIGNAKLYIGALASGADGDQGFADANTLLGAIQDVKNMNLPNYAGAMLWEAQLAVQNGNFQQKIAPGL

SEQ ID NO: 9375 - protein, 224 aa, Helianthus petiolaris
NIHGRGWGSAITSPDPLAFLGCSATTYPSSLTQQKRWFTGVFEILFTHKNPLLLTIEGNIWFRQALAYFYICLWAVRSVPELCYASLPAYCIIKDSHFLPKVNERASLIFMGIFVIYNLYAYWECKRIGVSLRMWWNLQRMERVNTLTARLFAFVSVMLKLIGLSNTVFEVTQKEHMSNDDDNDNVSVGRFTYDNSPMIMPGVVILLINIMALVNGMLRLYKVD

SEQ ID NO: 9376 - protein, 377 aa, Methylococcus capsulatus str. Bath
MAKEDYYETLGVPRNASDSDIKKAFRRLAMKYHPDRNKDNPEAEERFKSVKEAYDVLSDPKKRSAYDQFGHAGIDPSMGGGGGFGFTGDSFSDIFGDVFGDIFGGGGRRRGRGQRGSDLRYNLELTLEEAVAGTEAKIKVPTWVTCTECGGSGAKKGSAPVTCPTCHGQGAVRMQQGFFSVQQTCPTCRGTGQHISDPCRVCYGQGRVQETKTLSVKIPPGVDTGDRIRLSGEGEAGEGGGPPGDLYVHIGVKQHPIFTRDGADLYCEVPIGFPTACLGGELEVPTLDGKVVLKIPAETQTGRLFRVRGKGVKPVRGGVAGDLLCRVRVETPVHLNKEQIDLIRQLDESLRGGGSHHSPQAHGWLDGVKQFFDRLGL

SEQ ID NO: 9377 - protein, 1140 aa, Adiantum capillus-veneris
MSSKTMTYSSSAAEPRSSSSSVVGSKHNRRVVVAQTTADAKLHAVFEQAQSEGDTGGSSFDYMRSIEDARGSVLSERVPAQAVTAYLQRMQRGGLIQPFGCMLALEEGSFRVIAYSENAAEMLDLMPQSVPSVGVQVLVLGIGTDARTLFTYASAAALEKASGAVDVSMLNPITVHCRSSSKPFNAIVHRIDVGLVIDFEPVRPADVAVWAAAGALQSHKLAAKAISRLQALPVGDIDLLCDSVVEEVRELTGYDRVMAYKFHEDEHGEVLAEIRRSDLEPYLGLHYPATDIPQASRFLFMKNRVRMICDCRALPVRVIQDKELRQPLSLAGSTLRAPHGCHSQYMANMGSIASLVMAVVVNDNDEDVSNRSQQPKMRRLWGLVVCHHTTPRAVPFALRSACEFLMQVFGLQLNMELELAAQMREKHILRTQTLLCDMLLRDAPIGIVSESPNIMDLVKCDGAALYYGKNFWLLGTTPIEAQIKDLAEWLLDVHRDSTGLSTDSLADAGYPGAAALGDAVCGMAAAKITTRDFLFWFRSHTAKEIKWGGAKHDPEDRDDGRKMHPRSSFKAFLEVVKRRSLPWEDMEMDAIHSLQLILRGSFQDIDDSDTKTMIHARLNDLKLHGMDELSTVANEMVRLIETATAPIFAVDAGGFINGWNAKVAELTGLTVEEAMSRSLVRDVVVNASMETAERVLDLALQGQEEQNVEIKLKTYGDQAIKGPVILIVNACSSRDFTDNVVGVCFVGQDVTGQKVVMDKFTRIQGDYKTIVQNPNPLIPPIFGADEFGYCSEWNPAMEKFSGWKREDVIGKMLIGEVFGSDLACCKLRGQDSMTKFMIILNAAMGGRDSDRFPFGFFDRYGKYAEALLIANKRTDSDGAITGVFCFLHTASPELQQALQVQKRSARTALDRLKEVAYMKQEIRNPLYGIVFTRKLLDNTNLTDEQKQIMETSSLCEKQLQNILDEDNFEKLDQGNVDLDTLEFTMGTVMDAVISQGMIRSREKGLQLIRETHVEIKNTRLFGDQYRLQQVLADFLTTAIRFTSSSDGWVGIKVVPTIKNMKDGLHIVHFEFRVSHPGSGIPEDLVQQMYDRSQEITQEGMGLSVSRKLVKLMNGDVKYTREAGVCYFLVTVELPLVQEDD

SEQ ID NO: 9378 - protein, 94 aa, Triticum aestivum
  misc_feature (68)..(68): Xaa can be any naturally occurring amino acid
  misc_feature (72)..(72): Xaa can be any naturally occurring amino acid
  misc_feature (83)..(83): Xaa can be any naturally occurring amino acid
MDGGGSGNASGGSGGASTCCYYALLGIRKNASATDIRAAYRRLAMKWHPDRWASDPGAAGEANQRFQXRIQXAYSVLSDKGKXAMFDAGLFDPL

SEQ ID NO: 9379 - protein, 323 aa, Arabidopsis thaliana
MGVDYYKVLQVDRNAKDDDLKKAYRKLAMKWHPDKNPNNKKDAEAKFKQISEAYDVLSDPQKRAIYDQYGEEGLTSQAPPPGAGGGFSDGGASFRFNGRSADDIFSEFFGFTRPFGDSRGAGPSNGFRFAEDVFSSNVVPPRKAAPIERQLPCSLEDLYKGVSKKMKISRDVLDSSGRPTTVEEILTIEIKPGWKKGTKITFPEKGNEQRGIIPSDLVFIVDEKPHAVFKRDGNDLVMTQKIPLVEALTGYTAQVSTLDGRSVTVPINNVISPSYEEVVKGEGVPIPKDPSKKGNLRIKFTVKFPSRLTTEQKSGIKRMFSSS

SEQ ID NO: 9380 - protein, 374 aa, Loeseneriella africana
ALSIAGAVQSQKLAVRAISQLQSLPGGDIKLLCDTAVENVRNLTGYDRVMVYKFHEDEHGEVVAESRRPDLEPYIGLHYPATDIPQASRFLFKQNRVRIIVDCHASPVSVIQDDGLMQPLCLVGSTLRAPHGCHAQYMENMGSIASLAMAVIINGNDEDGMGGRNPTRLWGLVVCHHTSARCIPFPLRYACEFLMQAFGLQLNMELQLAAQLLDKHVLKTQTLLCDMLLRESPTGIVTQSPSIMDLVKCDGAALYYQANYYPLGVTPTEAQIKDIVEWLLAFHGDSTGLSTDSLADAGYPGATSLGDAVCGMAVAYITNKDFLFWFRSHTAKEIKWGGAKHHPEDKDDGQRMHPRSSFKAFLEVVKSRSLPWEN

SEQ ID NO: 9381 - protein, 473 aa, Bambusa oldhamii
MAAAVAAADEKLEKLRDAVAQLDQISENEKAGFTSLVSRYLSGEAEQIEWSKIQTPTDEVVVPYDTLAPAPEDLDATKKLLDKLVVLKLNGGLGTTMGCTGPKSVIEVRNGFTFLDLIVIQIESLNKKYGCNVPLLLMNSFNTHDDTQKIVEKYSNSNIEIHTFNQSQYPRIVTEDFLPLPSKGKTGKDGWYPPGHGDVFPSLNNSGKLDTLLSQGKEYVFVANSDNLGAIVDIKILNHLIHNQNEYCMEVTPKTLADVKGGTLISYEGRVQLLEIAQVPDEHVNEFKSIEKFKIFNTNNLWVNLKAIKRLVEAEALKMEIIPNPKEVDGVKVLQLETAAGAAIRFFEKAIGINVPRSRFLPVKATSDLLLVQSDLYTLVDGFVIRNPARANPANPSIELGPEFKKVANFLARFKSIPSIVELDSMKVSGDVWFGSGITLKGKVTISAKSGVKLEIPDGTVLENKDINGPEDL

SEQ ID NO: 9382 - protein, 363 aa, Loeseneriella africana
QSQKLAVRAISQLQSLPGGDIKLLCDTAVENVRNLTGYDRVMVYKFHEDEHGEVVAESRRPDLEPYIGLHYPATDIPQASRFLFKQNRVRIIVDCHASPVIVIQDDGLMQPLCLVGSTLRAPHGCHAQYMENMGSIASLAMAVIINGNDEDGMGGRNPTRLWGLVVCHHTSARCIPFPLRYACEFLMQAFGLQLNMELQLAAQLLEKHVLKTQTLLCDMLLRESPTGIVTQSPSIMDLVKCDGAALYYQANYYPLGVTPTEAQIKDIVEWLLAFHGDSTGLSTDSLADAGYPGATSLGDAVCGMAVAYITNKDFLFWFRSHTAKEIKWGGAKHHPEDKDDGQRMHPRSSFKAFLEVVKSRSLP

SEQ ID NO: 9383 - protein, 358 aa, Tuber borchii
MSENSTIVSNTANLVKFLNLDQKGSILAEYIWIDGANGVRSKTKTLFKKPSSVEDLPEWNFDGSSTGQAPGEDSDIYLRPVAIFPDPFRMGDNILVLAECWNADGSPNKFNHRHECAKIMEAHKDQKPWFGLEQEYTLFDLYGNPYGWPKGGFPGPQGPYYCGVGTGKVYCRDIVEAHYKACLFAGIKISGINAEVLPSQWEFQVGPCVGIEMGDHLWISRYLLHRVAEEFGVKISFHPKPIPGDWNGSGLHTNVSTQAMRDEGGMKAIEEAIQKLSTRHAEHIAVYGDDNTLRLTGRHETGNIDAFSYGVADRGSSIRIPRSCAKEGKGYFEDRRPASNACPYQITGIMMETICGGI

SEQ ID NO: 9384 - protein, 365 aa, Loeseneriella africana
AVQSQKLAVRAISQLQSLPGGDIKLLCDTAVENVRNLTGYDRVMVYKFHEDEHGEVVAESRRPDLEPYIGLHYPATDIPQASRFLFKQNRVRIIVDCHASPVSVIQDDGLMQPLCLVGSTLRAPHGCHAQYMENMGSIASLAMAVIINGNDEDGMGGRNPTRLWGLVVCHHTSARCIPFPLRYACEFLMQAFGLQLNMELQLAAQLLEKHVLKTQTLLCGMLLRESPTGIVTQSPSIMDLVKCDGAALYYQANYYPLGVTPTEAQIKDIVEWLLAFHGDSTGLSTDSLADAGYPGATSLGDAVCGMAVAYITNKDFLFWFRSHTAKEIKWGGAKHHPEDKDDGQRMHPRSSFKAFLEVVKSRSLP

SEQ ID NO: 9385 - protein, 364 aa, Maytenus fournieri
VQSQKLAVRAISQLQSLPGGDVKLLCETVVESVKDLTGYDRVMVYKFHDDEHGEVVAERKRPDLEPYIGLHYPATDIPQASRFLFKQNRVRMIVDCHALPVRVIQDDGLMQPLCLVGSTLRAPHGCHAQYMENMGSIASLAMAVIINGNDEEVIGGRNPTRLWGLVVCHHTSARCIPFALRYACEFLMPAFGLQLNMELQLAAQLLEKHVLKTQTLLCDMLLRDSPTGIVTQSPSIMDLVKCDGAALYYQGSYYPLGVTPTEAQIKDIVEWLLAFHGDSTGLSTDSLADAGYPGAALLGDAVCGMAVAYITNRDFLFWFRSHTAKEIKWGGAKHHPEDKDDGQRMHPRSSFKAFLEVVKSRSMP

SEQ ID NO: 9386 - protein, 356 aa, Saccharomyces cerevisiae YJM789
MTVFSGVNKIEFEGTFEGIGKDVVMSQMIRALQKHFPSIRDKNYEFSLFLHIFQRYVLENTSITHDLVCDKIRLPIIDEVVELDDIKNYGLLEGKLLSKLAILKLTGKANPIIGKESPLFEVKNGMSSLDVIVRQTQNLNVRYNSDVPLIFMTSLETESQVSNFLEEHYSSSKVRWKTVVQSSFPQIDKDRLLPIDLQINSHENDFWYPCGTGNLTDTLYFSGELDKLIAQGKEILFVSNVDNLGATGDLNILNFIINEKIEYLVEVVERTANVSNTGVLATYKGKLRSVYYNCLSNESASTCRIVNTNNIWIDLKKLKVLIESNSLNLPIHSSESKITHKNEEIECLQFKTQLVD

SEQ ID NO: 9387 - protein, 363 aa, Maytenus fournieri
QSQKLAVRAISQLQSLPGGDVKLLCETVVESVKDLTGYDRVMVYKFHDDEHGEVVAERKRPDLEPYIGLHYPATDIPQASRFLFKQNRVRMIVDCHALPVRVIQDDGLMQPLCLVGSTLRAPHGCHAQYMENMGSIASLAMAVIINGNDEEVIGGRNPTRLWGLVVCHHTSARCIPFPLRYACEFLMQAFGLQLNMELQLAAQLLEKHVLKTQTLLCDMLLRDSPTGIVTQSPSIMDLVKCDGAALYYQGSYYPLGVTPTEAQIKDIVEWLLAFHGDSTGLSTDSLADAGYPGAALLGDAVCGMAVAYITNRDFLFWFRSHTAKEIKWGGAKHHPEDKDDGQRMHPRSSFKAFLEVVKSRSMP

SEQ ID NO: 9388 - protein, 467 aa, Oryza sativa Japonica Group; identical to SEQ ID NO: 8497

SEQ ID NO: 9389 - protein, 383 aa, Porphyromonas gingivalis W83
MAEKRDYYEVLGVSKNATDDELKKAYRKKAIQYHPDKNPGDKEAEEHFKEVAEAYDVLSDPQKRSQYDQFGHAGLGGAAGGGFSGGGMSMEDIFSRFGDLFGGFGGFGGFSDMGGGSRRRVRRGSDLRVRVKLSLADISKGVEKKVKVKKQVVCSKCRGDGTEEANGKTTCQTCHGTGVVTRVSNTFLGAMQTQSTCPTCHGEGEIITKPCSKCKGEGVEIGEEVISFHIPAGVAEGMQMSVNGKGNAAPRGGVNGDLIVVIAEEPDPNLIRNGNDLIYNLLISVPLAIKGGSVEVPTIDGRAKIRIEAGTQPGKMLRLRNKGLPSVNGYGMGDQLVNVNVYIPESIDAKDEQAIAAMENSDSFKPTDAARKDIDKKYREMLD

SEQ ID NO: 9390 - protein, 132 aa, Sordaria macrospora
EYCSGGEFFRALQTRPGKCIPEDDARFYAAEVTAALEYLHLMGFIYRDLKPENILLHQSGHIMLSDFDLSKQSDPGGKPTMIIGKNGTSTSSLPTIDTKSCIANFRTNSFVGTEEYIAPEVIKGSGHTSAIK

SEQ ID NO: 9391 - protein, 359 aa, Schizosaccharomyces pombe
MSQYDVEPLLSKAAILNKYADLPQNGKVMAEYIWIDGFNHLRSKTMTLDAKPSSIDQLRVWNFDGSSTGQAPGNNSDTLLKPVAMYNDPFRRGDNILVLAACYTADGSPNGFNHRDACAKLLEKHADKETWFGIEQEYTMLDYYDRPFGWPKGGFPGPQGPFYCGVGTGRVFARDIVEAHYKACLYAGINISGINAEVMPSQWEYQVGPCAGIEMGDQLWMSRFLLHRIAEDFGVKISFHPKPILGDWNGAGCHTNVSTKDTRAEGGIKAIESYLEKFAKRHKEHIAVYGDDNDLRLTGRHETGSIDKFTYGVADRGASVRIPRSVAMNGCGYFEDRRPASSIDPYLVTGIITETMFEH

SEQ ID NO: 9392 - protein, 615 aa, Boschniakia hookeri
SGKPFYAIIHRVTGSLIIDFEPVKPHEVPMTAAGALQSYKLAAKAITRLQALPGGSMERLCDTMVQEVFELTGYDRVMIYKFHDDDHGEVSTEITKPGLEPYVGLHYPATDIPQAARFLFMKNKVRMICDCRANHVKVVQDENLSFDLTLCGSTLRAPHSCHLQYMENMNSIASLVMSVVVNEGNEDGPDSSSVPDKRKTLWGLVVCHNTSPRFVPFPLRYACEFLAQVFAIYVNKEFELENQMLEKNILRTQTLLCDLLLRDAPLGIVSQSPNVMDLVKCDGAVLLYKNTKYRLGLTPSDFQIRDIVSWLDEYHRDSTGLSTDSLYDAGFPGALSLCDAVCGMVAVRITERDWLFWFRSHTAAEIQWGGAKHEPGETDDGRKMHPRSSFKAFLEVVKTRSLPWKDFEMDAIHSLQLILRNAFKESEGRDSESREIHARLHDLQIDGVREIEAVTSEMVRLIETASVPIFAVDVDGLVNGWNTKIADLTGLCVDKAIGWHFLALVEDSSADTVSKMLELALQGKEEQNVQFEIKTHGQTSESGPITLIVNACASRDVKGNVVGVCFIAQDITTQKIMMDKFTRIEGDYRTIVQNPNPLIPPIFGTDEFGWCSEWN

SEQ ID NO: 9393 - protein, 592 aa, Boschniakia rossica
SGKPFYAIIHRVTGGLIIDFEPVKPHDVPMTAAGALQSYKLAAKAITRLQALPSGSMERLCDTMVQEVFELTGYDRVMIYKFHDDDHGEVFTEITKPGLEPYVGLHYPATDIPQAARFLFMKNKVRMICDCRANHVKVVQDENLPFDLTLCGSTLRAPHSCHLQYMENMNSIASLVMSVVVNEGNEEDGPDSSSGPDKRKRLWGLVVCHNTSPRFVPFPLRYACEFLAQVFAIHVNKELELKNQMLEKNILRTQTLLCDLLLRDAPLGIVSQSPNVMDLVKCDGAVLLYKNTKYRLGLTPSDFQVRDIVSWLDEYHRDSTGLSTDSLYDADFPGARALGDAVCGMAAVRITDSDWLFWFRSHTAAEIRWGGVKHEPGEKDDGRKMHPRSSFKAFLEVVKARSLPWKDYEMDAIHSLQLILRNAFKESEGRDLESREIHARLNELQIDGAREIEAVASEMVRLIETASVPIFAVDVDGLVNGWNTKIADLTGLCVDKAIGSHFLALVEKEEQNVQFEIKTHGQTSESGPISLIVNACASRDVKENVVGVCFIAQDITTQKSMMDKFTRIEGDYRAIVQNPNPLIPPIFGTDEF

SEQ ID NO: 9394 - protein, 515 aa, Oryza sativa; identical to SEQ ID NO: 7505

SEQ ID NO: 9395 - protein, 608 aa, Boschniakia strobilacea
SGKPFYAIIHRVTGSLIIDFEPVKPHEVPMTAAGALQSYKLAAKAITRLQALPGGSMERLCDTMVQEVFELTGYDRVMIYKFHDDDHGEVSTEITKPGLEPYVGLHYPATDIPQAARFLFMKNKVRMICDCRANHVKVVQDENLSFDLTLCGSTLRAPHSCHLQYMENMNSIASLVMSVVVNEGNEDGPDSSSVPDKRKTLWGLVVCHNTSPRFVPFPLRYACEFLAQVFAIYVNKEFELENQMLEKNILRTQTLLCDLLLRDAPLGIVSQSPNVMDPVKCDGAVLLYKNTKYRLGLTPSDFQIRDIVSWLDEYHRDSTGLSTDSLYDAGFPGALSLCDAVCGMVAVRITERDWLFWFRSHTAAEIQWGGAKHEPGETDDGRKMHPRSSFKAFLEVVKTRSLPWKDFEMDAIHSLQLILRNAFKESEGRDSESREIHARLHDLQIDGVREIEAVTSEMVRLIETASVPIFAVDVDGLVNGWNTKIADLTGLCVDKAIGWHFLALVEDSSADTVSKMLELALQGKEEQNVQFEIKTHGQTSESGPITLIVNACASRDVKENVVGVCFIAQDITTQKIMMDKFTRIEGDYRTIVQNPNPLIPPIFGTDEF

SEQ ID NO: 9396 - protein, 220 aa, Sauropus androgynus
INLKIPVLKNKVRMICDCQAPPVKVVQDKRLAQPLSLCGSTMRSPHGCHAQYMANMGTIASLVMSVTINEEDEETVNDQQIGRKLWGLVVCHHTNPRFVPFPLRYACEFLMQVFGVQVNREVELAAQTTEKHILQTQTVLCDMLLRDAPVAIVTQSPNVMDLVKCDGAALYYRKKFWMLGVTPTETQIKDITEWLLEYHGESTGLSTDSLMEAGYPGAAI

SEQ ID NO: 9397 - protein, 496 aa, Yarrowia lipolytica CLIB122
MSKHHLKTQSAVAFDNSATTVAASQMRNALNKLSDSVEDPAQKRRFENEMDNFFSLFRRYLVDKAKGNALDWDRIQPPKAEQVIDYKDIDQDVGAEFLNKLAVLKLNGGLGTSMGCVGPKSVIEVRDGKSFLDLSVRQIEHLNRQYNVDVPFILMNSFNTDEDTQTIIKKYQGHKINIKTFNQSRFPRVFKDSNLPVPKSFDDRIDAWYPPGHGDLFESLHNSGVLDELIAEGKEIIFVSNVDNLGAVVDLSILKHMSTTGSEYIMELTDKTRADVKGGTLIDYDGQVRLLEIAQVPKEHTEEFKSIKKFKYFNTNNLWINLKAIKRVVENNELDSEIIPNEKSITIGKNDIPVLQLETAVGAAIRHFKGCMGVNVPRRRFLPVKTCSDLLLVKSDLYTLHAGRLEMDPSRFGGSPLIKLGGHYKKVSDFQKRIPHMPKILELDHLTITGNVMLGKGVTLKGTVICVCEEGKKIDIPNGSVLENVVITGSLSILEH

SEQ ID NO: 9398 - protein, 469 aa, Oryza sativa Indica Group
MAVAADVKLEGLRAATDKLDQISENEKSGFISLVSRYLSGEAEQIEWSKIQTPTDEVVVPYDTLSAAPEDLNETKKLLDKLVVLKLNGGLGTTMGCTGPKSVIEVRNGFTFLDLIVIQIESLNKKYGCNVPLLLMNSFNTHDDTQKIVEKYSNSNIEIHTFNQSQYPRIVTEDFLPLPSKGKTGKDGWYPPGHGDVFPSLNNSGKLDTLLAQGKEYVFVANSDNLGAIVDIKILNHLIHNQNEYCMEVTPKTLADVKGGTLISYEGRVQLLEIAQVPDEHVNEFKSIEKFKIFNTNNLWVNLKAIKRLVEAEALKMEIIPNPKEVDGVKVLQLETAAGAAIRFFEKAIGINVPRSRFLPVKATSDLLLVQSDLYTLVDGFVIRNPARTNPSNPSIELGPEFKKVANFLARFKSIPSIVELDTLKVSGDVWFGSGVTLKGKVTITAKSGKLEIPDGAVLENKDINGPEDL

SEQ ID NO: 9399 - protein, 398 aa, Brandisia hancei
SGKPFYAIIHRVTGSLIIDFEPVKPHEVPMTAAGALQSYKLAAKAITRLQSLPSGSMERLCDTMVQEVFELTGYDRVMIYKFHDDDHGEVFTEITRPGLESYVGLHYPATDIPQAARFLFMKNKVRMICDCRANHVQVVQDDNLPFDLTLCGSTLRAPHSCHLQYMENMNSIASLVMSVVVNEGSEEAGGPDSSLHPDKRKRLWGLVVCHNTSPRFVPFPLRYACEFLTQVFAIHVNKELELENQMLEKNILRTQTLLCDMLLRDAPLGIVSQSPNVMDLVKCDGAVLIYKNNKYRLGLTPSDFQIRDIVSWLDEYHRDSTGLSTDSLYDAGFPGALTLGDAICGMAAVRITDKDWLFWFRSHTAAEIRWGGAKHEQGEKDDGRKMHPGSSFKAFLKL

SEQ ID NO: 9400 - protein, 221 aa, Thecacoris madagascariensis
  misc_feature (220)..(220): Xaa can be any naturally occurring amino acid
YTSSSRFLFMKNKVRMICDCRATPVKVIQDNKLAEPLNFCGSTLRSPHGCHAQYMENMGSIASLVMAVTINEDDDEIENDQSKGSKLWGLVVCHHTDPRFVPFPLRYACDFLIQVFGVQVNKEIQLVAQTREKHILQTQTVLCDMLLRDAPVAIITQSPNVMDLVKCDGAALYYRKKFWLLGVTPTEEQIKDIAEWLLEYHGESTGLNIDTLMEAGYPGXS

SEQ ID NO: 9401 - protein, 392 aa, Oryza sativa; identical to SEQ ID NO: 2425
  misc_feature (181)..(181): Xaa can be any naturally occurring amino acid
  misc_feature (206)..(206): Xaa can be any naturally occurring amino acid

SEQ ID NO: 9402 - protein, 695 aa, Hordeum vulgare subsp. vulgare
SGTPNIMDLIKCDGAALLYGDKVWRLGNAPTESQIRHIALWLSEVHMDSTGLSTESLHDAGYPGASALGDMVCGIAVAKINSNDILFWFRSHTAEEIRWGGAKNDPSDQDDSRRMHPRLSFKAFLEVVKMKSLAWSDYEMDAIHSLQLILRGALDDVAKPTGKASLDEQIGDLKLDGIAELQAVTSEMVRLMETATVPILAVDGNGLVNGWNQKAAELTGLRVDDAIGRHILTLVEESSVPVVQRMLYLALQGKEEKEVRFDMKTHGPKRDDGPVILVVNACASRDLHDDVVGVCFVAQDMTVHKLVMDKFTRVKGDYMAIVHNPNPLIPPIFGADEFGWCSEWNAAMTKLTGWHREEVLDKMLLGEVFDSSNASCLLKNKDAFVGLCVLINSALAGEETEKAPFGFFDRSGKYTECLLSVNSRANEDGLITGVFCFIHIPSHELQQALQVQQASEQASLRRLKAFSYMRHAINNPLSGMLYSRKALKNTDLNEEQMRQIHVSDNCHHQLNKILADLDQDNIMENSSCLDLEMAEFVLQDVVVAAVSQVLIACQGKGIRISCNLPERFMKQLVYGDGVRLQQILSDFLSISVKFSPVGGSVEISAQATKNSIGENLHLIDLELRIKHRGLGVPAELMAQMFEEENTEQSEEGLGLLVSRNLLRLMNGDVRHLREAGMSIFILTAELACAPTAMRQ

SEQ ID NO: 9403 - protein, 166 aa, Linum usitatissimum
EDKTEWGQRTGWIYGSVTEDVVTGYRMHNRGWKSVYCVTKRDAFRGTAPINLTDRLHQVLRWATGSVEIFFSRNNALLASSRMKFLQRIAYLNVGIYPFTSVLLIVYCFLPALSLFSGQFIVSSLNVTFLVYLLIITITLCMLAVLEIKWSGIELEEWWRNEQFWV

SEQ ID NO: 9404 - protein, 753 aa, Hordeum vulgare subsp. spontaneum
IPFPLRYACEFLMQAFGLQLNMELQLAHQLSEKHILRTQTLLCDMLLRDSPTGIVTQSPSIMDLVKCDGAALFYHGKYYPLGVTPTEAQIKDIIEWLTVCHGDSTGLSTDSLADAGYPGATALGDAVCGMAVAYITPSDYLFWFRSHTAKEIKWGGAKHHPEDKDDGQRMHPRSSFKAFLEVVKSRSLPWENAEMDAIHSLQLILRDSFRDAGEGTSNSKAIVNGQVQLGELELRGIDELSSVAREMVRLIETATVPIFAVDTYGCINGWNAKVAELTGLTVEEAMGKSLIKDLIFKESEEIVEKLLSQALRGEEGTNVEIKLKTFGSEQSKGPIFVIVNACSSRDYTKNIVGVCFVGQDITGQKVVMDKFVNIQGDYKAIVHNPNPLIPPIFASDENICCSEWNTAMENLTGWSRGEVVGKLLVGEVFGNCCRLKGPDALTKFMIALHNAIGGQDSEKSPFSFFDKNGKYVQALLTANTRSKMDGETIGAFCFLQIASPELQQAFEIQRQQEKKCYARMKELAYICQEIKNPLSGIRFTNSLLEMTDLKDDQRQFLETSAACEKQMSKIVKDASLQSIEDGSLVLEKGEISLGNVMNAVVSQVMILLRERDLQLIRDIPDEIKEASAYGDQYRIQQVLSDFLLSMVRFAPTENGWVEIQVRPNVKQNSDGTETMLFLFRFACPGEGLPPDIVQDMFSNARWTTQEGIGLSVCRKILKLMGGEVQYIRESERSFFLIVLELPQPRRSETRDRS

SEQ ID NO: 9405 - protein, 166 aa, Linum usitatissimum
EEKTEWGQRIGWIYGSVTEDVVTGYRMHNRGWKSVYCVTKRDAFRGTAPINLTDRLHQVLRWATGSVEIFFSRNNALLASPRMKLLQRIAYLNVGIYPFTSFFLIVYCFLPALSLFSGQFIVSTLNVTFLAYLLIITVTLCMLAVLEIKWSGIELEEWWRNEQFWV

SEQ ID NO: 9406 - protein, 386 aa, Shewanella sp. MR-7
MTAGKTPTQHSTQPLNRLLGETSGAFADLGTFLPLVLGLIALNQFSPQGIFLGFGLFAILSALFYRRPIPVQPMKVIAALVIAQGLTPGMLQASAMLMGIILLILAFSGAITWLAKQLSQAVSVGIQLAIGLQLMWMGTKMMSDFWLLGLGAFALLFVSKFLPLRYLAMPLVIAAGMLWQANSQTDIATSLDIPALSASLHLAWPSLNEWSSAAILLVLPQLALTLTNAVIATSAMAQEKFPEDAAKLTPKNLAISSGLANLLLAPFGAAAMCHGAGGLAVQYHFGARTHLAPLIFGSTCVVIALFWDGQIAWLLGLIPVAILGSLLSIGGLQLAWSKRLIDGKPFCIFVILATAVTCLAVNAAAGLAVGIILEQGRRTWAMLAMR

SEQ ID NO: 9407 - protein, 166 aa, Linum usitatissimum
EDKTEWGDKIGWIYGSVTEDVVTGYRMHNRGWRSVYCVTKRDAFRGTAPINLTDRLHQVLRWATGSIEIFFSKNNPLLASSRLKFRQRIAYLNVGFYPFTSIVLVIYCFLPAWCLFTGSFIVQSLNIAFLCYLLVITVTLTLLSLLEVKWSGIELEELWSNEQFWV

SEQ ID NO: 9408 - protein, 232 aa, Aristolochia liukiuensis
IPQASRFLFMKNKVRMICDCYAKPVKVYQDERLSFDLTLCGSTLRASHSCHLQYMKNMGSVASLVLAVVVKEGEEDDNPDPNQEPLSKRKRLWGLVVCHNTTPRFVPFPLRYACEFLMQVFAIHVNNEVELENQIREKNILRTQTLLCDMLLRDSSLSIVTRSPNIMDLVKCDGAAFLCRNKVYTLGVTPTESQIREINQWLSEYHMDSTGLSTDSLHDAGYPNALSLGDIV

SEQ ID NO: 9409 - protein, 293 aa, Brassica oleracea
MAGLDLGTSFRYVNHQLLRPDLHLHHNSSSGDVTPGVGIGHFTADDEDNNHQGLDLASGGGGSGSSGGGGHGGGGGGDGVGRRPRGRPPGSKNKPKPPVIITRESANTLRAHILEVTNGCDVFDCVATYARRRQRGICVLSGSGTVTNVSIRQPSAAGAVVTLQGTFEILSLSGSFLPPPAPPGATSLTIFVAGGQGQVIGGSVVGELTAAGPVIVIAASFTNVAYERLPLEEDEQQHLGGGGGANGGGNLFPEVAGGGGGGLPFFNLPMNMQPNVQLPVEGWPGNSGGRGPF

SEQ ID NO: 9410 - protein, 358 aa, Maytenus undata
SQKLAVRAISQLQSLPGGDIKLLCDTVVESVRDLTGYDRVMVYKFHEDEHGEVMAESKRPDLEPYIGLHYPASDIPQASRFLFKQNRVRMIVDCHASPVLVIQDDRLMQPLCLVGSTLRAPHGCHAQYMENMGSIASLAMAVIINVNDGEGIGGRNPTRLWGLVVCHHTSARCIPFPLRYACEFLMQAFGLQLNMELQLAAQLLEKHVLKTQTLLCDMLLRDSPTGIVTQSPSIMDLVKCDGAALYYQGNYYPLGVTPTEAQIKDIVEWLLAFHGDSTGLSTDSLADAGYPGAALLGDAVCGMAVAYITNRDFLFWFRSHTAKEIKWGGAKHHPEDKDDGQRMHPRSSFKAFLEVVKS

SEQ ID NO: 9411 - protein, 436 aa, Arabidopsis thaliana
MPGHRSKSEKKDADKQLRRDPYEVLGVLRNSTDQEIKSAYRKLALKYHPDKTANDPVAADMFKEVTFSYNILSDPEKRRQFDSAGFEAVEAESQELELDLSSLGAVNTVFAALFSKLGVPIKTSVSATILEEALNGRVSVDPLVLGQAVSKKVEKQCAHFYAVTISEEEVSAGLVCRVESSSKSKFKLLYFDQEANSGLSLALQEDSKRTGKITSAGMYFLGFPVYRLDHTINSMAQAKDPETAFFKKLDGFQQCEVTELKAGTHVFAVYGDNFFKNVSYTIQVLCAAAFTQEKEDLRSVEAQILTKRAELAKFETEYREVLVQFTDMTSRYAQEMQSIDELLKQRNEIHSAYTTIPLMKRSSSKNRMRKSSFKKAAAKAPAPTEQEEEEEEEEEEEEESSRQKNKKPSTCDKSETLKKKSKWFNLHLKLDKKKPC

SEQ ID NO: 9412 - protein, 232 aa, Aristolochia manshuriensis
IPQASRFLFMKNKVRMICDCYAKPVKVYQDERLSFDLTLCGSTLRASHSCHLQYMKNMGSVASLVLAVVVKEGEEDDNPDPNQEPQSKRKRLWGLVVCHNTTPRFVPFPLRYACEFLMQVFAIHVNNEVELENQIREKNILRTQTLLCDMLLRDSSLSIVTRSPNIMDLVKCDGAALLCQNKVYTLGVTPTESQIREINQWLSEYHMDSTGLSTDSLHDAGYPKALSLGDIV

SEQ ID NO: 9413 - protein, 1091 aa, Oryza sativa
MSSSRPTQCSSSSSRTRQSSRARILAQTTLDAELNAEYEEYGDSFDYSKLVEAQRTTGPEQQARSEKVIAYLHHIQRAKLIQPFGCLLALDEKTFNVIALSENAPEMLTTVSHAVPSVDDPPKLRIGTNVWSLFTDPGATALQKALGFADVSLLNPILVQCKTSGKPFYAIVHRATGCLVVDFEPVKPTEFPATAAGALQSYKLAAKAISKIQSLPGGSMEVLCNTVVKELFDLTGYDRVMAYKFHEDDHGEVFAEITKPGLEPYLGLHYPATDIPQAARFLFMKNKVRMICDCRARSIKIIEDESLHLDISLCGSTLRAPHSCHLQYMENMNSIASLVMAVVVNENEDDDEVGADQPAQQQKRKKLWGLLVCHHESPRYVPFPLRYACEFLAQVFAVHVNKEFELERQVREKSILRMQTMLSDMLLRESSPLSIVSGTPNIMDLVKCDGAALLYGGKVWRLQNAPTESQIRDIAFWLSDVHRDSTGLSTDSLHDAGYPGAAALGDMICGMAVAKINSKDILFWFRSHTAAEIRWGGAKHDPSDKDDSRRMHPRLSFKAFLEVVKMKSLPWNDYEMDAIHSLQLILRGTLNDDIKPTRAASLDNQVGDLKLDGLAELQAVTSEMVRLMETATVPILAVDSNGLVNGWNQKVAELTGLRVDEAIGRHILTVVEESSVPVVQRMLYLALQGKEEKEVKFEVKTHGSKRDDGPVILVVNACASRDLHDHVVGVCFVAQDMTVHKLVMDKFTRVEGDYKAIIHNPSPLIPPIFGADEFGWCSEWNAAMTKLTGWHRDEVINKMLLGEVFDSTNASCLVKNKDAFVSLCILINSALAGDETEKAPFSFFDRNGKYIECLLSVNRKVNADGVITGVFCFIQVPSHELQHALHVQQASQQNALTKLKAYSYMRHAINNPLSGMLYSRKALKNTGLNEEQMKEVNVADSCHRQLNKILSDLDQDSVMNKSSCLDLEMVEFVLQDVFVAAILSDFLFVSVKFSPVGGSVEISCSLTKNSIGENLHLIDLELRIKHQGKGVPADLLSQMYEDDNKEQSDEGMSLAVSRNLLRLMNGDVRHMREAGMSTFILSVELASAPAK

SEQ ID NO: 9414 - protein, 134 aa, Oryza sativa; identical to SEQ ID NO: 2432

SEQ ID NO: 9415 - protein, 245 aa, Maytenus undata
ALSIAGAVQSQKLAVRAISQLQSLPGGDIKLLCDTVVESVRDLTGYDRVMVYKFHEDEHGEVMAESKRPDLEPYIGLHYPASDIPQASRFLFKQNRVRMIVYCHASPVLVIQDDRLMQPLCLVGSTLRAPHGCHAQYMENMGSIASLAMAVIINVNDGEGIGGRNPTRLWGLVVCHHTSARCIPFPLRYACEFLMQAFGLQLNMELQLAAQLLEKHVLKTQTLLCDMLLRDSPTGIVTQSPSIMD

SEQ ID NO: 9416 - protein, 132 aa, Oryza sativa Japonica Group; identical to SEQ ID NO: 8675

SEQ ID NO: 9417 - protein, 245 aa, Mortonia greggii
ALSIAGAVQSQKLAVRAISQLQSLPGGDIKLLCDAVVENVRNLTGYDRVMVYKFHEDEHGEVVAESKRPDLEPYIGLHYPATDIPQASRFLFKQNRMRMIVDCHSTPVSVIQDDGLMQPLCLVGSTLRAPHGCHAQYMANMGSIASLAMAVIINGNDEDGIGGRNTTRLWGLVVCHHTSARCIPFPLRYACEFLMQAFGLQLNMELQLASQLLEKHVLKTQTLLCDMLLRDSPTGIVTQSPSIMD

SEQ ID NO: 9418 - protein, 387 aa, Zea mays; identical to SEQ ID NO: 2436

SEQ ID NO: 9419 - protein, 245 aa, Mortonia greggii
ALSIAGAVQSQKLAVRAISQLQSLPGGDIKLLCDAVVENVRNLTGYDRVMVYKFHEDEHGEVVAESKRPDLEPYIGLHYPATDIPQASRFLFKQNRVRMIVDCHSTPVSVIQDDGLMQPLCLVGSTLRAPHGCHAQYMANMGSIASLAMAVIINGNDEDGIGGRNTTRLWGLVVCHHTSARCIPFPLRYACEFLMQAFGLQLNMELQLASQLLEKHVLKTQTLLCDMLLRDSPTGIVTQSPSIMD

SEQ ID NO: 9420 - protein, 297 aa, Oryza sativa Indica Group
MASRRLAPLLVLLLSSSLAAGQSTGDTVVFWGRNTDQLEGSLREACDTGLYTTVIISFLSAFGYIPGTYKLDISGHTVSAVGPDIKHCQSRGILVLLAIGGQGGEYSLPTSQAAVDLEDYLWNAFLGGGRPGVARPFGDAVVDGIDFFIDQGATEHYDELARRLYAHNKDYKGRLGVMLTATARCVFPDQRLQAALSTGLFSRIHVNVFGDGRCASRREELEKWMAAYPQSRVLVGVVASPEADRDGYVSHKDLYYDVLQFINKLPNYGGIMVWNRYWDKKTGWTAGNEPGLLDQVL

SEQ ID NO: 9421 - protein, 295 aa, Zea mays
MAANLKWAPVLALLVVVAAMVGTTSAGNIAVYWGQNGNEGSLADACNSGLYAYVNIAFLTTFGNGQTPVLNLAGHCDPGSGSCTGQSSDIQTCQSLGIKVLLSIGGASGSYGLSSTDDANSVADYLWDNFLGGSGSSRPLGAAVLDGIDFDIENGQSAHYDDLANALKGKGSVLLTAAPQCPYPDASLGPALQTGQFDNVWIQFYNNPGCAYANGDDTNLVNAWNTWTSSITAGSFYLGVPASPQAAGSGYIDPGTLTGTVIPAIRGIGNYGGIMVWDRFNDVQNNYSSQVKGSV

SEQ ID NO: 9422 - protein, 245 aa, Paxistima canbyi
ALSIAGAVQSQKLAVRAISQLQSLPGGDIKLLCDTVVESVRDLTGYDRVMVYKFHEDEHGEVVAESKRPDLEPYIGLHYPATDIPQASRFLFKQNRVRTIVDCHASPVRVIQDDGLMQPLCLVGSTLRAPHGCHAQYMENMGSIASLAMAVIINGNDEEVIGGRYATRLWGLVVCHHTSARCIPFPLRYACEFLMQAFGLQLNMELQLAAQLSEKHVWKTRTLLCDMLLRDSPPAIVTQSPSIMD

SEQ ID NO: 9423 - protein, 552 aa, Saccharomyces cerevisiae YJM789
MSLLYIILLFTQFLLPPTDAFDSSANTNIAVYWGQNSAGTQESLATYCESSDADIFLLSFLNQFPTLGLNFANACSDTFSDGLLHCTQIAEDIETCQSLGKKVLLSLGGASGSYLFSDDSQAETFAQTLWDTFGEGTGASERPFDSAVVDGFDFDIENNNEVGYSALATKLRTLFAEGTKQYYLSAAPQCPYPDASVGDLLENADIDFAFIQFYNNYCSVSGQFNWDTWLTYAQTVSPNKNIKLFLGLPGSASAAGSGYISDTSLLESTIADIASSSSFGGIALWDASQAFSNELNGEPYVEILKNLLTSASQTATTTVASSKTSAASTSSASTSQKKTTQSTTSTQSKSKVTLSPTASSAIKTSITQTTKTLTSSTKTKSSLGTTTTESTLNSVAITSMKTTLSSQITSAALVTPQTTTTSIVSSASLQTAITSTLSPATKSSSVVSLQTATTSKLSPTTTSTSSGSTSSDSTARTLAKELNAQYAAGKLNGKSTCTEGEIACSADGKFAVCNHSAWVYMECASGTTCYAYDSGDSVYTQCNFSYLESNYF

SEQ ID NO: 9424 - protein, 830 aa, Hordeum vulgare
RAPHGCHAQYMANMGSIASLVMSVTVNEDDDEDGDTGSDQQPKGRKLWGLVVCHHTSPRFVPFPLRYACEFLLQVFGIQLNKEVELASQAKERHILRTQTLLCDMLLGDAPVGIFTQSPNVMDLVKCDGAALCYQNQIMVLGSAPSEGEIKKIAAWLLECHDGSTGLSTDSLLEAGYPGASALGEVVCGMAAIKISSKGFIFWFRSHTAKEIKWSGAKHEPGDADDNGRRMHPRSSFRAFLEVVKWRSVPWEDVEMDAIHSLQLILRGSLQDEDANDNNVGSIVEAPSDDVRKIQGLLELRVVTNEMVRLIETATAPILAVDIVGSINGWNGKVAEITGLPTTEAIGMLLVDLVEGDSVEVIKQMLNSAMQGTEEQNFEIKLKTFHQQEGNGPVVLMVNACCSRDLSDKVVGVCFVAQDLTGHKMVMDKYTQIQGDYVAIVKNPNELIPPIFMINDLGSCLEWNEAMQKITGIKREDAIDKLLIGEVFTLHDYGCRVKDQATITKLSILMNTVISGQEPEKLAFGFFSTDGKYMESLLTANKRTDAEGKITGALCFLHVPSPELQHALQVQKMSEQAAARSFKELTYIRQELKNPLNGMQFTRKLLEPSDLTEEQRQLFASNVLCQEQLKKILHDNDLEGIEQCYMEMNTVEFNLEEALNTVLMQGMSLSKEKQISLDRDWPVEVSSMYLYGDDLRLQQVLADYLACTLQFTRPAEGPIVLQVIPKKEHIGSGMQIAHLEFRVVHPAPGVPEALIQEMFRHGPGVSREGLGLHISQKLVKTMSGTVQYLREAESSSFIVLVEFPVAQLNSKRSKPSTSKWSKPSTSKSNF

SEQ ID NO: 9425 - protein, 466 aa, Buchnera floridana
SGKPFYAVIHRVTGSLVIDFEPVEPHEVPMTAAGALQSYKLAAKAISRLQALPSGSLERLCETMAQEVFELTGYDRVMVYRFHDDDHGEVFAEITRPGLEPYLGLHYPATDIPQAARFLFMKNKVRMICDCRAAHVKVVQGEGLSSNLTLCGSTLRAPHSCHLRYMENMNSIASLVMSVVINEGTDEESSATSSSSSHPDKQKRLWGLVVCHHTSPRFVPFPLRYACEFLSQVFSIHVGKELELLNQTVEKNILKTQTMLCDMLLRGNPLAIVTRSPTVVDLVKCDGAVFLYKGKYHRLGLAPSDLQIQEIVSWLDEYHRDSTGMSTDSLLGAGFPGAAKLGDAFCGMAAVRITGRDWLFWFRSHTAAEVQWGGAKQEKGDEDDGRKMHPRSSFKAFLEVVKARSVPWRDFEMDAIHSLQLILRKACDKEEEEEARRKDMVVAGEIQSRLNEMHIDGAKEMEMVTS

SEQ ID NO: 9426 - protein, 364 aa, Oryza sativa Indica Group
MSGKLCFLASVLLSMSTVDLAMSPASAGVNIAVYWGQNGSEGTLGETCGTGLYAYVNLAFLSTFGAGRAPVLNLADHCDAPSGTCASLAADIASCQAAGVKVLLSIGGGALGYNLSSPSDARDLAAYLWDNFLGGEGATGAPRPLGDAVLDGVDFDIESPSRFYDDLARNLASLYTRAPRPPRWGKTTYLLTAAPQCPYPDASLAAALATGLFDHVWVQFYNNPPCQYAAAPGDASALRSAWQQWTAGLPASTVFLGLPASLEAANSGFVDADTLASQVLPMVEGAANYGGIMLWSRSYDKDSSFSVKLQAALQNRNKPTGAGASSHNKRRILCSAALLSRPVAILQLKSSDLCIVSIGIPEFL

SEQ ID NO: 9427 - protein, 215 aa, Candida glabrata CBS 138
MIKSTVVYRDDGLPLCSSVDDDISDLSLNEQKKRIKMVVSRMTPQSANEATLESKDSEIHYIRQQGVIYFVICEAGYPRNLAFSYLNDVAVEFQHSYSNELSKPTIRPYAFASFDTFLQRTKKAYSDKKVQDNLDQLNQELVGVKQIMSKNIEDLLYRGDSLEKMDDMSNSLKISSKKYRKSAQKINFDLLISQYAPIVMVAFFFVFLFWWVFLR

SEQ ID NO: 9428 - protein, 164 aa, Microcystis aeruginosa PCC 7806
MTFERDNSQTTSRVIAANSRFANTYYAILGLHPSASVIEVRRAYRELSKRYHPDTTELSPEVATVQFQRLNEAYATLSNPDRRSLYDLQIGYSRWNVIQTIPDSDQPIANRSAYLDPTDRPLSSGEIFALFILALTLLGCLLLAVIIAMLRGENAVTVAQLFLI

SEQ ID NO: 9429 - protein, 166 aa, Linum usitatissimum
EDKTDWGVNVGWIYGSVTEDVVTGFRMHEKGWRSVYCMTKRDAFRGTAPINLTDRLHQVLRWATGSVEIFFSRNNALFAGSRLKFLQRVAYLNVGIYPFTSLFLLLYCFLPALSLFANKFIVNSLDVNFLTYLLIITVTITLLAVLEIKWSGIALEEWWSNEQFWV

SEQ ID NO: 9430 - protein, 1161 aa, Glycine max
  misc_feature (527)..(527): Xaa can be any naturally occurring amino acid
  misc_feature (539)..(539): Xaa can be any naturally occurring amino acid
  misc_feature (567)..(567): Xaa can be any naturally occurring amino acid
  misc_feature (576)..(576): Xaa can be any naturally occurring amino acid
MLQQAERRIPPFRRRKSTPHEQRLSHHSSNNNNNIDSMSKAIAQYTEDGVHAVFEQSGESGRSFNYSESIRIASESVPEQQITAYLVKIQRGGFIQPFGSMIAVDEPSFRILGYSDNARDMLGITPQSVPSLDDKNDAAFALGPQSVPSLDDKNDAAFALGTDVRALFTHSSALLLEKAFSAREISLMNPIWIHSRTSGKPFYGILHRIDVGIVIDLEPARTEDPALSIAGAVQSQEALVRAISQLQSLPSADVKLLCDTVVESVRELTGYDRVMVYKFHEDEHGEVVSESKRPDLEPYIGLHYPATDIPQASRFLFKQNRVRMIVDCHASAVRVVQDEALVQPLCLVGSTLGAPHGCHAQYMANMGSIASLVMAVIINGNDEEGVGGRSSMRLWGLVVCHHTSARCIPFPLRYACEFLMQAFGLQLNMELQLAAQSLEKRVLRTQTLLCDMLLRDSPTGIVTQSPSIMDLVKCDGAALYFQGNYYPLGVTPTEAQIRDIIEWLLAFHGDSTGLSTDSLGDAGYPGXLPRLGMQFVGWXVAYITEKDFLFWFRSHTAKEIKWGGAKXILRTRMMGXRMHPRSSFKAFLEVVKSRSLPWENAEMDAIHSLQLILRDSFKDAEHRNSKAVVDPHVSEQELQGVDELSSVAREMVRLIETATAPIFAVDVDGHVNGWNAKVSELTGLPVEEAMGKSLVHDLVFKESEETMNKLLSRALKGEEDKNVEIKMRTFGPEHQNKAVFLVVNACSSKDFTNNVVGVCFVGQDVTGQKIVMDKFINIQGDYKAIVHSPNPLIPPIFASDDNTCCLEWNTAMEKLDPSNENVTVGRVDVIGKMLVGEVFGSCCQLKGSDSITKFMIVLHNALGGQDTDKFPFSFLDRHGKYVQTFLTANKRVNMEGQIIGAFCFLQIMSPELQQALKAQRQQEKNSFGRMKELAYICQGVKNPLSGIRFTNSLLEATSLTNEQKQFLETSVACEKQMLKIIRDVDLESIEDGSLELEKGEFLLGNVINAVVSQVMLLLRERNLQLIRDIPEEIKTLAVYGDQLRIQQVLSDFLLNIVRYAPSPDGWVEIHVRPRIKQISDGLTLLHAEFRMVCPGEGLPPELIQDMFNNSRWGTQEGLGLSMSRKILKLMNGEVQYIREAERCYFYVLLELPVTRRSSKKC

SEQ ID NO: 9431 - protein, 166 aa, Linum usitatissimum
EDKTEWGDRVGWIYGSVTEDVVTGYRMHNRGWHSVYCVTKRDAFRGGAPINLTDRLHQVLRWATGSVEIFFSRNNAFLASRKLMFLQRLFYLNVGIYPFTSIFLIVYCFLPALSLFSGSFIVESVTITFLVYLLVMTFCLIGLAILEVKWSGIALEEWWSKEQFWV

SEQ ID NO: 9432 - protein, 428 aa, Brassica napus
MAQILAASPTCQMRLTKPSSIASSKLWNSVVLKQKKQSSSKVRSFKVMALQSDNSTINRVESLLNLDTKPFTDRIIAEYIWIGGSGIDLRSKSRTLEKPVEDPSELPKWNYDGSSTGQAPGEDSEVILYPQAIFRDPFRGGNNILVICDTYTPAGEPIPTNKRARAAEIFSNKKVNEEIPWFGIEQEYTLLQPNVNWPLGWPVGAYPGPQGPYYCGVGAEKSWGRDISDAHYKACLYAGINISGTNGEVMPGQWEFQVGPSVGIEAGDHVWCARYLLERITEQAGVVLTLDPKPIEGDWNGAGCHTNYSTKSMREDGGFEVIKKAILNLSLRHMEHISAYGEGNERRLTGKHETASIDQFSWGVANRGCSIRVGRDTEKKGKGYLEDRRPASNMDPYIVTSLLAETTLLWEPTLEAEALAAQKLSLKV

SEQ ID NO: 9433 - protein, 226 aa, Helianthus petiolaris
NIHGRGWRSAITSPDPLAFLGCSATTYPSSLIQQKRWFTGIFEILFTDKNPLLLTIEGNIWFRQALAYFYICLWAVRSVPELCYASLPAYCIIKDSHFLPKVNERAILIFMGIFVIYNLYAYWECKRIGVSLRMWWNLQRMGRVNTLTARLFAFVSVMLKLIGLSNTVFEVTQKEHMSNDDDNDNDNVSVGRFTYDNSPMIMPGVVILLINIMALVNGMLSLYKVD

SEQ ID NO: 9434 - protein, 432 aa, Solanum tuberosum
MAQILAPSAQWQMRMTKSSTDASPLTSKMWSSVVLKQNKRLAVKSSAKFRVFALQSDNGTVNRMEQLLNLDVTPYTDKIIAEYIWIGGTGIDVRSKSRTISKPVKDASELPKWNYDGSSTGQAPGEDSEVILYPQAIFKDPFRGGNNILVICDTYTPAGEPIPTNKRHKAAQIFSDPKVASQVPWFGIEQEYTLLQPNVNWPLGWPVGGYPGPQGPYYCGAGVEKSFGRDISDAHYKACLYAGINISGTNGEVMPGQWEFQVGPSVGIEGGDHIWCARYLLERITEQAGVVLSLDPKPIEGDWNGAGCHTNYSTLSIREEGGFEVIKKAILNLSLRHKGHISAYGEGNERRLTGKHETASIDQFSWGVANRGCSIRVGRYTEKEARGYLEDRRPASNMDPYVVTALLAETTILWEPTLEAEALAAQKISLKV

SEQ ID NO: 9435 - protein, 232 aa, Aristolochia moupinensis
IPQASRFLFMKNKVRMICDCYAKPVKVCQDERLSFDLTLCGSTLRASHSCHLQYMKNMGSVASLVLAVVVKEGEEDDNPDPNQEPQSKRKRLWGLVVCHNTTPRFVPFPLRYACEFLMQVFAIHVNNEVELENQIREKNILRTQTLLCDMLLRDSSLSIVTRSPNIMDLVKCDGAAFLCQNKVYTLGVTPTESQIREINQWLSEYHMDSTGLSTDSLHDAGYPKALSLGDIV

SEQ ID NO: 9436 - protein, 224 aa, Helianthus petiolaris
NIHGRGWRSAITSPDPLAFLGCSATTYPSSLTQQKRWFTGVFEILFTDKNPLLLTIEGNIWFRQALAYFYICLWAVRSVPELCYASLPAYCIIKDSHFLPKVNERASLIFMGIFVIYNLYAYWECKRIGVSLRMWWNLQRMERVNTLTARLFAFVSVMLKLIGLSNTVFEVTQKEHMSNGDDSDNVSVGRFTYDNSPMIMPGVVILLINIMALVNGMLRLYKVD

SEQ ID NO: 9437 - protein, 232 aa, Aristolochia westlandii
IPQASRFLFMKNKVRMICDCYAKPVKVYQDERLSFDLTLCGSTLRASHSCHLQYMKNMGSVASLVLAVVVKEGEEDDNPDPNQEPQSKRKRLWGLVVCHHTTPRFVPFPLRYACEFLMQVFAIHVNNEVELENQIREKNILRTQTLLCDMLLRDSSLSIVTRSPNIMDLVKCDGAAFLCHNKVYTLGVTPTESQIREINEWLSEYHMDSTGLSTDSLQDAGYPKAHSLGDIV

SEQ ID NO: 9438 - protein, 200 aa, Pinus sylvestris
MSSVLTDLLNLDLSDLTEKVIAEYIWIGGSGMDMRSKARSLSGPVSSVKELPKWNYDGSSTGQAQGHDSEVILYPQAIFRDPFRRGKHILVICDAYSPNGTAIPSNKRAAAAKIFNEKAVSDEETWYGLEQEYTLLQKDVKWPLGWPIGGYPGPQGPYYCGVGADKAWGRDIVDAHYKACLYSGINISGINGEVMPGQWE

SEQ ID NO: 9439 - protein, 344 aa, Zea mays
MCAVAFCSGEAEQIEWSKIQTPTDEVVVPYDTLTSPPEDLEETKKLLDKLVVLKLNGGLGTTMGCTGPKSVIEVRNGFTFLDLIVIQIESLNKKYGCNVPLLLMNSFNTHDDTQKIVEKYSNSNIEIHTFNQSQYPRIVTEDFLPLPSKGKSGKDGWYPPGHGDVFPSLNNSGKLDILLAQGKDTEILNHLINNQNEYCMEVTPKTLADVKGGTLISYEGRVQLLEIAQVPDEHFLPNRWVNLKAIKRLVEAEALKMEIIPNPKEVDGVKVLQLETAAGAAIRFFDKAIGINVPRSRFLPVKATSDLLLVQSDLYTLVDGFVIRNPSRANPANPSIELGPEFKK

SEQ ID NO: 9440 - protein, 44 aa, Mallotus lackeyi
LYAGINISGTNGEVMPGQWEFQVGPSVGIEAGDHIWCARYILER

SEQ ID NO: 9441 - protein, 224 aa, Helianthus petiolaris
NIHGRGWGSAITSPDPLAFLGCSATTYPSSLTQQKRWFTGVFEILFTHKNPLLLTIEGNIWFRQALAYFYICLWAVRSVPELCYASLPAYCIIKDSHFLPKVNERASLIFMGIFVIYNLYAYWECKRIGVSLRMWWNLQRMERVNTLTARLFAFVSVMLKLIGLSNTVFEVTQKEHMSNDDDNDNVSVGRFTYDNSPMIMPGVVILLINIMTLVNGMLRLYKVD

SEQ ID NO: 9442 - protein, 467 aa, Oryza sativa Indica Group
MAVAADVKLEGLRAATDKLDQISENEKSGFISLVSRYLSGEAEQIEWSKIQTPTDEVVVPYDTLSAAPEDLNETKKLLDKLVVLKLNGGLGTTMGCTGPKSVIEVRNGFTFLDLIVIQIESLNKKYGCNVPLLLMNSFNTHDDTQKSQYPRIVTEDFLPLPSKGKTGKDGWYPPGHGDVFPSLNNSGKLDTLLAQGKEYVFVANSDNLGAIVDIKFESLTITEILNHLIHNQNEYCMEVTPKTLADVKGGTLISYEGRVQLLEIAQVPDEHVNEFKSIEKFKIFNTNNLWVNLKAIKRLVEAEALKMEIIPNPKEVDGVKVLQLETAAGAAIRFFEKAIGINVPRSRFLPVKATSDLLLVQSDLYTLVDGFVIRNPARTNPSNPSIELGPEFKKVANFLARFKSIPSIVELDTLKVSGDVWFGSGVTLKGKVTITAKSGKLEIPDGAVLENKLGARSLLVILFRVYY

SEQ ID NO: 9443 - protein, 245 aa, Paxistima canbyi
ALSIAGAVQSQKLAVRAISQLQSLPGGDIKLLCDTVVESVRDLTGYDRVMVYKFHEDEHGEVVAESKRPDLEPYIGLHYPATDIPQASRFLFKQNRVRTIVDCHASPVRVIQDDGLMQPLCLVGSTLRAPHGCHAQYMENMGSIASLAMAVIINGNDEEVIGGRNATRLWGLVVCHHTSARCIPFPLRYACEFLMQAFGLQLNMELQLAAQLSEKHVWKTRTLLCDMLLRDSPPAIVTQSPSIMD

SEQ ID NO: 9444 - protein, 159 aa, Aeluropus littoralis
MAQESWKQESHAPEAPILCINNCGFFGSSMTNNMCSKCYRDFVKLMEMDAPVVDKKLITTASSSTVPFETAKQDDTVPDAAAMDDKQPAQEPPKPPSNRCSTCRKKVGLTGFQCRCGGTFCSLHRYTDSHECTFDYKKVAREQIAKQNPVVIAEKINKI

SEQ ID NO: 9445 - protein, 245 aa, Paxistima myrsinites
ALSIAGAVQSQKLAVRAISQLQSLPGGDIKLLCDTVVESVRDLTGYDRVMVYKFHEDEHGEVVAESKRPDLEPYIGLHYPATDIPQASRFLFKQNRVRTIVDCHASPVRVIQDDGLMQPLCLVGSTLRAPHGCHAQYMENMGSIASLAMAVIINGNDEEIIGGRNATRLWGLVVCHNTSARCIPFPLRYACEYLLQLFGLQLNMELQLAAPLSKKHVLKTQTILYDMLLHDSPTGIVTQSPSIMD

SEQ ID NO: 9446 - protein, 293 aa, Oryza sativa Indica Group
MAPRRLAALAPLAVLLLLSSCLAAAPATAQQSSSIGDTVVFWGRNKAEGSLREACDTGLYNTVIISFLSAFGRGSYKLDLSGHPVVPVGGDIKYCQSKGKTVLLAIGGQGGEYYLPSSQAAADLDDYLWNAFLGGGRSGVARPFGDAVVNGIDFFIDQGATEHYDELARLLHGHSNGGVMLTATARCVFPDQRQQAALATGLFSRIHVKLFNDGRCTWGRRESLEKWAAAYPDSRIYVSIVASPEADRDAYMSHKDLYFDVLQFINKLPNYGGIMVWNRYWDKKTGYINGDVF

SEQ ID NO: 9447 - protein, 572 aa, Mesembryanthemum crystallinum
SFDGNGNTDDEDDFYDDDDDDGRPDSVDDKVRKKEMRKGIDLATTLERIEKNFVITDPRLPDNPIIFASDSFLELTEFSRAEILARNRRFLQGPETDPATVAKIRDAIDNETDVTVQLINYTKTGKKFWNVFHLQPMRDQKGEVQYFIGVQLDGSEHVEPVQNSIPVASVMDSEKQVKETATNVDVAVRELPDANKKPEDLWANHSKVVQPKPHRKECSSWKAIEKIKESGEQIGLKHFRPVKPLGAGDTGSVHLVELCGTGEYFAMKAMDKNVMLNRNKVHRACAEREILDMLDHPFLPALYASFQTNTHICLITEYCPGGELFLLLDRQPTKVLKEDAVRFYAAEVIIALEYLHCQGIIYRDLKPENILLQSNGHVSLTDFDLSCLTSCKPQLLIPEIRDKKKQQKAQHQQTPIFMAEPMRASNSFVGTEEYIAPEIIAGAGIQGAVDWWALGILLYEMLYGFTPFRGKTRQKTFSNVLRKDLKFPATKQVSLDASQLIYQLLQKDPKDRLGACEGANEIKRHPFFRGANWALVRCMKPPVLDAPPLLGDPEKEANIVDPDMLDLQTNVF

SEQ ID NO: 9448 - protein, 888 aa, Escherichia coli O157:H7 EDL933
  misc_feature (581)..(581): Xaa can be any naturally occurring amino acid
MPVELFRAENASRECIMSILTRWLLIPPVNARLIGRYRDYRRHGASAFSATLGCFWMILAWIFIPLEHPRWQRIRAEHKNLYPHINASRPRPLDPVRYLIQTCWLLIGASRKETPKPRRRAFSGLQNIRGRYHQWMNELPERVSHKTQHLDEKKELGHLSAGARRLILGIIVTFSLILALICVTQPFNPLAQFIFLMLLWGGALIVRRMPGRFSALMLIVLSLTVSCRYIWWRYTSTLNWDDPVSLVCGLILLFAETYAWIVLVLGYFQVVWPLNRQPVPLPKDMSLWPSVDIFVPTYNEDLNVVKNTIYASLGIDWPKDKLNIWILDDGGREEFRQFAQNVGVKYIARTTHEHAKAGNINNALKYAKGEFVSIFDCDHVPTRSFLQMTVGWFLKEKQLAMMQTPHHFFSPDPFERNLGRFRKTPNEGTLFYGLVQDGNDMWDATFFCGSCAVIRRKPLDEIGGIAVETVTEDAHTSLRLHRRGYTSAYMRIPQAAGLATESLSAHIGQRIRWARGMVQIFRLDNPLTGKGLKFAQRLCYVNAMFHFLSGIPRLIFLTAPLAFLLLHAYIIYAPALMIALXVLPHMIHASLTNSKIQGKYRHSFWSEIYETVLAWYIAPPTLVALINPHKGKFNVTAKGGLVEEEYVDWVISRPYIFLVLLNLVGVAVGIWRYFYGPPTEMLTVVVSMVWVFYNLIVLGGAVAVSVESKQVRRSHRVEMTMPAAIAREDGHLFSCTVQDFSDGGLGIKINGQAQILEGQKVNLLLKRGQQEYVFPTQVARVMGNEVGLKLMPLTTQQHIDFVQCTFARADTWALWQDSYPEDKPLESLLDILKLGFRGYRHLAEFAPSSVKGIFRVLTSLVSWVVSFIPRRPERSETAQPSDQALAQQ

SEQ ID NO: 9449 - protein, 1097 aa, Candida albicans
MSTSQPSQQQNPEQVVNDIRQKIEKERKIIQGFNDVKRNTNNPEVIQKWKSKIIESQSMIDYYQETMNKLTRQMQRLNTNSSSRTASRSSVISEYKPSYSNFDLIKYECPSLGNKIQFMLQYLEFKLQVENKYSEANKKLSHLYLMDGDKSSSNAAEGGRAESDQRIQLLEKALKKYQKFSINDHEFDRDYEIMDSTKHSRKLLTGRLTVSITCIRDVDHIATALAKKRETVVVIKVDDLEKARTKPSKNDNWNEEMVIDVDKSHEIELAVMDKQNGIYVPVAVNWFSLFDLAEEIRKKKVAKDQGSSGWLPAANLPQTGGSGAGTGSSMTGGASYGATSPLPAHNDLRPSVSPSSDAKENKVSVSTWLSLEPGGQMLINLNFEKSITNGKQFRGPLGRHGAIRQKKEEVFEKHGHQFVQKQFYNIMSCALCGEFLRYTGYQCQDCKFLCHKKCYQKVVTKCISKSGSDYDAAQLNHRIPHRFEPITNHGTKWCCHCGYILPWGKKNVRKCTECGVMCHAQCTHLVPDFCGMSLQMANEILATIESTKVSPKKAQHQQSHAKPLPPKPPIESKPSMDSEETLHNEPSYKSLRPASVVHQDTNFVSKLPTTVQNKYQEPVELPPQQQNQVVPSTRRRGHGSTDLSFETGYGQQQHQHHRDVPQIVVEDHQHYNSNDNRDVEMEESKDEFDNFDYNNKYTENEILTDVQQDQVRSPFADQIQGVPETSHAKQQNQQVQQVQQQEELGHQRTHSSGKSGKSKRRKRKVGLDDFQFLAVLGKGNFGKVMLAESRHTSKLCAIKVLKKDFIVENDEAESVKSEKRVFLTANKEMHPFLLNLHCCFQTENRIYFVMEYISGGDLMWHIQKNRFTAKRAKFYACEVLLGLKYFHDNGIVYRDLKLDNILLTTKGHIKIGDYGLCKEDMWHKSTTSTFCGTPEFMAPEIVAGKAYDRSVDWWAFGVLLFQMLLCQSPFKGDDEDDIFNAIENDEVKYPINLSRQTVLVLQALLTKDPSQRLGSGPKDAEEIMEHPYFHDVNFDDVLNCRIPAPYIPEVQSEHDYSNFDKEFTSETPRLTPVETVLTSEMQEQFRGFSHISDNATI

SEQ ID NO: 9450 - protein, 192 aa, Glycine max
  misc_feature (56)..(56): Xaa can be any naturally occurring amino acid
MLLDKNDIQETHYEVLHVKEHANYEEIRASYRSVVLSLHPDKLLKTSKTSSSNQTXERFLKVQKAWEILCNSSSRSFYDNELRSSRKDVLAADIAEDLSLRKDVLAADVAEDLSLQDMMIEDDGEALELFYQCRCGDYFSARVRELKKMGYSLLRVGSGISVLNADTLPGSVILPCGSCSLKARLLINMDAN

SEQ ID NO: 9451 - protein, 361 aa, Peripterygia marginata
QKLAVRAISHLQSLPGGDIKLLCDTVVESVRDLTGYDRVMVYKFHEDEHGEVVAESKRPDLEPYIGLHYPATDIPQASRFLFKQNRVRMIVDCHASPVRVIQDDGLMQPLCLVGSTLRAPHGCHAQYMENMGSIASLAMAVIINGNDEEVIGGRNATRLWGLVVCHHTSARCIPFPLRYACEFLMQAFGLQLNMELQLAAQLSEKHVLKTQTLLCDMLLRDSPTGIVTQSPSIMDLVKCDGAALYYQGNYYPLGVTPTEPQIKDIVEWLLAFHGDSTGLSTDSLADAGYAGAALLGDAVCGMAVAYITNRDFLFWFRSHTAKEIKWGGAKHHPEDKDDGQRMHPRSSFKAFLEVVKSRSLP

SEQ ID NO: 9452 - protein, 366 aa, Dioscorea elephantipes
SGKPFYAIVHRVTGCLIFDFEPVKLSDIPTSTTASGALQSYKLAAKAIARPQSLPGGSMDTLCETLVEEVFQFTGYDRVMVYKFHEDDHGEVYQEITKPGMVPYLGLHYPATDIPQAARFLFIKNKVRMICDCRAKHVNIHQDETLLFDITFCGSTLRAAHNCHLQYMSNMNSIASLTMAVVVNEGEEEDDHLEPGQSSQQQQQQQQQQQQQQQKRKHLWGLVVCHNESPRFLPFPMRYACQFLMQVFSVHVTKELELENQIREKNILRTQTLLCDMLLRDTAPVGIITQSPNIMDLVKCDGAALLYDDRIWRLGLTPTKEQIRSIAHWLAEHHMAPTALSTDSLQDAGYPDAQALGDLVCGMAAA

SEQ ID NO: 9453 - protein, 477 aa, Physcomitrella patens subsp. patens; identical to SEQ ID NO: 5871

SEQ ID NO: 9454 - protein, 374 aa, Mortonia greggii
ALSIAGAVQSQKLAVRAISQLQSLPGGDIKLLCDAVVENVRNLTGYDRVMVYKFHEDEHGEVVAESKRPDLEPYIGLHYPATDIPQASRFLFKQNRVRMIVDCHSTPVSVIQDDGLMQPLCLVGSTLRAPHGCHAQYMANMGSIASLAMAVIINGNDEDGIGGRNTTRLWGLVVCHHTSARCIPFPLRYACEFLMQAFGLQLNMELQLASQLLEKHVLKTQTLLCDMLLRDSPTGIVTQSPSIMDLVKCDGAALYHQGKYYPLGVTPTEAQIKDIVEWLLAFHGESTGLSTDSLADAGYPGAALLGDAVCGMAVAYITDRDFLFWFRSNTAKEIKWGGAKHHPEDKDDGQRMHPRSSFKAFLEVVKSRSLPWEN

SEQ ID NO: 9455 - protein, 463 aa, Dioscorea elephantipes
SGKPFYAIMHRIDVGLVIDLEPVNPADVPVTAAAALKSYKLAAKAISRLQSLPSGNIPLLCDVLVKEVSELIGYDRVMAYKFHEDEHGEVIAECRRSDLEPYLGLHYPATDIPQASRFLFMKNKVRMICDCSAPPVKVIQDKRLPQPLSLGGSTLRAPHGCHAQYMANMGSIASLVMSVTINEDDDETGSGDQQQNGMKLWGLVGCHHTSPRFVPFPLRYACEFLLQVFGIQLNKEVELATQQREHILRTQLSCDMLLRDAPIGYLLNSPNVMDLVKCDGAALYYKNQFWLLEITPTEAQIRDIFAWLLEYHNSTTGLSTNSLTEAGYPGAVELGDAVCSMAATKITSKDFIFWFRSHTSKEIKWGGAKHDPGDRTDEGRKMHPRSSFKAFLEVVKRRSLPWEDVDMDAIHSLQLILRGSLQDEPVTDNSKTIVNATPDDAKQIQHMDELRIVTTEMVRLMET

SEQ ID NO: 9456 - protein, 466 aa, Hedyosmum sp. SM-2000
SGKPFYAIIHRVTASFIIDFEPVKPYEVPMTAAGALQSCKLAAKAISRLQSLPGGSMERLCETVVQEVFELTGYDRVMAYKFHEDDHGEVFSEITKPGLEPYLGLHYPATDIPQAARFLFMKNKVRMICDCHAKPVKVFQDEKLTFDLTLCGSTLRAPHSCHLQYMANMSSIASLVMAVVVNEGEDEGENVDSGQQQQQKRKRLWGLVVCHNTTPRFVPFPLRYACEFLIQVFAIHVNKEIELESQIREKNIFRTQTLLCDTLMRDAPLGIISQNPNILDLVKCDGAALLYKSKVWRLGLTPNEPQIHDISLWLSEYHMDSTGFSTDSLHEAGYQGAVALGNIVCGMAAVWITSKDMLFWFRSHTAAEVRWGGAKHDPDDTDDNRRMHPRSSFKAFLEVVKKRSIPWKDYEMDAIHSLQIILRGNFSDSEKTHANTTFDSRLNDLKLEGMEELQAVTNEMVRLIET

SEQ ID NO: 9457 - protein, 609 aa, Castilleja miniata
SGKPFYAIIHRVTGSMIIDFEPVKPHEVPMTAAGALQSYKLAAKAITRLQALPNGSMERLCDTMVQEVFELTGYDRVMIYKFHDDDHGEVLSEITKPGLDPYVGLHYPATDIPQAARFLFIKNKVRMICDCRANHVKVIQDDNLPFDLTLCGSNLRAPHSCHLQYMENMNSIASLVMSVVVNEGNEDGPNSSSHPDKKKQLWGLVVCHNTSPRFIPFPLRYACEFLAQVFAIHVNKEIELENQMLEKNILRTQTLLCDMLLRDAPLGIVSQSPNVMDLVKCDGAILIHKTKKYRLGMTPSDFQIRDIVSWLDEYHRDSTGLSTDSLYDAGFPGALALGDAVCGMAAVRITDTDWLFWFRSHTASTIRWGGAKHEPDDKDDGRKMHPRSSFKAFLDVVKTRSLSWKDFEMDAIHSLQLILRNSSSKEAEKGDVEGKEIHARLNDLQLDGKKELEAVTSEMVRLIETASVPIFAVDVDGHVNGWNTKIADLTGLPVDKAIGRHFLALVEDSSAEAVNKMLELALQGNEEQNVQFEIKTHGPRSESHPISLIVNACASRDVKENVVGVCFIAQDITTQKSMMDKFTRIEGDYRAIVQNPNQLIPPIFGTDEF

SEQ ID NO: 9458 - protein, 187 aa, Ginkgo biloba
DEHGEVVAEIRRSDLEPYLGLHYPATDISQASRFLFMQNRVRMICDCCATPVKVIQDEELRQPLCLVGSTLRAPHGCHAQYMANMGSIASLVMAVIINGTDEEGLSGRNSMKLWGLVVCHHTSPRAVPFPLRYACEFLMQAFGLRLNMELQLGAQLHEKHILRTQTLLCDMLLRDAPIGIVTQSPSI

SEQ ID NO: 9459 - protein, 164 aa, Glycine max
MDREGGSNGGSCYYSVLGIRRDASFSDIRTAYRKLAMRWHPDKWAQNPATAGEAKRRFQQIQEAYSAVLSDKSKRSMYDAGLYDPLEEEDQDFCDFMQEMISMMNNVKDEGDSLEDLQRMFVEMVGEDHGHGIGSDLNQDQTAGKRGRVNGSKGNAAKRRNSRS

SEQ ID NO: 9460 - protein, 397 aa, Hedyosmum sp. SM-2000
DLEPVNPAEVPVIAAGALKSYKLAAKAISKLRSLPSGNISLLCDVLVREVSELTGYDRVMAYKFHEDEHGEVIAECRRSDLEPYLGLHYPATDIPQASRFLFMKNKVRMICDCSAPPVKVIQDKRLGQPLSLCGSTLRAPHGCHAQYMTNMGSIASLVMSITINEDDEETDNEQQLQQEKPKKLWGLVVCHHTSPRFIPFPLRYACEFLIQVFGIQLNKEVELAAQVREKHTLKTQTVLCDMLLRDAPMGILTQSPNVMDLVKCDGAALNYKNQFWLLGTTPTEAQIKDLAEWLLECHDGTTGLSTDSLTEAGYPGSYVLGDAVRGMAAVKITSKDFLFWFRSHSAKEIKWGGAKHDPIDKDDDGRKMHPRSSFKAFLEVVRQRSVPWEDIEMDAIQ

SEQ ID NO: 9461 - protein, 465 aa, Heuchera canadensis
SGKPFYAIVHRVTGSLIIDFEPVKPYEVPMTAAGALQSYKLAAKAITRLQALPSGSVERLCDTMVQEVFELTGYDRVMAYKFHDDDHGEVVSEITKPGLEPYLGLHYPATDIPQAARFLFMKNKIRMICDCRAKHVKVLQDEKLPFDLTLCGSTLRAPHSCHLQYMENMNSIASLVMAVVVNDGDDESESSNPAQPSKRKRLWGLVVCHNTTPRFVPFPLRYACEFLAQVFAIHVSKELELENQILEKNILRTQTLLCDMLMRDAPLGIVSQSPNIMDLVKCDGAALLYKDKIWRLGVVPTDSQLQDIASWLSKYHMDSTGLSTDSLYDAGFSRALSLGDVVCGMAAVKINSNDILFWFRSHTAAEIRWGGAKHETGEKDDNRKMHPRSSFKAFLEVVKTRSLPWKDYEMDAIHSLQLILRNTFKDIETVDANTNKIHTKLSDLKIEGMQELEAVTSEMVRLIET

SEQ ID NO: 9462 - protein, 342 aa, Ustilago maydis 521
MPLSTQIARVSDGLPLAQSVDDGKTETDLSEHKQQAKLIFRRITPSSEQRCSIESGKYTLHYLISPPPAMPSSVVYLTIAEKSYPRKLAFSYLDELSKEFERSYGNQVEQRTLRPYAFVSFDTFMQRTKRLYEDSRTAQSAASSNLDRLNEDLQDVTRIMTKNMEDLLWRGDSLDQMSTMSSSLRDESLKYRKAARQINLDALFRKWAPVGAVTPCHTSLRILCDGLAVIRAVVSSQSTRHHLYYTFSPLSISPDVLSPPQALYSCSAIAALFETLSSFVTASSFSVHSRQVQWAMCCKTTSSYRPSRLHPFGSTSFFCTDLRSKSGTMRIAASQPTAQDRG

SEQ ID NO: 9463 - protein, 205 aa, Gossypium herbaceum
HTCGEHVGLNVNGEPFVACHECNFPICKSCFEYDLKEGRKACLRCGSPYDENLLDDVEKATGDQSTMAAHLSKSQDVGIHARHISSVSTLDSEMTEDNGNPIWKNRVESWKEKKNKKKKPATTKVEREAEIPPEQQMEDKPAPDASQPLSTIIPIPKSRLAPYRTVIIMRLIILGLFFHYRVTNPVDSAFGLWLTSVICEIWFAF

SEQ ID NO: 9464 - protein, 350 aa, Arabidopsis thaliana; identical to SEQ ID NO: 8723

SEQ ID NO: 9465 - protein, 1131 aa, Sorghum bicolor
MSSSRPAHSSSSSSRTRQSSQARILAQTTLDAELNAEYEESGDSFDYSKLVEAQRSTPSEQQGRSGKVIAYLQHIQRGKLIQPFGCLLALDEKSFRVIAFSENAPEMLTTVSHAVPNVDDPPKLGIGTNVRSLFTDPGATALQKALGFADVSLLNPILVQCKTSGKPFYAIVHRATGCLVVDFEPVKPTEFPATAAGALQSYKLAAKAISKIQSLPGGSMEALCNTVVKEVFELTGYDRVMAYKFHEDEHGEVFAEITKPGIEPYLGLHYPATDIPQAARFLFMKNKVRMICDCRAKSVKIIEDEALSIDISLCGSTLRAPHSCHLQYMENMNSIASLVMAVVVNENEEDDEPGPEQPPQQQKKKRLWGLIVCHHESPRYVPFPLRYACEFLAQVFAVHVNKEFELEKQIREKSILRMQTMLSDMLFKEASPLSIVSGSPNIMDLVKCDGAALLYGDKVWRLQTAPTESQIRDIAFWLSEVHGDSTGLSTDSLQDAGYPGAASLGDMICGMAVAKITSKDILFWFRSHTAAEIKWGGAKHDPSDKDDNRRMHPRLSFKAFLEVVKMKSLPWSDYEMDAIHSLQLILRGTLNDALKPVQASGLDNQIGDLKLDGLAELQAVTSEMVRLMETATVPILAVDGNGLVNGWNQKVAELSGLRVDEAIGRHILTLVEDSSVSIVQRMLYLALQGKEEKEVRFELKTHGSKRDDGPVILVVNACASRDLHDHVVGVCFVAQDMTVHKLVMDKFTRVEGDYKAIIHNPNPLIPPIFGADQFGWCSEWNVAMTKLTGWHRDEVIDKMLLGEVFDSSNASCLLKSKDDFVRLCIIINSALAGEEAENAPFGLFDRNGKYIECLLSVNRKVNADGVVTGVFCFIHVPSDDLQHALHVQQASEQTAQRRLKAFSYMRHAINKPLSGMLYSRETLKSTGLNEEQMRQVHVADSCHRQLNKILADLDQDNITDKSSCLDLDMAEFVLEDVVVSAVSQVLIGCQGKGIRVACNLPERFMKQKVYGDGIRLQQILSDFLFVSVKFSPVGGSVDISSKLTKNSIGENLHLIDFELRIKHQGAGVPAEILSQMYEEDNKEPSEEGLSLLVSRNLLRLMNGNIRHIREAGMSTFILTAELAAAPSAVGQ

SEQ ID NO: 9466 - protein, 224 aa, Bahiopsis lanata
SIHGRGWRSAITSPDPLAFLGCAPTTFPSSLTQQKRWVTGLFEILFTDKNPLRLATKGNLWFRQALGYFSFCLWAVRSVLELCYASLPAYCIITGSHFLPKINERAFLIFMSIFVIYNVYVYWECKRVGVSLRMWWNLQRMERVNVMTAWLFGFLSVMLKFIGLSETVFEVTQKEHLLNDGDNDDKNAGRFTYDKSPIIVPGVVVLLVNMIALVNGVLRLLKVD

SEQ ID NO: 9467 - protein, 205 aa, Gossypium raimondii
HTCGEHVGLNVNGEPFVACHECNFPICKSCFEYDLKEGRKACLRCGSPYDENLLDDVEKATGDQSTMAAHLNKSQDVGIHARHISSVSTLDSEMAEDNGNSIWKNRVESWKEKKNKKKKPATTKVEREAEIPPEQQMEDKPAPDASQPLSTIIPIPKSRLAPYRTVIIMRLIILGLFFHYRVTNPVDSAFGLWLTSVICEIWFAF

SEQ ID NO: 9468 - protein, 167 aa, Helianthus annuus
EFQVGPSVGISAGDELWVARYILERITEIAGVVVSFDPKPIPGDWNGAGAHTNYSTKSMRDEGGYEVIKKAIEKMGLKHKEHIAAYGEGNERRLTGRHETADINTSLWGVANRGASIRVGRDTEKEGKGYFEDRRPASNMDPYVVTSMIAETTIFVEQILKIIRFGP

SEQ ID NO: 9469 - protein, 224 aa, Bahiopsis lanata
SIHGRGWRSAITSPDPLAFLGCAPTTFPSSLTQQKRWVTGLFEILFTDKNPLRLATKGNLWFRQALGYFSFCLWAVRSVLELCYASLPAYCIITGSHFLPKINERAFLIFMGIFVIYNVYVYWECKRVGVSLRMWWNLQRMGRVNVMTAWLFGFLSVMLKFIGLSETVFEVTQKEHLLNDGDNDDKNAGRFTYDKSPIIVPGVVVLLVDMVALVNGVLRLLKVD

SEQ ID NO: 9470 - protein, 1164 aa, Arabidopsis thaliana; identical to SEQ ID NO: 8224

SEQ ID NO: 9471 - protein, 1178 aa, Sorghum bicolor
MASGSRATPTRSPSSARPEAPRHAHHHHHHHSQSSGGSTSRAGGGGGGGGGGGGTAATATATATESVSKAVAQYTLDARLHAVFEQSGASGRSFDYSQSLRAPPTPSSEQQIAAYLSRIQRGGHIQPFGCTLAVADDSSFRLLAFSENAADLLDLSPHHSVPSLDSAAPPPVSLGADARLLFSPSSAVLLERAFAAREISLLNPLWIHSRVSSKPFYAILHRIDVGVVIDLEPARTEDPALSIAGAVQSQKLAVRAISRLQALPGGDIKLLCDTVVEHVRELTGYDRVMVYRFHEDEHGEVVAESRRDNLEPYLGLHYPATDIPQASRFLFRQNRVRMIADCHATPVRVIQDPGMSQPLCLVGSTLRAPHGCHAQYMANMGSIASLVMAVIISSGGDDEQTGRGGISSAMKLWGLVVCHHTSPRCIPFPLRYACEFLMQAFGLQLNMELQLAHQLSEKHILRTQTLLCDMLLRDSPTGIVTQSPSIMDLVKCDGAALYYHGKYYPLGVTPTESQIKDIIEWLTVCHGDSTGLSTDSLADAGYLGAAALGDAVCGMAVAYITPSDYLFWFRSHTAKEIKWGGAKHHPEDKDDGQRMHPRSSFKAFLEVVKSRSLPWENAEMDAIHSLQLILRDSFRDAAEGTSNSKAIVNGQVQLGELELRGINELSSVAREMVRLIETATVPIFAVDTDGCINGWNAKIAELTGLSVEEAMGKSLVNDLIFKESEEIVEKLLSRALRGEEDKNVEIKLKTFGSEQSNGAIFVIVNACSSRDYTQNIVGVCFVGQDVTGQKVVMDKFINIQGDYKAIVHNPNPLIPPIFASDENTSCSEWNTAMEKLTGWSRGEVVGKFLIGEVFGSFCRLKGPDALTKFMVVIHNAIGGQDYEKFPFSFFDKNGKYVQALLTANTRSKMDGKSIGAFCFLQIASAEIQQAFEIQRQQEKKCYARMKELAYICQEIKNPLSGIRFTNSLLQMTDLNDDQRQFLETCSACEEQMSKIVKDATLQSIEDGSLVLEKSEFSFGDVMNAVVSQAMLLLRERDLQLIRDIPDEIKDASAYGDQFRIQQVLADFLLSMVRSAPSENGWVEIQVRPNVKQNSDGTDTELFIFRFTYPGEGLPADIVQDMFSNSQWSTQEGVGLSTCRKILKLMGGEVQYIRESERSFFLIVLELPQPRPAADREIS

SEQ ID NO: 9472 - protein, 166 aa, Helianthus annuus
EFQIGPSVGISAADEFWVARYILERVTEIAGVVVSFDPKPVPGDWNGAGGHTNYSTKSMREDGGYETIQKAIEKLGLRHEDHIAGYGEGNERRLTGHHETADINTSSWGVAKRGVSIRVGRDTAEEGKGYFEDRRPGSNMDPYVVTSMIAETTIIVEAFRLFCGSE

SEQ ID NO: 9473 - protein, 224 aa, Bahiopsis reticulata
SIHGRGWRSAITSPDPLAFLGCAPTTFPSSLTQQKRWVTGLFEILFTDKNPLLLATKGNLWFRQALGYFSFCLWAVRSVLELCYASLPAYCIITGSHFLPKINERAFLIFMGVFVIYNLYVYWECKRVGVSLRMWWNLQRMGRVNVMTAWLFGCFSVMLKFIGLSDTVFEVTQKEHMLNDGDNDDKNVGRFTYDKSPMIVPGVVVLLVNMFALVNGVLRLLKVD

SEQ ID NO: 9474 - protein, 170 aa, Populus trichocarpa
MESHDETGCQAPEGPILCINNCGFFGSAATMNMCSKCHKDIILNQQQAQLAASSIESIVNGNSSGNGKEPVVAGAVDVQAAPVEVKIISTEPSIASSKPSEMKAKEGPSRCTACRKRVGLTGFGCRCGNLFCAIHRYSDKHDCPFDYRTAARDAIAKANPVVKAEKLDKI

SEQ ID NO: 9475 - protein, 297 aa, Oryza sativa Japonica Group; identical to SEQ ID NO: 8888

SEQ ID NO: 9476 - protein, 322 aa, Oryza sativa
MAGMDPTGGGGGGGVAAHYLHMLRAQQHQPLSPAGDVKAERSMLSPDESPGADADLGSDHPTSSAMVAAEDSGGGSGSGGPMRRPRGRPLGSKNKPKPPIIVTRDSPNAFHSHVLEVAAGTDIVECVCEFARRRGRGVSVLSGGGAVANVALRQPGASPPGSLVATMRGQFEILSLTGTVLPPPAPPSASGLTVFLSGGQGQVVGGSVAGQLIAAGPVFLMAASFANAVYERLPLDGEDPEAEAAAATPPGDAAQPTGPPPPQQQPTASQSSEVTAGDGGGGGGLGMYLGGHVGSYQQQQQQLPGPGDNFGSWSGSIRPPPF

SEQ ID NO: 9477 - protein, 156 aa, Helianthus annuus
EFQVGPSVGILAGDEIWAARYILERITEIAGVVVSFDPKPIPGDWNGAGAHTNYSTKSMREEGGYEIIKKAIEKLGLRHKEHIAAYGEGNERRLTGKHETANINTFKWGVANRGASIRVGRDTEKDGKGYFEDRRPASNMDPYVVTSMIAETTILL

SEQ ID NO: 9478 - protein, 374 aa, Mortonia greggii
ALSIAGAVQSQKLAVRAISQLQSLPGGDIKLLCDAVVENVRNLTGYDRVMVYKFHEDGHGEAVAESKRPDLEPYIGLHYPATDIPQASRFLFKQNRVRMIVDCHSTPVSVIQDDGLMQPLCLVGSTLRAPHGCHAQYMANMGSIASLAMAVIINGNDEDGIGGRNTTRLWGLVVCHHTSARSIPFPLRYACEFLMQAFGLPLNMELQLASQLLEKHVLKTQTLLCDMLLRDSPTGIVTQSPSIMDLVKCDGAALYHQGKYYPLGVTPTEAQIKDIVEWLLAFHGESTGLSTDSLADAGYPGAALLGDAVCGMAVAYITDRDFLFWFRSNTAKEIKWGGAKHHPEDKDDGQRMHPRSSFKAFLEVVKSRSLPWEN

SEQ ID NO: 9479 - protein, 1123 aa, Solanum tuberosum
MSSSRPSQSSATSSRSKHSARIIAQTSIDAKLHADFEESGDSFDYSSSVRVTSVAGDEERPKSDKVTTAYLHQIQKGKFIQPFGSLLALDEKTLKVIAFSENAPEMLTMVSHAVPSVGEHPVLGIGTDIRTIFTGPSGAALQKALGFGEVSLLNPVLVHCKNSGKPFYAIVHRVTGSLIIDFEPVKPYEVPMTAAGALQSYKLAAKAITRLQSLPSGSMERLCDTMVQEVFELTGYDRVMGYKFHDDDHGEVVSEITKPGLEPYLGLHYPATDIPQAARFLFMKNKVRMICDCRAKHVKVVQDEKLPFDLTLCGSTLRAPHYCHLQYMENMNSVASLVMAVVVNDGDEEGESSDSSQSQKRKRLWGLVVCHNTTPRFVPFPLRYACEFLAQVFAIHVNKELELENQFLEKNILRTQTLLCDMLMRDAPLGIVSQSPNIMDLVKCDGAALLYKNKIHRLGMNPSDFQLHDIVSWLCEYHTDSTGLSTDSLYDAGFPGALALGDAVCGMAAVRISDKDWLFWYRSHTAAEVRWGGAKHEPGEKDDGRKMHPRSSFKAFLEVVKTRSIPWKDYEMDAIHSLQLILRNAFKDADAVNSNTNSIHTKLNDLRIDGMQELEAVTAEMIRLIETASVPIFAVDVDGQVNGWNTKVAELTGLPVDEAIGKHLLTLVEDSSVDTVNKMLELALQGKEERNVEFEIKAHGPSRDSSPISLIVNACASKDVRDSVVGVCFIAQDITGQKSIMDKFTRIEGDYRAIIQNPHPLIPPIFGTDQFGWCSEWNSAMTKLTGWRRDDVMDKMLLGEVFGTQAACCRLKNQEAFVNFGVILNNAITGQESEKIPFGFFGRYGKYVECLLCVSKRLDKEGAVTGLFCFLQLASHELQQALHVQRLSEQTALKRLKVLAYIRRQIKNPLSGIIFSWKMLEGTSLGEEQKNILHTSAQCQRQLNKILDDTDLDSIIEGYLDLEMLEFKLHEVLVASISQVMMKSNGKNIMISNDMVEDLLNETLYGDSPRLQQVLANFLLVSVNSTPSGGQLSISGRLTKDRIGESVQLALLEFRIRHTGGGVPEELLSQMLGSEVDASEEGIFLLVSRKLVKLMNGEVQYLREAGRSTFIISVELAVATKSC

SEQ ID NO: 9480 - protein, 374 aa, Plagiopteron suaveolens
ALSIAGAVQSQKLAVRAISQLQSLPGGDIKLLCDTVVQSVRDLTGYDRVMVYKFHEDEHGEVIAESKRPDLEPYIGLHYPATDIPQASRFLFKQNRVRIIVDCHASPVSVIQDDGLMQPLCLVGSTLRAPHGCHAQYMDNMGSIASLAMAVIINGNDEDGTGGRNPTRLWGLVVCHHTSARCIPFPLRYACEFLMQAFGLQLNMELQLAAQLLEKHVLKTQTLLCDMLLRESPTGIVTQSPSIMDLVKCDGAALYYQANYYPLGVTPTEAQIKDIVEWLLAFHGDSTGLSTDSLADAGYPGATLLGDAVCGMTVAYITNRDFLFWFRSHTAKEIKWGGAKHHPEDKDDGQRMHPRSSFKAFLEVVKSRSLPWEN

SEQ ID NO: 9481 - protein, 374 aa, Plagiopteron suaveolens
ALSIAGAVQSQKLAVRAISQLQSLPGGDIKLLCDTVVQSVRDLTGYDRVMVYKFHEDEHGEVIAESKRPDLEPYIGLHYPATDIPQASRFLFKQNRVRIIVDCHASPVSVIQDDGLMQPLCLVGSTLRAPHGCHAQYMDNMGSIASLAMAVIINGNDEDGTGGRNPTRLWGLVGWHHPSARCIPFPLRYACEFLMQAFGLQLNMELQLAAQLLEKHVLKTQTLLCDMLLRESPTGIVTQSPSIMDLVKCDGAALYYQANYYPLGVTPTEAQIKDIVEWLLAFHGDSTGLSTDSLADAGYPGATLLGDAVCGMAVAYITNRDFLFWFRSHTAKEIKWGGAKHHPEDKDDGQRMHPRSSFKAFLEEVKSRSLPWEN

SEQ ID NO: 9482 - protein, 337 aa, Yarrowia lipolytica CLIB122
MDQDDTKAIINKTISRLKKQFHEDISSASIFETHASKGIPLTTLCGNSVNRFSIYLRLLQIIKSCLDKDKITTKRDIYYDAVNLFKTQGVVDSCIARITNDFLQVPRDSLNVVAAQKGLIYSACDSALTISYKDDYRAPVTIPTHTTTLIPYTTNISDIQLAPQVNCILIVEKEAVFTTLCAYIPKDTLLITGKGYPDHMTQDFVRLFDEMLPLFICVDADPHGIHIAATYRYRSFVRAPSLQGLGSSISYIGVSLVDFKRGHLPLEDKNRKHAGRLLSAITGRQAEALELGDYIEMNKWKLELQRMLFLGKVAEMNVAGDGSEGRNLARYIFDRIH

SEQ ID NO: 9483 - protein, 365 aa, Pleurostylia opposita
VQSQKLAVRAISQLQSLPGGDIKLLCDTVVESVRDLTGYDRVMVYKFHEDEHGEVVAESKRPDLEPYIGLHYPATDIPQASRFLFKQNRVRIIVDCHASPVRVLQDDGLMQPLCLVGSTLRAPHGCHAQYMENMGSIASLAMAVIINGNDEEAIDGKNPTRLWGLVVCHHTSARCIPFPLRYACEFLMQAFGLQLNMELQLAAQVLEKHVLKTQTLLCDMLLRDSPIGIVTQSPSIMDLVKCDGAALYYRGNYYPLGVTPTEAQIKDIEEWLLAFHGDSSGLSTDSLADAGYPGAALLGDAVCGMAVAYITNRDFLFWFRSHTAKEIKWGGAKHHPEDKDDGQRMHPRSSFKAFLEVVKSRSLPW

SEQ ID NO: 9484 - protein, 435 aa, Heuchera canadensis
SGKPFYAIIHRIDVGLVIDLEPVNPADVPITAAGALKSYKLAAKAISRLQSLPNGNITLLCDVLVKEVSDLTGYDRVMVYKFHEDEHGEVIAESCRPDLEPYLGLHYPATDIPQASRFLFMKNKVRMICDCLASSVKVIQDKRLPQPLSLCGSTLRSPHGCHTQYMANMGTIASLVMSVTINEEDDEMVTDQPKGRKLWGLVVCHHTSPRFVPFPLRYACEFLIQVFGVCINKEVELASQTREKHILQTQTVLCDMLLRNAPVGIVTQSPNVMDLVKCDGAALYYKKKAWLLGSTPTDAQIRDITDWLLEYHGGSTGLSTDSLVEAGYPDALNLGDAVCGMAAIKITSNDFLFWFRSHTAREIKWGGAKHDPDEKDDGRKMHPRSSFKAFLEVVKRRSLPWEDVEMDVIHSLQLILRGSLQDETVDDSKTIVNES

SEQ ID NO: 9485 - protein, 495 aa, Gracilaria gracilis
MNRDSRSLQDFKGVMDKSAASTVAEKLTVMNQMAANELEKMTDSETTGFVELYGRYMSERSKKAEIKWDLIEQPSENMLQKYDTLPKPATDEELASLLSKLAVLKLNGGLGTSMGCKGPKSVIEVRDDTTFLDLIVQQIGQLNKNHPTANVPLLLMNSFNTDSETAKIIRKYQDTSVTLTTFQQSRYPRIVKESLEPMPLTHDHYAHEDWYPPGHGDFFQSIYNSGLVDTLLAQGKEYIFVSNVDNLGATVDLNILKNVVDREVEYCMELTDKTRADIKGGTIISYDGKVSLLEVAQVPAKYVEEFKSISKFKVFNTNNIWVSLRAIKRVMQSGEMKLDIIVNNKEVKGTKVIQLESAIGAAIGYFNNACGVNVPRSRFLPVKSTSDLMLIQSNMYNLKSGSLVMNPARQFTTTPVIKLGKEFKKVAQYLERLGSIPDILELDHLTVSGDVYFGANTTLKGTVIVVANPGNTIMIPEGSVLENKVVLGSLHVIPH

SEQ ID NO: 9486 - protein, 374 aa, Pristimera andina
ALSIAGAVQSQKLAVRAISQLQSLPGGDIKLLCDTAVESVRDLTGYDRVMVYKFHEDEHGEVVAESKRPDLEPYIGLHYPATDIPQASRFLFKQNRVRIIVDCHASPVNVIQDGGLMQPLCLVGSTLRAPHGCHAQYMENMGSIASLAMAVVINGNDEDGIGGRNPTRLWGLVVCHHTSARCIPFPLRYACEFLMQAFGLQLNMELQLAAQLLEKHVLKTQTLLCDMLLRESPTGIVTQSPSIMDLVKCDGAALYYQANYYPLGVTPTEAQIKDIVEWLLVFHGDSTGLSTDSLADAGYPGATLLGDAVCGMAVAYITNRDFLFWFRSHTAKEIKWGGAKHHPEDKDDGLRMHPRSSFKAFLEVVKSRSLPWEN

SEQ ID NO: 9487 - protein, 585 aa, Castilleja sulphurea
PYEVPMTAAGALQSYKLAAKAITRLQALPSGSMEQLCDTMVQEVFELTGYDRVMIYKFHDDDHGEVLSEVTKPGLDPYVGLHYPATDIPQAARFLFLKNKVRMICDCRANHVKVIQDDNLPFDLTLCGSILRAPHSCHLQYMENMNSIASLVMSVVVNEGNEDGPDSSSHPDKKKRLWGLVVCHNTSPRFVPFPLRYACEFLAQVFAIHVNKEIELENQMLEKNIIRTQTLLCDMLLRDAPLGIVSQSPNVMDFVKGDGAILLYRTKNYRLRKTPSDYQIRDIVSWLDEYHHESTGLSTDSLYDAGFPGALALGDAVCGMAAVRITNTDWLFWFRSHTAAEIRWGGGKHEPGEKDDGRKMHPRLSFKAFLEVVKTRSLPWKDFEMDAIHSLQLILRNASNKEVEEMDVDGKEIHARLNDLQLDGIKELEAVTSEMVRLIETASVPIFAVDMDGLVNGWNTKIADLTGLPVDKAIGRHFLGLVEYSSAEVVNKMLELALQGNEEQNVQFEIKTYGPRSESAPISLIMNACASWDVKENVVGVCFIAQDITIQKSMMDKFTRIEGDYRAIVQNPNQLIPPIFGTDGF

SEQ ID NO: 9488 - protein, 578 aa, Houttuynia cordata
  misc_feature (481)..(481): Xaa can be any naturally occurring amino acid
  misc_feature (504)..(504): Xaa can be any naturally occurring amino acid
  misc_feature (574)..(574): Xaa can be any naturally occurring amino acid
SGKPFYAIVHRVTGSLIIDFEPVKPFEVPMTAAGALQSYKLAAKAISRLQSLPSGSMERLIDTMVQEVFELTGYDRVMAYKFHEDDHGEVISEVTIPHLDPYLGLHYPATDIPQAARFLFMKNKVRMICDCRAKPVKVYQDDKLSFDLTLCGSTLRAPHSCHLQYMENMGSIASLVMAVVVNEGGEEDRGGPADSSQQQLGRYRRKKLWGLVVCHNTRPRFVPFPLRYACEFLTQVFAIHVSKELELEETNSRKEILRTQTLLCDMLLRDAPMGIVNQTPNIMDLIKCDGAALFYKDKVFRLGIAPSETDIREIAQWLSAYHMDSTGLSTDSLHDAGYPKAAFLGDLVCGMAAVKITCSDMLFWFRTHTAAEIRWGGAKHDHSDRDDGKRMHPRSSFRAFLDVVKTRSLPWKDYEMDGIHSLQLILRTSVKEPEQVDSNKVIHAQLGDLKLDEMNELHAVTTEVVRLIETATVPILAVDVXGLINGWNAKISELTGMSLEQVMXKHLLTLVEDCSINVVRRMLCLALKGEEEQNIEFQVKTHGTRSDHGPVVLVVNACASRDVHGNVVGVCFVXQDVT

SEQ ID NO: 9489 - protein, 333 aa, Trichodesmium erythraeum IMS101
MQNFRNYYQILDISKDASVDEIKKAYRKLARQFHPDVNPGSKEAEEKFKDINEAYDILSDVEKRLEYDKFIRYWKPKGIASRMGMRVPDFRNWGDNLSGNGVKSDKNVDVSDFSDFNTFVDQLLGRRREVKTPATATKPKTQSSSVYRPGQKKAVYKATEQELRKDIEARLTLPLEKAYVGGVEKIRLEDGRSIEVNMPRAMVSGQKVRLKNQGIGGGDLYLKITIAPHGFYQLQGAEIFCELPITPVEAVLGGDIEVPTLDGWVRMKLPAGVVSGQRLRLASKGYPDGMGDRGDQLVEIKIVTPKKLSEEELEIYQKLREVERLKPRKDLPV

SEQ ID NO: 9490 - protein, 268 aa, Sorghum bicolor
MASPSSTSNNSALPPVAASGATTPGAGAPCAACKFLRRKCLPGCVFAPYFPPEEPQKFANVHKVFGASNVTKLLNELLPHQREDAVSSLAYEAEARVKDPVYGCVGAISVLQRQVHRLQKELDAAHAELLRYACGDVAAGIPTALPVSVSVSAAPRLSTAMTTSPGQFAAAAATAHATAGMYGSSRRLGVLDGVVAAPPPPPPAGGCYFMRNHSNVISSPPGADVAPVLPYASMANWAVNAISASTTTTSGSESIGGLDHKEGGDSSM

SEQ ID NO: 9491 - protein, 338 aa, Verrucomicrobium spinosum DSM 4136
MAKYKLEYIWLDGYTPVPNLRGKTQIKEYASFPKLEELPNWGFDGSSTQQAEGKSSDCVLKPVAVYPDTTRKNGVLVMCEVMLPDGVTPHPTNHRATILDDAGTWFGFEQEYFLYQDGRPLGFPEDGYPAPQGPYYTGVGYKNVGDVARQIVEEHLDLCLDAGINHEGINAEVAKGQWEFQVFGKGSKKAADDVWVARYLLNRLCEKYCVDVEYHCKPIKGDWNGSGMHSNFSTEYMRSVGGKDYFEALMAAFQKHMDEHIAVYGPDNHLRLTGLHETQSIDKFTYGLADRGASIRIPHSFINSGYKGYLEDRRPNSQGDPYQIASRILKTIASVPTP

SEQ ID NO: 9492 - protein, 457 aa, Castilleja sulphurea
SGKPFYAIIHRVTGSMIIDFEPVKPHEVPMTAAGALQSYKLAAKAITRLQALPNGSMERLCDTMVQEVFELTGYDRVMIYKFHDDDHGEVLSEITKPGLDPYVGLHYPATDIPQAARFLFIKNKVRMICDCRANHVKVIQDDNLPFDLTLCGSNLRAPHSCHLQYMENMNSIASLVMSVVVNEGNEDGPNSSSHPDKKKQLWGLVVCHNTSPRFVPFPLRYACEFLAQVFAIHVNKEIELENQMLEKNILRTQTLLCDMLLRDAPLGIVSQSPNVMDLVKCDGAVLIHKTKKYRLGMTPSDFQIRDVVSWLDEYHRDSTGLSTDSLYDAGFPGALALGDAVCGMAAVRITDTDWLFWFRSHTASEIRWGGAKHEPDDKDDGRKMHPRSSFKAFLDVVRTRSLPWKDFEMDAIHSLQLILRNSSNKEAEKRDVEGKEIHARLNDLQLDGKKELEAVTS

SEQ ID NO: 9493 - protein, 415 aa, Hypecoum imberbe
SGKPFYAIVHRVTGSLIVDFEPVKPYEVPMTAAGALQSYKLAAKAIAKLQSLPSGSMERLCNTVVQEVFELTGYDRVMAYYFHEDDHGEVIAEVTKPGLEPYLGLHYPATYIPQAARFLFMKNRIRMICDCRAKHVKVLQDEKLPADLTLCGSTLRAPHTCHLQYMENMGSIASLVMAVVVNESNDEEESSEPPSQAPKKKKLWGLVVCHNTSPRFVPFPLRYACEFLIQVFAVHVNKEFELDNQIHEKRILRTQTLLCDMLMRDAPFGIISQSPNVMDLVKCDGAALLYKNKIYRLGLTPSEFQINDIASWLTEYHMDSTGLSTDSLYDAGFPGALSLGDAVCGMAAVRITCKDMLFWFRSHTAAEVRWGGAKHDPDERDDGRKMHPRSSFKAFLEVVKTRSLPWKDYEMDAIH

SEQ ID NO: 9494 - protein, 411 aa, Candida albicans
  misc_feature (207)..(207): Xaa can be any naturally occurring amino acid
MDNHQQQQQLQQYQQQFQQPQQQLYPGEQIVHPAAAQTGQNTTNVTAVSSSNITQSATSSLHSQQLQHVDVSKSAAEEAIRRSLLPERSTVSKGKYSLTDFSIMRTLGTGSFGRVHLVRSVHNGRYYAIKVLKKHQVVKMKQVEHTNDERRMLKLVEHPFLIRMWGTFQDSKNLFMVMDYIEGGELFSLLRKSQRFPNPVAKFYAAXVTLALEYLHSHDIIYRDLKPENILLDRNGHIKITDFGFAKEVSTVTWTLCGTPDYIAPEVITTKPYNKSVDWWSLGVLIFEMLAGYTPFYDSTPMKTYEKILAGKIHYPSFFQPDVIDLLTKLITADLTRRLGNLINGPADIRNHPWFSEVVWEKLLAKDIETPYEPPITAGVGDSSLFDHYPEEQLDYGSQGEDPYASYFLDF

SEQ ID NO: 9495 - protein, 736 aa, Pinus sylvestris
VPSMEKPQQDVLTIGTDVRTLFTAASAHSLEKAAVAQEISLMNPIWVHCKNSRKPFYAIVHRIDVGMVIDLEPLRTGDAFMSAAGAVQSQKLAVRAISRLQSLPCGDVGLLCDTVVENVRELTGYDRVMVYKFHEDEHGEVVAEIRRSDLEPYLGLHYPATDIPQASRFLFMQNRVRMICDCMATPVKVIQSEELMQPLCLVGSTLRAPHGCHAQYMANMGSIASLVMAVIINGNDDEGGGSGRNSMKLWGLVVCHHTSPRAVPFPLRYACEFLMQALGLQLNMELQLAAQLTEKHILRTQTLLCDMLLRDAPMGIVTQSPSIKDLVKCDGAALYYGGMCWMLGVTPTEAQIKDIADWLLEHHGDSTGLSTDSLADAGYPGAASLGDAVCGMASARITSKDFLFWFRSHTAKEMKWGGAKHHPDDKDDARRMHPRSSFKAFLEVVKRRSLPWDNVEIDAIHSLQLILRGSFRDIDDSGTKTMVHSRLNDLRLQGIDELSSVASEMVRLIETATAPILAVDYNGLVNGWNAKVAELTGLPVAEAMGMSLVQDLVFEQSVERVEKMLHNALRGEEEKNVEMMLKTFGPQKEKEAVILVVNACSSRDFTDNIVGVCFVGQDVTSQKVVMDKFIRIQGDYRSIVQSPNPLIPPIFASDEYACCSEWNAAMEKVTGWTHDEVIGKMLVGEIFGGCCRLKGQDAVTKFTIVLHSAIDGQEIEKFPFAFFDKQGKYVEALLTA

SEQ ID NO: 9496 - protein, 531 aa, Oryza sativa Indica Group; identical to SEQ ID NO: 5907

SEQ ID NO: 9497 - protein, 392 aa, Hypecoum imberbe
DLEPVNPSDVPITAAGALKSYKLAAKAISRLQSLPSGNIPLLCDVLAREVRELTGYDRVMVYKFHEDEHGEVIAECRELDLEPYLGLHYPATDIPQASRFLFLKNKVRMICDCSAQPVKVIQDEKLAQPLSLCGSTLRAPHGCHSQYMTNMGSVASLVMSLTINEDDDEMETSTQKGRKLWGLVVCHHTSPRFVPYPLRYACEFLIQVFGIQLNKEVELASQLMEKHILKMQTVLCDMLLRDAPVGIVAQSHNVMDLVKCDGAALYYRNKLWLLGVTPTEAQVRDIARWLLECHYGTTGLSTDSLMEAGYPGASGLGDAVCGTAAISITSKDFLFWFRSQTAKEIKWGGAKHDPMDKDGLRKMHPRSSFKAFLEVVKCRSVPWEDIEMDAIQ

SEQ ID NO: 9498 - protein, 356 aa, Vigna aconitifolia
MSLLSDLINLNLSDTTEKIIAEYIWIGGSGLDLRSKARTLPGPVSDPSKLPKWNYDGSSTGQAPGEDSEVIIYPQAIFKDPFRRGNNILVMCDAYTPAGEPIPTNKRHNAAKIFSHPDVVAEEPWYGIEQEYTLLQKDVNWPLGWPVGGFPGPQGPYYCGAGADKAFGRDIVDAHYKACLYAGINISGINGEVMPGQWEFQVGPAVGISAGDELWVARYILERITEIAGVVLSFDPKPIKGDWNGAGAHTNYSTKTMRNDGGYEVIKSAIEKLGKRHKEHIAAYGEGNERRLTGRHETADINTFLWGVANRGASIRVGRDTEKAGKGYFEDRRPASNMDPYVVTSMIADTTILWKP

SEQ ID NO: 9499 - protein, 459 aa, Illicium oligandrum
SGKPFYAIMHRIDVGLVIDLEPVNPADVPITAAGALKSYKLAAKAISRLQSLPSGNIGILCDVLVREVSELTGYDRVMAYKFHEDEHGEVIAEYRRTDLEPYLGLHYPATDIPQASRFLFMKNKVRMICDCYAPPVKVIQDKKLAQPLSLGGSTLRAPHGCHAQYMANMGSIASLVMSVTINEDYDETSSNQQKGRKLWGLVVCHHTSPRFVPFPLRYACEFLLQVCGIQLNKEVELVAQMKEKHILKTQTLLCDMLLRDAPIGIMTKSPNVMDLVKCDGAALYYGKQLWLLGITPTEAQIRDITEWLLECHDSTTGLSTDSLMEAGYPGATTLGDTVCGMAAIKVASKDFLFWFRSHTAKEIKWGGSKHDPADKDGKKMHPRSSFKAFLEVVKRRSLPWEDVEMDAIHSLQLILRGSLQQVLESETKAIVDARLDDEQIQGPDELRIVTNEMVRLIET

SEQ ID NO: 9500 - protein, 615 aa, Chelone obliqua
SGKPFYAIIHRVTGSLIIDFEPVKPHEVPMTAAGALQSYKLAAKAITRLQSLPSGSMERLCDTMVQEAFELTGYDRVMIYKFHDDDHGEVFSEVTKPGLEPYVGLHYPATDIPQAARFLFMKNKVRMICDCRAKHVKVVQDEKLSFDLTLCGSTLRAPHSCHLQYMENMNSIASLVMSVVVNEGDEDGSESVHPQKRKRLWGLVVCHNTSPRFIPFPLRYACEFLAQVFAIHVNKELELENQMLEKNILRTQTLLCDMLLRDAPLGIVSQSPNVMDLVKCDGAALMYKNKKYKMGLTPTDFQIRDIVSWLDEYHRDSTGLSTDSLYDAGFPGALALGDAICGMAAVKISERDWLFWFRSHTAAEIRWGGAKHEQGEKDDGRKMHPRSSFKAFLEVVKTRSLPWKDYEMDAIHSLQLILRNAFKDGENADSDTKAIHTRLTDLRIDGMQELEAVTSEMVRLIETASVPILAVDVDGHVNGWNSKIADLTGLPVDEAIGKQFLELVEDSSTDTVSKMLKLALEGKEEQNVQFEVKTHGERSDSGPVTLVVNACASKDVEENVVGVCFIAQDITAHKNMMDKFTRIEGDYKAIVQNPNPLIPPIFGTDEFGWCSEWNN

SEQ ID NO: 9501 - protein, 370 aa, Saccharomyces cerevisiae
MAEASIEKTQILQKYLELDQRGRIIAEYVWIDGTGNLRSKGRTLKKRITSIDQLPEWNFDGSSTNQAPGHDSDIYLKPVAYYPDPFRRGDNIVVLAACYNNDGTPNKFNHRHEAAKLFAAHKDEEIWFGLEQEYTLFDMYDDVYGWPKGGYPAPQGPYYCGVGAGKVYARDMIEAHYRACLYAGLEISGINAEVMPSQWEFQVGPCTGIDMGDQLWMARYFLHRVAEEFGIKISFHPKPLKGDWNGAGCHTNVSTKEMRQPGGMKYIEQAIEKLSKRHAEHIKLYGSDNDMRLTGRHETASMTAFSSGVANRGSSIRIPRSVAKEGYGYFEDRRPASNIDPYLVTGIMCETVCGAIDNADMTKEFERESS

SEQ ID NO: 9502 - protein, 107 aa, Escherichia coli
AKQDYYEILGVSKTAEEREIRKAYKRLAMKYHPDRNQGDKEAEAKFKEIKEAYEVLTDSQKRAAYDQYGHAAFEQGGMGGGGFGGGADFSDIFGDVFGDIFGGGRGR

SEQ ID NO: 9503 - protein, 605 aa, Conopholis alpina
SGKPFYAIIHRVTGSLIIDFEPVKPHEVPMTAAGALQSYKLAAKAITRLQALRGGSMERLCDTMVQEVFELTGYDRVMIYKFHDDDHGEVSTEITKPGLEPYVGLHYPATDIPQAARFLFMKNKVRMICDCRASHVKVVQDENLPFDLTLCGSTLRAPHRCHLLYMENMNSIASLVMSVVINEGNEDGASSSSGPDKRKTLWGLLVCHNTSPRFVPFPLRYACEFLVQVFAIHVNKELELENQMLEKNILRTQTLLCDLLLRDAPLGIVSQSPNVMDLVKCIGAVLLYKNTKYRLGLTPSDFQIRDIVSWLDEYHWDSTGLSTDSLYDAGFPGALALGDALCGMAAVRITDRDWLFWFRSHTAAEIQWGGMKHEPDEKDDGSKMHPRSSFKAFLEVVKTRSLPWKDYEMDAIHSLQLILRNAFKESEGRDLEIHARLNELQIGGVREIEAVATEMVRLIETASVPIFAVDVDGLVNGWNTKIADLTGLCVNKAMGSHFLALVEDSSADTVSKMLELALQGKEEQNVQFEIKTHGQNSESGPITLMVNACASRDVKENVVGVCFIAQDITTQKSMMDKFTRIEGDYRAIVQNPNPLIPPIFGTDEF

SEQ ID NO: 9504 - protein, 205 aa, Gossypium robinsonii
HTCGEHVGLNVNGEPFVACHECNFPICKSCFEYDLKEGRKACLRCGSPYDENLLDDVEKATGDQSTMAAHLSKSQDIGIHARHISSVSTLDSEMTEDNGNPIWKNRVESWKEKKNKKKQPATTKVEREAEIPPEQQMEDKPAPDASQPLSTIIPIPKSRLAPYRTVIIMRLIILGLFFHYRVTNPVDSAFGLWLTSVICEIWFAF

SEQ ID NO: 9505 - protein, 159 aa, Helianthus annuus
EFQVGPSVGISAGDEIWAARYILERITEIAGVVVSFDPKPIPGDWNGAGAHTNYSTKSMREEGGYEIIKKAIEKLGLRHSEHIAAYGEGNERRLTGRHETANINTSKWGVANRGASIRVGRDTEKEGKGYFEDRRPASNMDPYVVTSMIAETTILYVNP

SEQ ID NO: 9506 - protein, 580 aa, Zea mays
  misc_feature (57)..(57): Xaa can be any naturally occurring amino acid
  misc_feature (66)..(66): Xaa can be any naturally occurring amino acid
SAAATQSHTLTHTHQLGAAEMQQRRKSVFASAPFAMKQAALGAGVAARKNGAPLSLXAAVVFALFXVFATFLYNEDIKSITDFQFSSGAIRAKSPDLHLLQEAEAAAHAAVNTLAKRGEEVIVRVLEVEAPPVVNTSSVLAAAAKANAKAKANAVDVGQEKERDVTLPTVTGGRGGADEARRRADEEVAEKAASAKAAAATAALRGVVSVPQTCDLYRGSWVYDEVSAPVYKEGECEFLTEQVTCMRNGRRDDSYQKWRWQPAGCDLPRFDARLLLERLRNKRLMFVGDSLNRNQWESMVCLVQSVIPDRGQKTLTKFVNGGSSNVFYAHEYNATVEFYWAPFLVESNSDNPKVHSVPDRVIQWHAIAKHARNWIGVDYLVFNTYIWWLNTLDIKVLKQGSSFDDQGGSTEYVEVDRPVAYKEVLTTWAKWVDRNIDPNRTTVFFMGMSPNHITPEAWGNKGGIKCAMETLPIASNRSAALDVGTDWRLYAGAREVLPTLRRVPVHFVDITALSELRKDAHTSVHTLRQGKLLTPEQQADPKTYADCIHWCLPGLPDTWNQFLYARIASSPWPNDAQAQQ

SEQ ID NO: 9507 - protein, 174 aa, Helianthus annuus
GFQVGPSVGIEAGDHIWCARYLLERITEQAGVVLTLDPKPIEGDWNGAGCHTNYSTKAMREDGGFEVIKKAILNLSLRHTEHISAYGEGNERRLTGKHETASINQFSWGVANRGCSIRVGRDTEKAGKGYLEDRRPASNMDPYTVTGLLAETTILWEPTLEAEALAAQKLALNV

SEQ ID NO: 9508 - protein, 509 aa, Bifidobacterium longum NCC2705
MTEINDKAQLDIAAADDTDAVTSDTPEETVNTPEVDETFELSAAKMREHGMSETAINQFHHLYDVWRHEEASSWIREDDIEPLGHVPSFHDVYETINHDKAVDAFAKTAFLKLNGGLGTSMGLDKAKSLLPVRRHKAKQMRFIDIIIGQVLTARTRLNVELPLTFMNSFHTSADTMKVLKHHRKFSQHDVPMEIIQHQEPKLVAATGEPVSYPANPELEWCPPGHGDLFSTIWESGLLDVLEERGFKYLFISNSDNLGARPSRTLAQHFENTGAPFMAEVAIRTKADRKGGHIVRDKATGRLILREMSQVHPDDKEAAQDITKHPYFNTNSIWVRIDALKDKLAECDGVLPLPVIRNKKTVNPTDPDSEQVIQLETAMGAAIGLFNGSICVQVDRMRFLPVKTTNDLFIMRSDRFHLTDTYEMEDGNYIFPNVELDPRYYKNIHDFDERFPYAVPSLAAANSVSIQGDWTFGRDVMMFADAKLEDKGEPSYVPNGEYVGPQGIEPDDWV

SEQ ID NO: 9509 - protein, 174 aa, Helianthus annuus
GSQVGPSVGIEAGDHIWCARYLLERITEQAGVVLTLDPKPIEGDWNGAGCHTNYSTKAMREDGGFEVIKKAILNLSLRHTEHISAYGEGNERRLTGKHGTASINQFSWGVANRGCSIRVGRDTDAAGKGYLEDRRPASNMDPYTVTGLLAETPFLWEPSLEAEALAAQKLALNV

SEQ ID NO: 9510 - protein, 101 aa, Camellia sinensis
NNILVMCDTYTPGGEPIPTNKRFNAAKIFSHPDVVAEEPWYGIEQEYTLLQKQVKWPLGWPLGGFPGPQGPYYCGIGVDKAYGRDIVDSHYKACLYAGVNI

SEQ ID NO: 9511 - protein, 172 aa, Saccharomyces cerevisiae YJM789
MSLVNSLTHYEILRIPSDATQDEIKKAYRNRLLNTHPDKLSKSIHDTVSNVTINKIQDAYKILSNIKTRREYDRLILENYKRQGFHNCGDGLDEFSLDDFSFDEDKLEFMMNCPRCQFVGGFHFSESLLDECIDNVDAMERSHSGYQLLTQCSACSLWLKVNFDIEEGQEGQ

SEQ ID NO: 9512 - protein, 174 aa, Helianthus annuus
GFQVGPSVGIDSGDHIWRARYLLERITEQAGVVLTLDPKPIEGDWNGAGCHTNYSTKAMREDGGFEVIKKAILNLSLRHTEHISAYGEGNERRLTGKHETASINQFSWGVANRGCSIRVGGDTEKAGKGYLEDRRPASNMDPYTVTGLLAETTILWEPSLEAEALAAQKLALNV

SEQ ID NO: 9513 - protein, 430 aa, Canavalia lineata
MAQILAPSTQWQMRITKTSPNASPVTSNMWSSLLMKQNKKATSSAKFRVLAIKSENGTINRLENLLDLDITPYTDKIIAEYIWVGGTGIDVRSKSRTIARPVEHPSELPKWNYDGSSTGQAPGDDSEVILYPQAIFKDPFRGGNNILVICDAYTPAGEPIPTNKRHRAAEIFSNPKVQAEVPWYGIEQEYTLLQTNVNWPLGWPVGGYPGPQGPYYCSAGADKSFGRDISDAHYKACLYAGINISGTNGEVMPGQWEFQVGPSVGIEAGDHIWAARYILERITEQAGVVLSLDPKPIQGDWNGAGCHTNYSTKSMREEGGFEVIKKAILNLSLRHSDHIRAYGEGNERRLTGKHETADINTFSWGVANRGCSIRVGRDTEKNGKGYLEDRRPASNMDPYVVTSLLAETTLLWEPTLEAEALAAQKIALKV

SEQ ID NO: 9514 - protein, 292 aa, Nepenthes rafflesiana
MKTHYSSAILPILTLFVFLSINPSHGSGIAVYWGQNGNEGTLSDTCATGNYNYVLVSFLTTFGNGQTPVLNLAGHCDPSSNGCTGLSTDITSCQNQGIKVLLSLGGASGSYSLVSTDDADQVAAYLWNNYLGGQSDSRPLGSAVLDGIDFDIESGSDNYWGDLATALKNYSQSVLVSAAPQCPYPDAHLDLAIATGIFDYVWVQFYNNEQCEYVTDDTNLLSAWNQWTSSQANVVFLGLPASTDAASSGYISPDVLISQVLPSIKASSKYGGVMLWSKYYDNGYSSAIKDSV

SEQ ID NO: 9515 - protein, 428 aa, Brassica napus
MAQILAASPTCQMRLTKPSSIASSKLWNSVVLKQKKQSSSKVRSFKVMAIQSDNSTINRVESLLNLDTKPFTDRIIAEYIWYGGSGIDLRSKSRTLEKPVEDPSELPKWNYDGSSTGQAPGEDSEVILYPQAIFRDPFRGGNNILVICDTYTPAGEPIPTNKRARAAEIFSNKKVNEEIPWFGIEQEYTLLQPNVNWPLGWPVGAYPGPQGPYYCGVGAEKSWGRDISDAHYKACLYAGINISGTNGEVMPGQWEFQVGPSVRIEAGDHVWCARYLLERITEQAGVVLTLDPKPIEGDWNGAGCHTNYSTKSMREDGGFEVIKKAILNLSLRHMEHIIAYGEGNERRLTGKHETASIDQFSWGVANRGCSIRVGRDTEKKGKGYLEDRRPASNMDPYIVTSLLAETTLLWEPTLEAEALAAQKLSLKV

SEQ ID NO: 9516 - protein, 374 aa, Pristimera andina
ALSIAGAVQSQKLAVRAISRLQSLPGGDIKLLCDTAVESVRDLTGYDRVMVYKFHEDEHGEVVAGSKRPDLEPYIGLHYPATDIPQASRFLFKQNRVRIIVDCHASPVNVIQDDGLMQPLCLVGSTLRAPHGCHAQYMENMGSIASLAMAVVINGNDEDGIGGRNPTRLWGLVVCHHTSARCIPFPLRYACEFLMQAFGLQLNMELQLAAQLLEKHVLKTQTLLCDMLLRESPTGIVTQSPSIMDLVKCDGAALYYQANYYPLGVTPTEAQIKDIVEWLLVFHGDSTGLSTDSLADAGYPGATLLGDAVCGMAVAYITNRDFLFWFRSHTAKEIKWGGAKHHPEDKDDGLRMHPRSSFKAFLEVVKSRSLPWEN

SEQ ID NO: 9517 - protein, 432 aa, Crataegus crus-galli
MAQILAPTSQWRMKVTRSSATASPMTAKMWGSLVLKQNKKGPARSSTKFRVLATKSEGYTINRLEGLLNLDLTPFTDKIIAEYIWIGGSGVDVRSKSRTISKPVEDPSELPKWNYDGSSTGQAPGEDSEVILYPQAIFKDPFRGGNNILVICDAYTPQGEPIPTNKRARAAEIFKNKKVIDEVPWYGIEQEYTLLQTDVKWPLGWPIGGYPGPQGPYYCGAGADKSFGRDISDAHYKACLYAGINISGTNGEVMPGQWEYQVGPSVGIEAGDHIWASRYILERITEQAGVVLTLDPKPIEGDWNGAGCHTNYSTKSMREDGGFEVIKKAILNLSLRHVEHISAYGEGNERRLTGKHETASINTFSWGVANRGCSIRVGRETEKQGKGYLEDRRPASNMDPYIVTSLLAETTLLWEPTLEAEALAAQKLALNV

SEQ ID NO: 9518 - protein, 195 aa, Brassica napus
MASIQFGSTCVAQWSIRPHFAVRVYHPSSGLQSSTRQQNSTRSRINCLGASRSSMFSHGSLPLLSMPGMSRNMQPRRGSRFTVRADADYYSVLGVSKNATKSEIKSAYRKLARNYHPDVNKEPGAEEKFKEISNAYEVLSDDEKKSLYDRFGEAGVKGAGGMGGMGDFSNPFDLFESLFEGMGGMGGGGGMGRGS

SEQ ID NO: 9519 - protein, 301 aa, Oryza sativa Indica Group
MASSRLALPAAIFCAVVVAASLGGAAATGKTGRITVYWGQTSSEGGLREACGTGLYSTVIISFLTDFGGGNYKLNLAGHAWSAVGPDVKYCQSKGVLVLLSIGGGVGRYSLASQADAKAVADHLWNFYLGGTSTKSRPFGDAVLDGVDFDIELGSNAHYGDLARYLKAYSGRKPGGRKVWLTAAPQCPFPDRMLGEALRTGLFDRVHVQFYNNPVCNYRASNVAAFTSAWNKWAASLPGSSVYLGLPAASGAANNGYVAPATLKENVLPIVQKSKNYGGIMLWSRYWDKQTGYSKSVKSAV

SEQ ID NO: 9520 - protein, 336 aa, Zea mays; identical to SEQ ID NO: 7074

SEQ ID NO: 9521 - protein, 473 aa, Zea mays; identical to SEQ ID NO: 8805

SEQ ID NO: 9522 - protein, 374 aa, Psammomoya choretroides
ALSIAGAVQSQKLAVRAISQLQSLPGGDIKLLCDTVVESVADLTGYDRVMVYRFHEDEHGEVVAESKRPDLEPYIGLHYPATDIPQASRFLFKQNRVRMIVDCHASPVHVIQDDGLMQPLCLVGSTLRAPHGCHAQYMENMGSIASLAMAVIINGNDEEVIGGRNPTRLWGLVVCPHTSARCIPFPLRYACEFLMQAFGLQLNMELQLAAQLLEKHVLKTQTLLCDMLLRDSPTGIVTQSPSIMDLVKCDGAALYYRGNYYPLGVTPTEAQIKDIVEWLLAFHGDSTGLSTDSLADAGYPGAALLGDAVCGMAVAYITNRDFLFWFRSHTAKETKWGGAKHHPEDKDDGQRMHPRSSFKAFLEVVKSRSLPWEN

SEQ ID NO: 9523 - protein, 303 aa, Oryza sativa
ASQRRRSSATAVLLSLLLLLQLAAAYPQGKRQNVAVFWGRNKAEGSLRQTCDTGDYNIVIISFLSVFGHGKYWLDLSGHDLRDVGADIRHCQSKGVYMLLSIGGDGYQYSLPSSKSAADVAENLYYSVLGGDRPGAFHPFGDDTIVNGVDFFIDNGPADHYDDLANRINDYNQNIRDPIGIMLTATVRCSYPDPRMKAALDTKLFRRIHVRFYDDPSCSYNHAGLAGVMAQWNKWSATYPDGQIFLGVVAANLTGKNDMVAVGELRDKLLPAVQNTDTYGGVMLWNSYYDSLTHYGRYVKDLA

SEQ ID NO: 9524 - protein, 419 aa, Metarhizium anisopliae var. anisopliae
MHHLRALVGVGLAGLAAGVPLTDKISVKPRQAPGAQNVVYWGQNGGGTIENNDLAAYCQPNSGIDVLVLAFLYQFGNGGNIPSGTIGQSCYISTSGQGQNCEALTAAIHTCQSAGVKIVLSLGGATSSYSLQTQAQAEQIGQYLWDSYGNSGNKTVQRPFGSNFVNGFDFDIEVNGGSSQYYQYMIAKLRANFASDKSNTYLITGAPQCPIPEPNMGVIISNSVFDHLYVQFYNNNNYTVPCALGINGNAPFNYNNWTSFIADTPSAGAKIFIGVPASPLASTGTPSGAQYYAAPEQLAAIVGEYRSDAHFGGIMMWSAGFSDANVNDGCTYAQQAKSILVNGAPCPSSGPPSSTPATAPAPTATTMPSSTSVSSPTASPTGGTVPQWGQCGGEGYSGPTQCVPPYQCVKQGDWWSSCR

SEQ ID NO: 9525 - protein, 374 aa, Psammomoya choretroides
ALSIAGAVQSQKLAVRAISQLQSLPGGDIKLLCDTVVESVADLTGYDRVMVYRFHEDEHGEVVAESKRPDLEPYIGLHYPATDIPQASRFLFKQNRVRMIVDCHASPVHVIQDDGLMQPLCLVGSTLRAPHGCHAQYMENMGSIASLAMAVIINGNDEEVIGGRNPTRLWGLVVCHHTSARCVPFPLRYACEFLMQAFGLQLNMELQLAAQLLEKHVLKTQTLLCDMLLRDSPTGIVTQSPSIMDLVKCDGAALYYRGNYYPLGVTPTEAQIKDIVEWLLAFHGDSTGLSTDSLADAGYPGAALLGDAVCGMAVAYITNRDFLFWFRSHTAKETKWGGAKHHPEDKDDGQRMHPRSSFKAFLEVVKSRSLPWEN

SEQ ID NO: 9526 - protein, 374 aa, Pterocelastrus tricuspidatus
ALSIAGAVQSQKLAVRAISQLQSLPGGDIKLLCDTVVESVRDLTGYDRVMVYKFHEDEHGEVMAESRRPDLEPYIGLHYPASDIPQASRFLFKQNRVRMIVDCHASPVLVIQDDGLMQPLCLVGSTLRAPHGCHAQYMENMSSIASLAMAVIINGSDEEGVGGRNPTRLWGLVVCHHTSARCIPFPLRYACEFLMQAFGLQLNMELQLAAQLLEKHVLKTQTLLCDMLLRDSPTGIVTQSPSIMDLVKCDGAALYYQGNYYPLGVTPTEAQIKDIVEWLLAFHGDSTGLSTDSLADAGYPGAALLGDAVCGMSVAYITNRDFLFWFRSHTAKEIKWGGAKHHPEDKDDGQRMHPRSSFKAFLEVVKSRSLPWEN

SEQ ID NO: 9527 - protein, 464 aa, Lardizabala biternata
SGKPFYAIIHRVTGSLIIDFEPVKPYEVPMNAAGALQSYKLAAKAIARLQSLPNASMDRLCDTVVQEVFELTGYDRVMAYKFHDDDHGEVVSEITKPGLELYLGLHYPATDIPQAARFLFMKNKIRMICGCNATHVKVFQDEKLPLDLTLCGSTLRAPHSCHLQYMDNMGSIASLVMAVVVNEGDEENDGSGPAQPQKRKRLWGLVVCHNTTPRFVPFPLRYACEFLIQVFAIHINKELELENQVLEKTFYVPQTLLCDMLMRNAPLGIVSQSPNIMDLVKCDGAALLYKNKIWRLGLSPSEFHIRDIASWLYEYHMDSTGLSTDSLHDAGFPGALSLGDGVCGMAAVRITSKDMIFWFRSHIATEVRWGGAKHDPSEKDDGRKMHPRSSFKAFLEVAKTRSLAWKDYEMDAIHSLQLILRNAFKDGDTADLNSSVIHSRLDNLKIDGMEELEAVTNEMVRLME

SEQ ID NO: 9528 - protein, 911 aa, Zea mays
MAFKGLPRDSRGSLEVFNPDAPVSDRATTSPFLLPPAVASHPSLLAAGDGGDADVGRATQRAAEWGLVLQTDEHTGRPQGVVARPSGSNRTSESGNSIDERAAAAGAGRALPRVSEELRAALSAFQQTFVVSDATRPDHPILYASAGFFNMTGYSSNEVVGRNCRFLQGSGTDPVEISKIRQALAAGSNYCGRILNYKKDGTPFWNLLTVAPIKDEDGRVLKFIGMQVEVSKYTEGNKDTALRPNGLPESLIKYDARQKDHARSSVSELLLALKDPRSLSESRNNTLKRKSQESAGSALVPGKRSSETGSRRNSHSGMRNSLQKISEVPEGGNKTRKSGLRSFMGLIGMGHGNVEKNILKPREDPLLDSDDERPDSFDDDFRKKEMRKGIDLATTLERIEKNFVITDPRLPDNPIIFASDSFLRLTEYCREEILGRNCRFLQGPETDRGTVKKIRDAIDNQTEVTVQLINYTKSGKKFWNLFHLQPMRDQKGDVQYFIGVQLDGTERVREAAAKDGAILVKKTADNIDEAAKELPDANLRPEDLWANHSKPVLPKPHMKDTASWRAIQKVLENGESIDLKHFRPVRPLGSGDTGSVHLVELLGTGEYFAMKAMDKSVMLNRNKVHRATAERQILDMLDHPFLPTLYASFQTKTHICLIVDYCAGGELFMLLDRQPMKVLKEDAVRFYAAEVVTALEYLHCQGIIYRDLKPENILLHRDGHISLTDFDLSCLTSCRPQVFLPHDIDKKKKRRKSRSNPIFFAEPMRASNSFVGTEEYIAPEIITGAGHTSAVDWWALGILLYEMLYGYTPFRGKTRQRTFANILHKDIRFPASIQVSLAARQLIYRLLHRDPANRLGSYEGAMEIKQHPFFRGINWALVRAATPPELEAPLQDTLEATLPPPAADAAHTDMF

SEQ ID NO: 9529 - protein, 245 aa, Putterlickia verrucosa
ALSIAGAVQSQKLAVRAISQLQSLPGGDIELLCDTVVESVRDLTGYDRVMVYKFHEDEHGEVVAESKRSDLEPYIGLHYPASDIPQASRFLFKQNRVRMIVDCHASPVRVIQDDGLMQPLCLVGSTLRAPHGCHAQYMENMGSLASLAMAVIINGNEEEAIGGRSPTRLWGLVVCHHTSARCIPFPLRYACEFLMQAFGLQLNMELQLAAQLLEKHVLKTQTLLCDMLLRDSPTGIVTQSPSIMD

SEQ ID NO: 9530 - protein, 394 aa, Lardizabala biternata
DLEPVNRADVPVTAAGALKSYKLAAKAISKLQSLPSGNISLLCDVLVHEVSDMTGYDRVMVYKFHEDEHGEVVSECLRSDLEPYLGLHYPATDIPQASRFLFLKNKVRMICDCSARSVEIIQDKRLTQPLSLGGSTLRAHHGCHTQYMSNMGSVASLVMSITINDDDDDDETETTKRKGRKLWGLVVCHHTSPRFVPFPLRYACEFLIQVFGIQLTKEVELATQLREKHILQIQTVLCDLLLRNAPVGIFTQSPNVMDLVKCDGAALYYKNKFWLLGVTPTEAQIREIAAWILEYHDGSTGLSTDSLMEAGYPGASVLGNAVCGMAAINITSKDFIFWFRSHTAKEIKWGGAKHDPVDKDDGRKMHPRSSFRAFLEVVQWRSLLWEDIEMDAIQ

SEQ ID NO: 9531 - protein, 604 aa, Conopholis americana
SGKPFYAIIHRVTGSLIIDFEPVKPHEVPMTAAGALQSYKLAAKAITRLQALRGGSMERLCDTMVQEVFELTGYDRVMIYKFHDDDHGEVSTEITKPGLEPYVGLHYPATDIPQAARFLFMKNKVRMICDCRASHVKVVQDENLLFDLTLCGSTLRAPHRCHLLYMENMNSIASLVMSVVINEGNEDGASSSSGPDKRKTLWGLLVCHNTSPRFVPFPLRYACEFLVQVFAIHVNKELELENQMLEKNILRTQTLLCDLLLRDAPLGIVSQSPNVMDLVKCIGAVLLYKNTKYRLGLTPSDFQIRDIVSWLDEYHWDSTGLSTDSLYDAGFPGALALGDALCGMAAVRITDRDWLFWFRSHTAAETQGGMKHEPDEKDDGSKMHPRSSFKAFLEVVKTRSLPWKDYEMDAIHSLQLILRNAFKESEGRDLEIHARLNELQIGGVREIEAVATEMVRLIETASVPIFAVDVDGLVNGWNTKIADLTGLCVNKAMGSHFLALVEDSSADTVSKMLELALQGKEEQNVQFEIKTHGQNSESGPITLMVNACASRDVKENVVGVCFIAQDITTQKSMMDKFTRIEGDYRAIVQNPNPLIPPIFGTDEF

SEQ ID NO: 9532 - protein, 407 aa, Zea mays
MSSSGKMEGPSAPVVRRDPYEVLSVPRDSSDQEIKSAYRKLALKYHPDKNASNPEASELFKEVAYSYSILSDPEKRRQYDTAGFEELENEGMDMEIDLSNLGTVNTMFAALFSKLGVPIKTTISPTVLEEAMNGTVTVRPLPVGTSATGKVDKQCAHFFGVTISEEQAHSGMVVRVTSPAQSKFKLLYFEQEVNGGYGLALQEDSQKTGKVTSAGMYFLHFQVYRMDSTANALAMAKDPEAAFFKRLEGLQPCEVSALKSGTHIFAVYGDNFFKPASYMIEAMCAKSYEDTTERLKEIESKILAKRNDLRQFETEYRKALARFQEVTNRYTQEREAVDDMLRERDNIHCSFTTERTLANPVGVGSSSRYTIEQSIPESPENGSVDGRDKSGKKKWFNLNLNRSDKKA

SEQ ID NO: 9533 - protein, 466 aa, Lilium superbum
SGKPFYAIVHRVTNCLIIDFEPVNHTESPTTAAGALQSYKLAAKAIAKLQSLPGGSVRRLCETVVQEVFELTGYDRVMAYRFHEDDHGEVFTEVTKPGLEPYVGLHYPATDIPQAARFLFMKNKVRMICDCRARPVKIHQDDKLPAEITFCGSTLRAPHSCHLQYMENMNSIASLVMAVVVNDDDEVLDEQGAPSRQQSGRKKLWGLVVCHHLSPRFVPFPLRYACEFLMQVFAIHVNKEFELENQIREKNILKTQTLLCDMLLRDGDPIGIVSQSPNIMDLVKCDGAALLYNNRIWQLGMAPTGSQIHDIAFWLAESHMDSTGLSTDSLLDAGYPGALALGDTVCGMAAARITTKDIVFWFRSHTASEIKWGGEKHDPEEEDDGRRMHPRSSFNAFLQVVKNRSLPWNDYEMDAIHSSQLILRGTLDDNGKSKKGSLDSGMGDMRLDGMVELQAVTNEMVRLIIT

SEQ ID NO: 9534 - protein, 394 aa, Lilium superbum
DLEPVNPDDIPVATAGALKSYKLAAKAISRLQSLPSGNISLLCDAMVREVSELTGYARVMAYKFHEDEHGEVIAECKRPDLEPYIGLHYPATDIPQASRFLFMKDKVRMICDCTAPSVRVIRDRQLLQPPSLCGSTLRAPHGCHAQYMANMGSIASLVMAVTVNEDDDETDSNNQPKARKLWGLVVCHHTSPRFVPYPLRYACEFLLQVFGIQINKEVELAAQAKEKHIFRIQTVLCDMLLRDAPIGIFKKSPNVMDLVKCDGAALYYKNQFWRLGTTPTEAQIKDIVNWLLECHDGTTGLSTDSLTEAGYPDASSLGDEVCGMATISITLKDFIFWFRSHTAKEIKWGGAKHEPTDKDDDGRKMHPRSSFKAFLEIVKLRSLPWEDMEMDAIQ

SEQ ID NO: 9535 - protein, 921 aa, Oryza sativa Japonica Group
MASKGTEGGHGGVERKEQQQQRGYQLPRDSRGSLEVFNPSSASSFRTAAAAPKSASPFLAIPDREEDNVVAQQRAAEWGLVLQTDHHTGLPQGVSARPSSGSARTSSEDNPQQQQSAAAIPRVSEELRAALSVFQQTFVVSDATHPNHPIMYASAGFFNMTGYTSKEVVGRNCRFLQGSGTDPHEIDKIRQSLANGSNYCGRILNYKKDGTPFWNLLTIAPIKDEDGRLLKFIGMQVEVSKYTEGKKDTVVRPNGLSESLIKYDARQKDHARSSVSELLLALKNPRSLSESSNNTLKRKSQESLSMSMSEVPSKRSSESGSRRNSRSGTRSSLQKINEVPDQVNRTRKSGLRAFMGFLGMGHGSVEKNMLKPRDEDPLIDSDDERPESFEDEFRRKEMRRGIDLATTLERIEKNFVITDPRLPDNPIIFASDSFLQLTEYNREEILGRNCRFLQGPETDRATVRKIRDAIDNQAEVTVQLINYTKSGKKFWNLFHLQPMRDQKGDVQYFIGVQLDGTEHVQDDAAKEGVVLVKKTADNIDEAAKELPDANLRPKDLWANHSKVVLPNPHMKDTASWRAIQKVLESGESIGLKHFRPVKPLGSGDTGSVHLVELLNTGEYFAMKAMDKSIMLNRNKVHRATAERQILDLLDHPFLPTLYASFQTKTHICLITDYCPGGELFVLLDNQPLKVLHEDAVRFYAAEVVVALEYLHCQGIIYRDLKPENILLHRDGHISLTDFDLSCLTSCRPQVFLPEDADEKKGRKNGSYPIFFAEPMRASNSFVGTEEYIAPEIITGAGHTSAVDWWALGILLYEMLYGYTPFRGKTRQRTFANILHKDIRFPASISVSLAARQLMYRLLHRDPANRLGSYEGANEIKGHPFFRGINWPLIRATAPPKLEIPLFSKDDMEKKGLVTNNRTDMF

SEQ ID NO: 9536 - protein, 147 aa, Brassica napus
MEHKETGCQSREGPILCVNNCGFFGSAATMNMCSKCHKEMAMKQEQAKLAASSFDSIVNGGDAAKEHLAAGSTAVAVAHVEAKTLITAQPADIAGPSEAAMENPKGPSRCSTCRKRVGLTGFNCRCGNLYCATHRYSDKHECKFDYR

SEQ ID NO: 9537 - protein, 465 aa, Pachysandra americana
  misc_feature (232)..(232): Xaa can be any naturally occurring amino acid
SGKPFYAIVHRVTGSLIIDFEPVKPYEVPMTAAGALQSYKLAAKAIARLQSLPSGSMERLCDTMVQEVFELTGYDRVMAYKFHEDDHGEVVSEITKPGLEPYLGLHYPATDIPQAARFLFMKNKVRMICDCNAKHVKVLQDEKLPFDLTLCGSTLRAPHSCHLQYMDNMGSIASLVMAVVINEGDEDGEGSDPAQPQKRKRLWGLVVCHNTSPRFVPFPLRYACEFLAQVFXIHVNKEIGLENQILEKNILRTQTLLCDMLMRDAPLGTVSQSPNIMDLVKCDGAALLYKNKIWRLGMAPGDFQINDISSWLSEYHMDSTGLSTDSLYDAGYPGALALGDVVCGMAAVRITTKDMLFWFRSHTAGEVRWGGAKHERGEKDDGRRMHPRSSFKAFLEVVKTRSLPWKDYEMDAIHSLQLILRNAFRDVETMDLDTNTIRMQLNDLKIKGMEELEAVTNEMVRLMET

SEQ ID NO: 9538 - protein, 218 aa, Epifagus virginiana
SGKPFYAIIHRVTGSLIIDFEPVKPHEVPMTAAGALQSYKLAAKAITRLQALRGGSMERLCDTMVQEVFELTGYDRVMIYKFHDDDHGEVSAEITKPGLEPYMGLHYPATDIPQAARFLFMKNKVRMICDCRANHVKVVQDENLPFDLTLCGSTLRAPHSCHLQYMENMNSIASLVMSVVVNEGNEDEPNSSSGPEKRKMLWGLLVCHNTSPRFVHTP

SEQ ID NO: 9539 - protein, 198 aa, Triticum aestivum
MPQLAASPAAAAFAVAGGGRAGFRPPPRAPMRARAAAAASGAASAYTAMPAAQQQQPQPTFYDLLGISAEGSSFEDVRAAYRRMARKYHPDVSPPDAAKEHTRRFIQVQEAYETLSDPSRRTTYDRALARGVCRLAFSPAARRHDASAFYHQEQEERSGWRTSWEGQISELKKRSTVKDAEENLSWGAQMRRRRAEQL

SEQ ID NO: 9540 - protein, 274 aa, Fagus sylvatica
YEEKTEWGSEIGWIYGSVTEDILTGFKMHARGWRSIYCMPKRPAFKGSAPINLSDRLNQVLRWALGSVEILLSRHCPIWYGYNGRLKWLERFAYVNTTIYPITAIPLLMYCTLPAVCLLTNKFIIPQISNIASIWFISLFLSIFATGILEMRWSGVGIDEWWRNEQFWVIGGVSAHLFAVFQGLLKVLAGIDTNFTVTSKASDEDGDSAELYLFKWTTLLIPPTTLLIINLVGVVAGISYAINSGYQSWGPLFGKLFFAFWVIVHLYPFLKGLM

SEQ ID NO: 9541 - protein, 443 aa, Triticum aestivum
  misc_feature (23)..(23): Xaa can be any naturally occurring amino acid
  misc_feature (270)..(270): Xaa can be any naturally occurring amino acid
  misc_feature (288)..(288): Xaa can be any naturally occurring amino acid
ASSGDGAGGGAGDAVPGGRAGQXAVPARQPAGRVWGVRRTARAASGFKVLALGPETTGVIQRMQQLLDMDTTPFTDKIIAEYIWVGGSGIDLRSKSRTISKPVEDPSELPKWNYDGSSTGQAPGEDSEVILYPQAIFKDPFRGGNNILVICDTYTPQGEPIPTNKRHMAAQIFSDPKVTSQVPWFGIEQEYTLMQRDVNWPLGWPVGGYPGPQGPYYCAVGSDKSFGRDISDAHYKACLYAGIEISGTNGEVMPGQWEYQVGPSVGIDAXDHIWASIDPLVRPRVRAXRRALARITEQAGVVLTLDSKPIQGDWNGAGCHTNYSTLSMREDGGFDVIKKAILNLSLRHDLHIAAYGEGNERRLTGLHETASISDFSWGVANRGCSIRVGRETEAKGKGYLEDRRPASNMDPYTVTALLAETTILWEPTLEAEALAAKKLALKV

SEQ ID NO: 9542 - protein, 282 aa, Brassica napus
QKIVEKYSNSNIEIHTFNQSQYPRIVTEDFLPLPSKGKSGKDGWYPPGHGDVFPSLNNSGKLDILLAQGKEYVFVANSDNLGAIVDIKILNHLINNQNEYCMEVTPKTLADVKGGTLISYEGRVQLLEIAQVPDEHVNEFKSIEKFKIFNTNNLWVNLKAIKRLVEAEALKMEIIPNPKEVDGVKVLQLETAAGAAIRFFDKAIGINVPRSRFLPVKATSDLLLVQSDLYTLVDGFVIRNPSRANPANPSIELGPEFKKVANFLARFKSIPSIVELDSLKVF

SEQ ID NO: 9543 - protein, 374 aa, Quetzalia occidentalis
ALSIAGAVQSQKLAVRAISQLQSLPGGDIKLLCDTVVESVRDPTGYDRVMVYKFHEDEHGEVVAESKRPDLEPYIGLHYPAADIPQASRFLFKQNRVRMIVDCHATPVSVIQDDGLMQPLCLVGSTLRAPHGCHAQYMANMGSMASLAMAVVINGNDEEGIGGRNTTRLWGLVVCHHPSARGIPFPLRYACEFLLQALGLQLNMELQLAAQLSEKHVLRTQTLLCDMLLRDSPTGIVTQNPSIMDLVKCDGAALYYQGKYYPLRVTPTEAQIKGIVEWMLAFHGDSTGLSTDSLADAGYPGAASLGDAVCGMAVAYITNRDFLFWFRSNTAKEIKWGGAKHHPKDKDDGQRMHPRSSFKAFLEVVKSRSLPWEN

SEQ ID NO: 9544 - protein, 235 aa, Oryza sativa Japonica Group
MARGGGGGGGADADLYAVLGLSRECTDADLRLAYRKLAMIWHPDRCSVAGGSASAAGVDEAKERFQEIQGAYSVLSDSNKRFLYDVGVYDGNDGDDDDDEADLSGMGDFLGEMAQMMSQATPAESFEELQQLFVDMFQDDIDAGLCQSTPPPPSWPSPPAAANARSPAAAETSRKGVNKRCSPAAMDMDSGLSSLLGISGFCFEAPWTSQDASTAAGGGGGKRRKQRPPPASHNV

SEQ ID NO: 9545 - protein, 173 aa, Glycine max
  misc_feature (123)..(123): Xaa can be any naturally occurring amino acid
MEPHDETGCQAPERPILCINNCGFFGRAATMNMCSKCYKDMLLKQEQDKFAASSVENIVNGSSNGNGKQAVATGAVAVQVEAVEVKIVCAQSSVDSSSGDSLEMKAKTGPSRCATCRETWLFXTGFSCKCGNLFCAMHRYSDKHDCPFDYRTVGQDAIAKANPIIKADKLDKI

SEQ ID NO: 9546 - protein, 156 aa, Arabidopsis thaliana; identical to SEQ ID NO: 7843

SEQ ID NO: 9547 - protein, 374 aa, Quetzalia occidentalis
ALSIAGAVQSQKLAVCSISQLQSLPGGDIKLLCDTVVESVRDLTGYDRVMVYKFHEDEHGEVVAESKRPDLEPYIGLHYPATDIPQASRFLFKQNRVRMIVDCHATPVRVIQDDGLLQPLCLVGSTLRAPHGCHAHYMANMGSMASLAMAVIINVNDEEGIGGRNATRLWGLVVCHHTSTRCIPFPLRYACEFLMQAFGLQLNMELQLALQLSEKHVLRTQTLLCDMLLRDSPTGIVTQSPSTMDLVKCDGAALYHQGKYYPLGVTPTEAQIKDIVEWLLAFHGDSTGLSTDSLADAGYPGAVSLGDAVCGMAVAYITNRDFLFWFRSHTGKEMKWGGAKHHPEDKDDGQRMQPRSSFKAFLEVVKSRSLPWEN

SEQ ID NO: 9548 - protein, 218 aa, Oryza sativa
MVKLTMIARVTDGLPLAEGLDDGRDQKDADFYKQQAKLLFKNLSKGQHEASRMSIETGPYYFHYIIEGRVCYLTMCARSYPKKLASQYLEDLRNEFERVNGSQIETAARPYAFIKFDTFIQKTKKLYLDTRTQRNLAKLNDELYEVHQIMTRNVQEVLGVGEKLDQVTEMSTRLTSDTRIYADKAKDLNRQALIRKYAPVAIVIGVVLMLFWLKNKIW

SEQ ID NO: 9549 - protein, 428 aa, Medicago truncatula
MAQILAPSTQCQARITKISPVATPISSKMWSSLVMKQNKKVARSAKFRVMAVNSGTINRVEDLLNLDITPFTDSIIAEYIWIGGTGIDVRSKSRTISKPVEHPSELPKWNYDGSSTGQAPGEDSEVILYPQAIFKDPFRGGNNILVICDAYTPQGEPIPTNKRHKAAEIFSNPKVEAEIPWYGIEQEYTLLQTDVKWPLGWPVGGYPGPQGPYYCAAGADKSFGRDISDAHYKACLYAGINISGTNGEVMPGQWEYQVGPSVGIEAGDHIWASRYILERITEQAGVVLTLDPKPIEGDWNGAGCHTNYSTKSMREDGGFEVIKKAILNLSLRHKIHIEAYGEGNERRLTGKHETASINTFSWGVANRGCSIRVGRDTEKNGKGYLEDRRPASNMDPYVVTALLAESTLLWEPTLEAEALAAQKIALKV

SEQ ID NO: 9550 - protein, 374 aa, Reissantia sp. Chase 2095
ALSIAGAVQSQKLAVRAISQLQSLPGGDIKLLCDTAVESVRNLTGYDRVMVYKFHEDEHGEVVAESRRPDLEPYIGLHYPATDIPQASRFLFKQNRVRIIVDCHASPVSVIQDDGLMQPLCLVGSTLRAPHGCHAQYMENMGSIASLAMAVIINGNDEDGMGGRNPTRLWGLVVCHHTSARCIPFPLRYACEFLMQAFGLQLNMELQLAAQLLEKHVLKTQTLLCDMLLRESPTGIVTQSPSIMDLVKCDGAALYYQANYYPVGVTPTEAQIKDIVEWLLAFHGDSTGLSTDSLADAGYPGATSLGDAACGMAVAYITNRDFLFWFRSHTAKEIKWGGAKHHPEDKDDGQRMHPRSSFKAFLEVVKSRSLPWEN

SEQ ID NO: 9551 - protein, 308 aa, Francisella tularensis subsp. tularensis SCHU S4
MADYYSLLGVSRDASEADIKKAYRRLAKKYHPDVNKEKGAEDKFKEIQTAYDVLGDKEKKKLYDTYGENWDKVQQGGFGGAGGGFGGFSQSGRSQSFNFEDLGDIFGDLFGGGAGARGFGGGQPRARKGEDINISLRLNVEDAIKGGSRTVSYNYQKVGANGMPTMQHQSVDVKIPPAMGNGKKLRVKGKGGAGIGANAPAGDLYIKIEVVDHKNYKVDGNDIYEHINIAPWEAALGTSLEIDTPYGKKKMKVPEGSQSGRKMRIKGKGLGDGDFYIVYDVKLPLADTDEKKEFYKQMQEKMNFNPRA

SEQ ID NO: 9552 - protein, 412 aa, Pachysandra americana
SGKPFYAIMHRIDVGLVIDLEPVNPADVPVTAAGALKSYKLAAKAISKLQSLPSGNISLLCDVLVKEVNELTGYDRVMVYKFHEDEHGEVVAECRRTDLEPYLGLHYPATDIPQASRFLFLKNKVRMICDCLAPPIRVIQDKRLEQPLSLCGSTLRAPHGCHAQYMENMGSIASLVMSVTINEDDDDDDVESDQQKGRKLWGLVVCHHTSPRFVPFPLRYACEFLIQVFGIQINKEVELAAQTKEKHILRNQTMLCDMLLRESPVGIVTKSPNVIDLVKCDGAALYYKNKFWLLGVTPTEAQIRDISEWLIEYHNGSTGLSTDSLMEAGYPGASVLGDAVCGMAAIKITSKEFLFWFRSQTAKEIKWGGAKHEPFNKDDARKMHPRSSFKAFLEAVKQRCLPWEDVEMDAIQ

SEQ ID NO: 9553 - protein, 374 aa, Reissantia indica
ALSIAGAVQSQKLAVRAISQLQSLPGGDIKLLCDTAVESVRNLTGYDRVMVYKFHEDEHGEVVAESRRPDLEPYIGLHYPATDIPQASRFLFKQNRVRIIVDCHASPVSVIQDDGLMQPLCLVGSTLRAPHGCHAQYMENMGSIASLAMAVIINGNDEDRMGGRNPTRLWGLAVCHHTSARCIPFPLRYACEFLMQAFGLQLNMELQLAAQLLEKHVLKTQTLLCDMLLRESPTGIVTQSPSIMDLVKCDGAALYYQANYYPLGVTPTEAQIKDIVEWLLAFHGDSTGLSTDSLADAGYPGATSLGDAVCAMAVAYITNRDFLFWFRSHTAKEIKWGGAKHHPEDKDDGQRMHPRSSFKAFLEVVKSRSLPWEN

SEQ ID NO: 9554 - protein, 299 aa, Zea mays
MAVARPLAPFQLIAVLSLALLVTSHAGGIAVYWGQNTGEVTLSATCASRRYQFVILAFVSQFGEGRAPRLDLSGHCDDASSGGCSGLSDDIRSCQRRGVKVLLSIGGGEGRYGLSSPADARLVAAYLWNTFLGGTSSSRPLGDAVLDGIDFDIELGRAKFWDNLARDLKDMGKDGDKAVLLSAAPQCPFPDQWDGAAINTGLFDYVWVQFYNNPECQFSSGRNAFLDAWKQWESVPAGQIFLGLPASKDAAGTGFVPAGQLTSQVLPLIKGSPKYGGVMLWSKFYDDRTGYSSAIKSHV

SEQ ID NO: 9555 - protein, 554 aa, Pleea tenuifolia
  misc_feature (346)..(346): Xaa can be any naturally occurring amino acid
DLEPVNPADVPVTAAGALKSYKLAAKAISKLQSLPTGNISLLCDVLVREVSDLTGYDRVVAYKFHEDEHGEVIAECRRSELEPYLGLHYPATDIPRASRFLFMKNKVRMICDCSAAPVKVIQDKRLAQPLSLCGSILRAPHGCHAQYMASMGSVASLVMSVTIIEDDNETGSDQQEKGRKLWGVVVCHHTSPRFIPFPLRYACEFLIQVFCMQLTKEVELADQMREKHILQTQTVLCDMLLRDAPVGIFTQSPNVMDLVKCDGAALYYRNQFWLLGISPREAQIRDIAGWLLEYHDGTTGLSTDSLLDAGYPGASALGDEVCGMAAIRITDKDFLFWFRSHTAKEXTWGGAKHDLVEKDSDGRKMHPRSSFKAFLEVVEGRSLPWEDVEMDAIHSLQLILRDSLQGERASIDSKAIVNAPLDDAKKIQGMDELSLVTNEMIRLIETAAVPILAVDVLGNVNGWNIKAAELTGLVVQQAIGMPLIDLVEGDSIDVAKNMLFLALQGKEERDVEIKLKTFGHQEKNGPKILVVNACCSRDMKEDIVGVCFVAQDVT

SEQ ID NO: 9556 - protein, 297 aa, Oryza sativa Japonica Group
MASRALTPMQLIGTVFVALLATCHAGGIAVYWGQNDGEASLAETCASGNYEFVIIAFLPKFGKGQTPRVDLASHCDPASGGCTGQSKDIRACQRRGVKVLLSIGGGDGSYGLSSPGDARQVAMYLWNNFLGGSSSSRPLGDAVLDGIDFDIELGGAKFWDDLARDLKSLGRSGGRRVVLSAAPQCPFPDEWDGGAISTGLFDAVWVQFYNNPECQFSAGRGAFMDAWRKWESVPAGRLFLGLPASKDAAGTGFVPAGELNSRVLPLIRGSPKYGGVMLWSKYYDDQTGYSSAIKSHV

SEQ ID NO: 9557 - protein, 467 aa, Pseudowintera axillaris
SGKPFYAIIHRVTGSLIVDFEPVKPYESPMAAAGALQSYKLTAKAISRLQSLPGGSLKRLIDTVVQGVFELTGYDRVMAYKFHEDDHGEVISEVTKPDLEPYLGLHYPATDIPQAARFLFMKNKVRMICDCNAKPMKVYQDEKLTFDLTLCGSTLRAPHSCHLQYMENMGSIASLVMAVVINEREEKDENSGSEQQQEQPKRKRLWGLVVCHNTTPRFVPFPLRYACEFLAQVFAIHVNKELELENQIQEKNILRTQTLLCDMLMRAAPLGIVTQSPSILDLVKCDGAVLLYQNKIWRLGIAPTESQILDIALWLSEYHMDSTGLSTDSLHDAGYPGALSLGDVVCGMAAVRINSKDTLFWFRSHTAAEIRWGGAKHDPNQKDDGRKMHPRSSFKAFLDVVKTRSSPWADYEMDATHSLQLILRGSLKEAEKVDTGTMIHSRLNDLKLEGVVELQAVTNQMVRLMET

SEQ ID NO: 9558 - protein, 305 aa, Oryza sativa Japonica Group; identical to SEQ ID NO: 9243

SEQ ID NO: 9559 - protein, 304 aa, Triticum aestivum
MAPLAPGRPPACLLTLLSVVAALSLAAPGLAAGKTGQVTVFWGRNKAEGSLREACDSGMYTMVTMSFLDVFGANGKYHLDLSGHDLSAVGADIKHCQSKGVPVSLSIGGYGARYSLPSNRSALDLFDHLWNSYFGGSKPSVPRPFGDAWLDGVDLFLEHGTPADRYDVLALELAKHNIRGGPGKPLHLTATVRCGYPPAAHVGRALATGIFERVHVRTYESDKWCNQNLGWEGSWDKWTAAYPATRFYVGLTADDKSHQWVHPKNVYYGVAPVAQKKDNYGGIMLWDRYFDKQTNYSSLIKYYA

SEQ ID NO: 9560 - protein, 297 aa, Oryza sativa Japonica Group
MANKSSLLQLLLIAAVASQFVSSQAGSIAIYWGQNNGEGTLADTCATGNYKFVNIAFLAAFGNGQPPVFNLAGHCDPTNGGCASQSSDIKSCQSRGVKIMLSIGGGAGSYYLSSSEDAKNVATYLWNNFLGGQSSSRPLGDAVLDGIDFDIEGGTNQHWDDLARYLKGYSNSGRRVYLTAAPQCPFPDACIGDALNTGLFDYVWVQFYNNPPCQYSSGSTSNLADAWKQWLSVPAKQIFLGLPASPQAAGSGFIPADDLKSQVLPVIKSSGKYGGIMLWSKYYDDQDDYSSSVKSDV

SEQ ID NO: 9561 - protein, 395 aa, Pseudowintera axillaris
  misc_feature (154)..(154): Xaa can be any naturally occurring amino acid
DLEPVNPADVPVTAAGALKSYKLAAKAISKLQSLPSGNISLLCDVLVREVSELTGYDRVMTYKFHEDEHGEVIAECRRNDMEPYLGLHYPATDIPQASRFLFMKNKVRMICDCTARPVEVIQDKKLAQPLSLCGSTLTAPHGCHAQYMANMGSXASLVMSVTISEDDDEASSEEHRQKGRKLWGLVVCHHMTPRFVPFPLRYACEFLIQVFGIQLNKEVELAAQLREKNMLRTQTMLCDMLLRDAPVGIVTQSPNVMDLVKCDGAALYYRNQFWLLGTTPTEVQIRDIAEWLLEYHNNTTGLSTDSLMEAAYPGASILGDAVCGMAAVKITNKDFLFWFRSHTAKEIKWGGAKHDPSDKDGDGRKMHPRSSFMAFLDVVKRRSLPWEDVEMDAIQ

SEQ ID NO: 9562 - protein, 1125 aa, Ceratodon purpureus
  misc_feature (299)..(299): Xaa can be any naturally occurring amino acid
MTSTKLSYSSGASVKSKHSVRVAQTTADAKLFAVYEESNNSGDSFDYSKSVGQAAKPAVQAQVPAQAVTAYLQRMQRGGLTQTFGCMIAVEENTFRVIAYSENAPELLDLMPQAVPSVGQQEVLGIGTDARSLFTPSSVAALERAASTHDLTMVNPISVHTRSSGKPFYAIVHRIDVGVVMDFEPVRPNDVVISTAGTLHSHKLAAKAIARLQSLPGGDIGLLCDTVVEEVRELTGYDRVMAYKFHDDEHGEVLAEIRRSDLESYLGLHYPSTDIPQASRFLFMKNRVRMIADCCAPPXKVIQDKDLRQPVTLAGSTLRAPHGCHAQYMGNMGSVASITLAVIVNDQEDDFGVQQKGRRLWGLVVCHHTSARTISYPLRCACEFLMQVFGLQLNMEVELQAQMREKHILRTQTLLCDMLLRDAPIGIVSQSPNIMDLVKCDGAALYYNDRFWLLGITPSEQQIKDVAEWLLENHKDSTGLSTDSLADAGYPSANLLGDAVCGMAAARISPSDFLFWFRSHTAKEIKWGGAKQEADEKDDGRKMTPRSSLNAFLEVVKRRSLPWEDIEMDAIHSLQLILRGSFQEIDGDSSKSMIHARLHDMKLQGMDELSTVANEMVRLIETATAPILAVDSNGFINGWNAKVAELTGLPVGDAMGRSLVNDLILDESVEVVERLLYLALQGEEEQNIEVQLRTFGPQKSKGAVILIVNACSSRDVQENVVGVCFVGQDVTGQKMVHDKFTRIHGDYKSIVQNPNPLIPPIFGSDELGSCTEWSPSMEKLTGWKREEVLGKMLVGEVFGMQQMCCRLKGQDAVTKFMIVINNAMDGQDTDKYPFSFFDRNGKFVEALLTANKRTDADGYITGVFCFLHIASPELLQALTVQRATEKVAFAKLKELAYIRQEIKNPLYGIMFTRNLMEDTDLSDEQKQFMDTSAVCERQLRKILDDMDLESIEDGYLELETAEFEMGSMMDAVVSQGMVTSREKGLQLIRETPREIKNMCLFGDQVRLQQVLADFLLNAVRFTPSSEGWVGIKVVPTKKRLGGGFHVVHLEFRVTHPGSGLPEELVHEMFDRGRGMTQEGLGLSMCRKLVKLMNGEVKYIRDTGKSYFLVNLELPLTVRDDAGSVR

SEQ ID NO: 9563 - protein, 441 aa, Pteridophyllum racemosum
  misc_feature (157)..(157): Xaa can be any naturally occurring amino acid
PYEVPMTAAGALQSYKLAAKAIAKLQPLHSGNMERLCDTVVQEVFDLTGYDRTMAYKFHDDDHGEVISEVTKPGLEPYLGLHYPATDIPQAARFLFMKNKIRMICDCNAKQVKVLQDEKIPFDLTLCGSTLRAPHTCHLLYMKNMGSAASLVMAIVXNEGDEEEEASGPSQPQKKKRLWGLVVCHNTTPRFVPFPLRYACEFLLQVFAIHVNKEFELENQILEKNILRTQTLLCDMLMRDAPLGILSQSPNIMDLVRCNGAALLYKNKIHRLGLTPSDFQIHDIASWLSEHHMDSTGLSTDSLYDAGFPGALSLGDQVCGMAAVRITSKDMLFWFRSHTAAEVRWGGAKHNPSEEDDGRKMHPRSSFKAFLEVVKTRSSPWRDYEMDAIHSLQLILRNAFKDAETADLNATVIHSGLNNLKIEGMEELEAVTNEMVRLIET

SEQ ID NO: 9564 - protein, 261 aa, Desulfotalea psychrophila LSv54
MKNYYEILGLDKDCTSDELRRKYRKLAMKYHPDQNPDNPEFQEKFKEIAEAYGVLSDSKKRQEYDRFGAAGGGFGAGTTGFSYSQEEIFRDLFNDPQFQQMFSTILGEFQKSGLRSNPEFVQKSFFGKRGGMFLGGVMFLGSLAGQVAKAKIKEKLPNKETVMRSLGRRVGNFLGYGEEKKKVAEQLPLSGDIAYTLELSLEEMRVGKTVEISVPHSGGEEHFKVQVPAGSTVGQKLRLRGRGAESSQGRGDLYLELGLPG

SEQ ID NO: 9565 - protein, 196 aa, Arabidopsis thaliana
  misc_feature (182)..(182): Xaa can be any naturally occurring amino acid
MEREDLYAVLDLNNECTQGDLRLSYKNLVLKWHPDRFLEEIEKDEAKMKFQSIQRAYSVLSDSNKRLLYDVGAYDSDDDETGMADFINEMVTLMAQTQSTGDESLEEFEELFQELLKDDVNQFKTRSSSSSCSQFSGTSTLVHCDDLSNSNDIPNKINGHDNYCCISSSKVLIQNYHETDVXPSTRFQAGNRRSKK

SEQ ID NO: 9566 - protein, 376 aa, Deinococcus radiodurans
  misc_feature (78)..(78): Xaa can be any naturally occurring amino acid
MDYYELLGVSRTASADEIKSAYRKLALKLHPDRNKEEGAAEKFAQVSEAYSVLSDTEKRAHYDRFGSAPGAGMPGGDXFGGMGGMGGVGFDPMDIFEQLFGGAAGMGGRGRRGPARGDDLETEVRITLEQARAGEEVEVTVDRLTECEHCHGTRTEPGGKPPVTCSTCNGSGAVRGQARTIFGVVETQQVCPTCKGDGKMVVDPCTVCHGRGRTLKSEPVKVKLPKGIDEGYRIRVAGQGNEGPGGNGDLYVHIEMEPHPELHRQDENLIFPARIGFATAALGGRIQVPTLDGPQEVEVKPGTQHGELHRLRGQGMPRLQGAGTGDLIVDYEIVVPKHLNAEAKDALQAYARAVGDEVPEEHEGLFGKIGKLFGRD

SEQ ID NO: 9567 - protein, 429 aa, Spiraea nipponica
MAHILAPTTQWQTRITKNATSASPMTAKMWGSLLLKQNKKGPTKTSTKFRVLAVKSEGYTINRLEGLLNLDLTPFTDKIIAEYIWIGGTGVDVRSKSRTISKPVEHPSELPKWNYDGSSTGQAPGEDSEVILYPQAIFKDPFRGGNNILVICDAYTPQGEPIPTNKRAKAAEIFAKQKVIDEVPWYGIEQEYTLLQTDVKWPLGWPVGGYPGPQGPYYCGAGADKSFGRDISDAHYKACLYAGINISGTNGEVMPGQWEYQVGPSVGIEAGDHIWASRYILERITEQAGVVLTLDPKPIEGDWNGAGCHTNYSTKSMREEGGFEVIKKAIHKLSLRHKEHISAYGEGNERRLTGKHETASINTFSWGVANRGCSIRVGRETEKQGKGYLEDRRPASNMDPYIVTGLLAETTLLWEEAEALAATKLEQNV

SEQ ID NO: 9568 - protein, 224 aa, Gazania splendens
GYPGPQGPYYCGAGADKSFGRDISDAHYKACLYAGINISGTNGEVMPGQWEFQVGPSVGIEAGDHIWCARYLLERITEQAGVVLTLDPKPIDGDWNGAGCHTNYSTLAMREDGGFEVIKKAILNLSLRHMEHISAYGEGNERRLTGKHETASINTFSWGVANRGCSIRVGRDTEKAGKGYLEDRRPASNMDPYTVTGLLAETTLLWEPTLEAEALAAQKLALNV

SEQ ID NO: 9569 - protein, 347 aa, Oryza sativa Indica Group
MAAPRWIGPLLLLLLHFVATVAGKSYYDVLQVPKGASEDQIKRSYRKLALKYHPDKNPNNEEANKRFAEINNAYEILTDQEKRKIYDRYGEEGLKQFQAQGGRGGGGGMNIQDIFSSFFGGGGGGMEEEEEQIIKGDDVIVELDASLEDLYMGGSLKVWREKNVIKPAPGKRRCNCRNEVYHRQIGPGMYQQMTEQVCDQCANVKYVREGDFLTVDIEKGMQDGQEVSFFEEGEPKIDGEPGDLKFRIRTAPHERFRREGNDLHTTVTISLLQALVGFEKTIKHLDNHMVEIGTKGITKPKEVRKFKGEGMPLYQSNKKGDLYVTFEVLFPKTLTDDQKSKLKSILT

SEQ ID NO: 9570 - protein, 328 aa, delta proteobacterium MLMS-1
MDYYKVLGLEKNAKPEDIKKAYRKLALKYHPDHNQGNKEAEAKFKEISEAYAVLSDPEKRQQYDTHGSAGFQQRYSQEDIFRNADINDILREFGINLGGGRATFRSGGGFFDDLFGVGGSGGMGGAGGRGGQGREFHFFRQGGAPGGGQQQMVKGNDLSLELPVSLEDVLKGAEKTIALGQQGGTAGQKVSIKIPAGIEDGKKLRLSGKGAPSPLGGPPGDLLLLIRIQPHPTFSREGNNLVVDKEIPISAALLGSELAVPTLEGRKLKVKVPPGSKPGSRLRLKGHGLPSGPRGSKGDLLVRINLAIPGKLSDQQKELARQLAAAGL

SEQ ID NO: 9571 - protein, 245 aa, Rzedowskia tolantonguensis
ALSIAGAVQSQKLAIRAISQLQSLPGGDIKLLCDTVVESVRELTCYDRVMVYKFHEDEHGEVVAESKRPDLEPYIGLHYPATDIPQASRFLFKQNRVRMIVDCHASPVRVIQDDGLMQPLCLVGSTLRAPHGCHAQYMENMGSKASLAMAVIINGNDEEVIGGRNATRLWGLVVCHHTSARCIPFPLRYACEFLMQAFGLQLNMELQLAAQLSEKHVLKTQTLLCDMLLRDSPTGIVTQSPSIMD

SEQ ID NO: 9572 - protein, 44 aa, Zea mays
  misc_feature (10)..(10): Xaa can be any naturally occurring amino acid
RIDKEYGCNXPLLLMNSFNTHDDTQKIVEKYSNSNIEIHTFNQS

SEQ ID NO: 9573 - protein, 432 aa, Vitis vinifera
MTLVYLKLCFLLFSFFFEWKIMGHSTLSFFSFIDVVENAVNHRNRLLFGVLNANWGAARWIHGTAYMAANDYYDTLGVSKNASASEIKKAYYGLAKKFHPDTNKEDPDAEKKFQEVQKAYEVLKDEEKRSLYDQVGHDAFEQANTEGGAGNPFHGGGFGNPFEDIFQNDVRTFLNTIFKQNIGGQDVKVSIELSFMEAVQGCTKTVTFQTALPCEACGGSGVPPGTKPETCKRCRGSGMMFMQNGPFRLQSTCTHCGGTGKTVSTFCKSCKGDRVVRGSKSVKLDIMPGVDDNETLKVYRSGGADPEGNQPGDLYVTIRVRQDPVFRREGPDIHVDAVLSITQAILGGTIQVPTLTGDVVLKVRPGTQPGQKVVLKRKGVKGRNSLSFGDQYVHFNVSIPSNLTQRQRQLIEEFAKEEQGEYDKGAAAGASG

SEQ ID NO: 9574 - protein, 245 aa, Salacia impressifolia
ALSIAGAVQSQKLAVRAISQIQSLPGGDIKLLCDTVVESVRDLTGYDRVMVYKFHEDEHGEVVAESKRPDLEPYIGLHYPATDIPQASRFLFKQNRVRMVVDCNASPVRVIQNDGLMQPLCLVGSTLRAPHGCHAQYMENMGSIASLAMAVIINGNDEEVIGGRNPTRLWGLVVCHHTSARCIPFPLRYACEFLMQAFGLQLKMELQLAAQLLEKHVLKTQTLLCDMLLRDSPTGIVTQSPSIMD

SEQ ID NO: 9575 - protein, 245 aa, Salacia impressifolia
ALSIAGAVQSQKLAVRAISQIQSLPGGDIKLLCDTVVESVRDLTGYDRVMVYKFHEDEHGEVVAESKRPDLEPYIGLHYPATDIPQASRFLFKQNRVRMIVDCNASPVRVIQDDGLMQPLCLVGSTLRAPHGCHAQYMENMGSIASLAMAVIINGNDEEVIGGRNPTRLWGLVVCHHTSARCIPFPLRYACEFLMQAFGLQLKMELQLAAQLLEKHVLKTQTLLCDMLLRDSPTGIVTQSPSIMD

SEQ ID NO: 9576 - protein, 461 aa, Pteridophyllum racemosum
SGKPFYAILHRIDVGFVIDLEPVNPLDVPVTAAGALKPYKLAAKAISRLQSLPSGNISLLCDVLAREVSELTGYDRVMVYKFHEDEHGEVVSECRKIDLESYRGLHYPATDIPQASRFLFMKNRARIICDCSATPVKVIQDEKLAQPLSLCGSTLRAPHGCHAQYMANMGSIASLVMFVTINDDDDDIKIETHKGRKLWGLVVCHHTSSRFVPYPLRYACEFLIQVFGIQLNKEVELAVQSREKRILRTQTLLCDMLLRDSPVGIVTQSPNVMDLVRCDGAALYFRNKFWLLGVPPTEKQIRDIVGWLMEHYVGTTGLSTDSLMEAGYPDSSVLGDAVCGMAAINFTSKDFLFWFRSQTAKELKWGGAKHDPVDMDDVRKMNPRSSFNAFLEVVKWRSLPWEDVEMDAIHSLQLILRESMKNEIVNDVKTIVNTTPVIDARLRGMDQLCVVTGEMVSLMET

SEQ ID NO: 9577 - protein, 361 aa, Salacia nitida
QSQKLAVRAISQIQSLPGGDIKLLCDTVVESVRDLTGYDRVMVYKFHEDEHGEVVAECKRPDLEPYIGLHYPATDIPQASRFLFKQNRVRMIVDCHASPVRVIQDDGLMRPLRLVGSTLRAPHGCHAQYMENMGSIASLAMAVIINGNDEEVIGGRNPTRLWGLVVCHHTSARCIPFPLRYACEFLMQAFGLQLKMELQLAAQLLEKHVLKTQTLLCDMLLRDSPTGIVTQSPSIMDLVKCDGAALYFQGNYYPLGVTPTEAQIKDIVEWLLAFHGDSTGLSTDSSADAGYPGAALLGDAVCGMAVAYITNRDFLFWFRSHTAKEIKWGGAKHHPEDKDDGQRMHPRSSFKAFLEVVKRRS

SEQ ID NO: 9578 - protein, 464 aa, Sarcandra glabra
SGKPFYAIIHRVTASLIIDFEPVKPYEVPMTAAGALQSYKLAAKAIARLQSLPGGSMEKLCDTVVQEVFDLTGYDRVMAYKFHEDDHGEVISAITKPGLEPYLGLHYPATDIPQAARFLFMKNKVRMICDCDAKPVKVFQDEKLVFDLTLCGSTLRAPHSCHLQYMANMNSIASLVMAVVVNEGEEDDSLEPGQQQQRKRKRLWGLIVCHNTTPRFVPFPLRYACEFLMQVFAIHVNKELELESQIQEKNIFRTQTLLCDMLMRDTPLGIVSQNPNVMDLVKCDGAALLYKKKIWRLGLTPSETQIHDISFWLSEYHMDSTGFSTDSLNDAGYPGALAIGDAVCGMAAVWITSKDMLFWFRSHTAAEVRWGGAKHDPDDKDDNRGMHPRSSFKAFLEVVKTRSLPWKDNEMDAIHSLQLILRGTFKDVENSHTKTMIYSQLNDLKLEGMEELQAVTNEMVRLIE

SEQ ID NO: 9579 - protein, 465 aa, Sarcandra glabra
SGKPFYAIMHRIDVGPVIDLEPVNPADVPVTAAGALKSYKLAAKAISRLQSLPSGNISLLCDVLVREVSELMGYDRVMAYKFHEDEHGEVIAECRRSDLEPYLGLHYPATDIPQASRFLFMKNKVRMICDCSAAPVKVIQDKRLGQPMSLCGSALRAPHGCHAQYMANMGSIASLVMSVTINEDDDETESDPQQQQEKPRKLWGLVVCHHTGPRFVPFPLRYACEFLIQVFGIQLNKEVELAAQLREKHMLKTQTVLCDMLLRDAPMRIVTQSPNVMDLVKCDGAALYYRNQFWLLGTTPTEAQIRDIAEWLLDYHDGSTGLSTDSLMEAGYPGASVLGDAVCGMAAVKITSKDFLFWFRSHSAKEIKWGGAKHDPINKDDDGRKMHPRSSFKAFLEVMKQRSLRWEDVEMDAIHSLQLILRGSLQEESENDSKAIVNASLDVAKIQGMDELRFVTNEMVRLIET

SEQ ID NO: 9580 - protein, 423 aa, Smilax rotundifolia
SGKPFYAIVHRVTGCLIIDFEPVTPTEVPMPAAGALQSYKLAAKAIAKLQSLPGGSMEGLCSTVVQEVFELTGYDRVMAYKFHEDDHGEVFAEITKPGLEPYRGLHYPATDIPQAARFLFMKNKVRMISDCRAKPVKVYQDEKLPFDITFCGSTLRAPHSCHLQYMENMNSIASLVMVVVINEGEEDEEQGQQQHNRKRLWGLVVCHHESPRFVPFPLRYACEFLMQVFAIHVNKEFELENQIREKNILRTQTLLCDMLLRDSDPLGIVTQSPNIMDLVKCDGAALLYENEIWQIGLTPTESQIREIAFWFAEFHADSTGLSTDSLYDAGYPGAVALGDTVSGMAAARITSTDILFWFRAHTAAEIRWGGAKHDPSDKDDGKRMHPRSSFNAFLEVVKGRSLPWNNYEIDAIHSLQLILRGTL

SEQ ID NO: 9581 - protein, 287 aa, Cucurbita moschata
MAALLVMFLLAASIFRSSHAAGIAIYWGQNGNEGSLASTYATGNYQFVNVAFLSSFGNGQSPVLNLAFHCNPDNNGCAFLSSEINACQSQGVKVLLSIGGGAGSYSLSSADDAAQVANFIWNNYLGGQSSSRPATDAVLDGADFDIEAGSGQFWDELGPKLKGLGQVIISAAPQCPIPDAHLDTAIKTGLFDFVWVQFYNNPPCMFTDGNTNNLLNSWNQWSTFPAGKLIMGLPAAPEAAPNGGFIPSDVLISQILPTIKSTSNYGGVMLWSKFFDNGYSDAIKGSI

SEQ ID NO: 9582 - protein, 1132 aa, Zea mays
MSSSRPAHSSSSSSRTRQSSRARILAQTTLDAELNAEYEESGDSFDYSKLVEAQRSTPPEQQGRSGKVIAYLQHIQRGKLIQPFGCLLALDEKSFRVIAFSENAPEMLTTVSHAVPNVDDPPKLGIGTNVRSLFTDPGATALQKALGFADVSLLNPILVQCKTSGKPFYAIVHRATGCLVVDFEPVKPTEFPATAAGALQSYKLAAKAISKIQSLLGGSMEALCNTVVKEVFDLTGYDRVMAYKFHEDEHGEVFAEITKPGIEPYIGLHYPATDIPQAARFLFMKNKVRMICDCRARSVKIIEDEALSIDISLCGSTLRAPHSCHLKYMENMNSIASLVMAVVVNENEEDDEPEPEQPPQQQKKKRLWGLIVCHHESPRYVPFPLRYACEFLAQVFAVHVNKEFELEKQIREKNILRMQTMLSDMLFKESSPLSIVSGSPNIMDLVKCDGAALLYGDKVWRLQTAPTESQIRDIAFWLSEVHGDSTGLSTDSLQDAGYPGAASLGDMICGMAVAKITSKDILFWFRSHTAAEIKWGGAKHDPSDKDDNRRMHPRLSFKAFLEVVKTKSLPWSDYEMDAIHSLQLILRGTLNDASKPAQASGLDNQIGDLKLDGLAELQAVTSEMVRLMETATVPILAVDGNGLVNGWNQKVAELSGLRVDEAIGRHILTLVEDSSVSLVQRMLYLALQAGREEKEVRFELKTHGSKRDDGPVILVVNACASRDLHDHVVGVCFVAQDMTVHKLVMDKFTRVEGDYKAIIHNPNPLIPPIFGADQFGWCSEWNAAMTKLTGWHRDEVVDKMLLGEVFNSSNASCLLKSKDAFVRLCIVINSALAGEEAEKASFGFFDRNEKYVECLLSVNRKVNADGVVTGVFCFIHVPSDDLQHALHVQQASEQTAQRKLKAFSYMRHAINKPLSGMLYSRETLKSTGLNEEQMRQVRVGDNCHRQLSKILADLDQDNITDKSSCLDLDMAEFVLQDVVVSAVSQVLIGCQAKGIRVACNLPERSMKQRVYGDGIRLQQIVSDFLFVSVKFSPAGGSVDISSKLTKNSIGENLHLIDFELRIKHRGAGVPAEILSQMYEEDNKEQSEEGFSLAVSRNLLRLMNGDIRHLREAGMSTFILTAELAAAPSAVGR

SEQ ID NO: 9583 - protein, 394 aa, Smilax rotundifolia
DLEPVNPADVPVTAAGALKSYKLAAKAISRLQSLPSRNISLLCDVLVREVSELTGYDRVMAYKFHEDEHGEVISECRRSDLEPYLGLHYPATDIPQASRFLFMKNKVRMICDCSAASVKVIQDKKLAQPLSLGGSTLRAPHGCHAQYMANMGSIASLVMSVTINEDDEEMDGDQQQKGRKLWGLVVCHHTSPRFVPFPPRYACEFLLQVFGIQLNKEVELAAQAKGKHIFWMQTLLCDMLLRDAPIGIFTQSPNVMDLVKCDGAALYYRKQFWLLGITPTEAQIKDIVAWLLECHDGTTGLSTDSLTEAGYPGSSALGNAICGMAAIKITSKDFIFWFRSHTSKDIRWGGAKHEPADRDDESQKMHPRSSFKAFLEVVKLRSLPWEDMEMDAIQ

SEQ ID NO: 9584 - protein, 369 aa, Cryptococcus neoformans var. neoformans JEC21
MLPTTLFFLLTLALLGGCLAESLYNVLGVRKDASDADIKKAYRKLSKKYHPDINPDEAAHEKFIQVSKAYEVLSNSETRTIYDRHGEQGLKQHEAQKSGGSQDPFARFFGGGAAQEQKGPGLITNVEVSLADLYTGRTLEFQIPRRVICPHCHGSGAESEKDIHSCNKCGGQGVVVQRHQVFPGMFTNVQMTCPHCNGKGKQITRSCHVCHSEKTVQTQHTLALHIPAGAPEGFEEVFHGEADEQIDMEAGDVVVRVRSKLNEGEGAWRRKENGILGRVTLSVAEALLGFERRLTHLDGRTITLSRTGTTQPGEVEVIEGEGMPSYMDIPPGDMFIEYSVVFPTAVSSETRQKLSDILKYAPPVHHDEL

SEQ ID NO: 9585 - protein, 288 aa, Rhizobium leguminosarum
FTIAQPFDAFPTLEQLPLWGFDGSSTQQAEGRSSDCVLKPVAIYPDPARTNGALVMCEVMMPDGVTPHASNARATILDDEDAWFGFEQEYFFYQNGRPLGFPEQGYPAPQGPYYTGVGYSNVGDVAREIVEEHLDLCLAAGINHEGINAEVAKGQWEFQIFGKGSKKAADQIWMARYLLQRLTEKYGIDIEYHCKPLGDTDWNGSGMHCNFSTKYMREVGGKAYFEALMAQFEKNLMDHINVYGPDNDKRLTGKHETAPWNKFSYGVADRGASIRVPHSFVKNDYKGY

SEQ ID NO: 9586 - protein, 380 aa, Erythrobacter sp. NAP1
MATQTDYYSLLEVSRDADGSTIKSAYRKLAMKWHPDRNPGNAEAEAKFKACNEAYECLKDPQKRAAYDRFGHEAFTQGMNGGGGPGGGHGPDGFADIGDIFETIFGSAFGGGGMGAQRQRQRRGADLRYDMQVTLDEAFHGKSTEIEIEVSQSCDTCDGSGAAPGTSERTCNLCHGQGSVRAKQGLFVVERPCPTCGGRGQVIEDPCGDCRGEGRVDKAQALQVDIPPGVDTGTRIRLSGKGEAGQRGAPPGDLYIFVHVKEHPLFEREGTTLATRVPISFTTAALGGSVDIPDLDGSTNTVDIPVGIQSGKQLRVRGAGMPVLQGRGRGDLVVEVKVETPTKLSRKQREILEQFRDTETGEECPESRSFFSKIKEAFGG

SEQ ID NO: 9587 - protein, 378 aa, Dechloromonas aromatica RCB
MSKRDFYEILGVNRDASDDEIKKAYRKLAMKHHPDRNPDNPGAEEKFKEAKEAYEILSDSQKRAAYDQFGHAGVEQGGMGGGGFGGGGGGFADAFGGIFDEIFGGRAGGSGGGRSNIYRGADLRYNLEITLEQAAHGTETKIRIPTMEVCEPCNGSGAKAGTQPKTCPTCGGSGQVRLQQGFFSIQQTCHKCHGTGRFIADPCKSCDGAGRIKQHKTLAVKIPAGVDEGDRIRLSGEGEHGVNGGPPGDLYVQIHLKPHAVFTRDHNDLHCEMPISFTAAALGGEIEIPTLDGAAAIKIPAETQSGRVFRLRGKGIKGVRSHTHGDLMCHVVVETPVNLTERQKELLRELEESSKDNSGKHNPRSKSWMDKVKDFFAE

SEQ ID NO: 9588 - protein, 500 aa, Triticum aestivum
MRIPRRKAGVPLGVPSRRAQIAAVFALAVLLGVSVLYDSAHIAASLRRHSGYNRLSPTREAPAGAGPRATPAQAVESAGAATDRTDPPPRLGAEGVSKSNPGTAADGSSPETGVLKEVVAEGGEATCDMYKGRWVHDEENAPMYKESDCEFLTEQVTCMRNGRRSDEYQKWRWQPDACDLPRFDAKLLLEKLRNKRMMFVGDSLNRNQWESMVCLVQSVAPWDKKKLVKNGSLNVFRLNEYNATIEFYWAPFLVESNSDDPDIHSITDRMITPTSIAKHAANWIGVDYLIFNTYIWWMNTPKMKIVPDGSFTRKPVKYDELDRVVAYRQILETWSGWVEENVDPKRTMVLFMSVSPVHMQSEGWGSPDNIKCFSETQPVLNYTKTLDVGTDWDLFTESHEVTKAMKKVPVHFINITALSEIRKDAHTSVHTLRRGKILRNEQNANHASIASESNGASMAGGHREGLPCTGTLRGPVERGRSRMTGTSDHDHIRAPKPAAG

SEQ ID NO: 9589 - protein, 1126 aa, Physcomitrella patens
MSTTKLAYSSGSSVKSKHSVRVAQTTADAKLQAVYEESGDSGDSFDYSKSVHASKSTGENVPALAVTAYLQRMQRGGLVQTFGCMLCVDESSFRVIAYSENAPEMLDLMPQAVPSVGQQEVLGIGTDARTLFTPSSAAALEKCAGAVDVTMLNPISVHCRSSGKPFYAILHRIDVGLVIDFEPVRPNDAVVSSAGALQSHKLAAKAISRLQALPGGDIGLLCDTVVEEVRQLSGYDRVMAYKFHEDEHGEVLAEIRRSDLEPYLGLHYPATDIPQASRFLFMKNRVRMIGDCYAPPVKVVQDKDLRQPISLAGSTLRAPHGCHAQYMGNMNSIASLVMAVIVNDPDEDPNSRGGQQRGRKLWGLVVCHHTSPRTVSFPLRSACEFLMLVFGLQLNMEVELAAQLREKHILRTQTLLCDMLLRDAPIGIVSQSPNIMDLVKCDGAALYYGKRFWLLGITPNEVQIKEIADWFLEHHQDSTGLSTDSLADAGYPGAAQLGDAVCGMAAAKITPRDFLFWFRSHTAKEIKWGGAKHDPDEKDDGRKMHPRSSFKAFLEVVKRRSLPWEDIEMDAIHSLQLISRGSFQDIDDSDTKTMIHARLNDLKLQGMDELSTVANEMVRLIETATAPILAVDSSGFINGWNAKVAELTGLPVGEAMGRSLVKDLILEESIDVVQRLLYLALQGEEEQNIEIQLKTFGPQKEKGAVILIVNACSSRDVQDNVVGVCFVGQDVTGQKQVLDKFTRIQGDYKAIVQNPNPLIPPIFGTDEYGYCSEWNPSMEKLTGWKREEVLGKLLVGEIFGMQLMCCRLKGQDAMTKFMIALNSAMDGQDTDRFPFSFFDRQGKYVDALLTVNKRTDAEGSITGVFCFLHTTSVELLQALTVQRATEKVAFAKLKELAYIRQEIKNPLYGIMFTRNLMEDTDLSEDQRQFVETSAVCERQLRKVLDDMDLESIEDGYLELDTNEFVMGTVMDAVVSQGMITSREKGLQLIRETPREIKNMCLFGDQVRLQQVLADFLLNAVKFTPSSGGWVGIKVVPTKKRLGGGIHVMHLEFRVTHSGMGLPEELVHEMFDRGRGMTQEGLGLSMCRKLVKLMNGNVQYIRETGKSYFLVEVELPLAQRDDAGSVR

SEQ ID NO: 9590 - protein, 1123 aa, Physcomitrella patens
MSTPKKTYSSTSSAKSKAHSVRVAQTTADAALQAVFEKSGDSGDSFDYSKSVSKSTAESLPSGAVTAYLQRMQRGGLTQSFGCMIAVEGTGFRVIAYSENAPEILDLVPQAVPSVGEMDTLRIGTDVRTLFTASSVASLEKAAEAQEMSLLNPITVNCRRSGKQLYAIAHRIDIGIVIDFEAVKTDDHLVSAAGALQSHKLAAKAITRLQALPGGNIGLLCDTVVEEVRELTGYDRVMAYRFHEDEHGEVVAEIRRADLEPYLGLHYPGTDIPQASRFLFMKNKVRIIADCSAPPVKVIQDPTLRQPVSLAGSTLRSPHGCHAQYMGNMGSIASLVMAVIINDNEEDSHGSVQRGRKLWGLVVCHHTSPRTVPFPLRSACGFLMQVFGLQLNMEVELAAQLREKHILRTQTLLCDMLLRDAPIGIVSQIPNIMDLVKCDGAALYYGKRFWLLGTTPTESQIKDIAEWLLEYHKDSTGLSTDSLADANYPAAHLLGDAVCGMAAAKITAKDFLFWFRSHTAKEIKWGGAKHDPGEKDDGRKMHPRSSFKAFLEVVKRRSLPWEDVEMDAIHSLQLILRGSFQDIDDSDTKTMIHARLNDLKLHDMDELSVVANEMVRLIETATAPILAVDSNGMINGWNAKIAQVTGLPVSEAHGRSLVKDLVTDESVAVVERLLYLALRGEEEQNVEIKLKTFGTQTEKGVVILIVDACSSIHVSENVVGVCFVGQDVTGQKMFMDKFTRIQGDYKTIVQNPHPLIPPIFGADEFGYCFEWNPAMEGLTGWKKDEVVGKLLVGEIFGMQMMCCRMKSQDAMTKFMIALNTAMDGQSTDKFTFSFFDREGKYVDVLLSTNKRTNADGVITGVFCFLQIASSELQQALKVQRATEKVAVAKLKELAYIRQEIKNPLCGITFTRQLLEDTDLSDDQQQFLDTSAVCEQQLQKVLNDMDLESIEDGYLELDTAEFEMGTVMNAVISQGMTTSREKGLQIFRETPREINTMRLLGDQIRLQQVLSDFLLNTVRFTPSPEGWVKIKVVPTRKRLGGSVHVVHLEFRVSHPGAGLPEELVLEMYDRGKGMTQEGLGLNMCRKLVRLMNGDVHYVREAMQCYFVVNVELPMAQRDDASSQM

SEQ ID NO: 9591 - protein, 693 aa, Nostoc sp. PCC 7120
MAVIGCLVLPSDVTGLGSPVSDKNFITSVKMTSINHDPTFSGNSRSTLKKRTLLFRYLAEINLIFGLWYLQWRITNSINFDALWLSIPLLLAEIYSYLGGVMFVIGLWRPLVRQIKSLDQLTPSLPQTDWPIVDVFITCYNEPPEMVEQTAQAALAIDYPPTKLYVYVLDDGNSPAMRAMTEKLCIADLQSPLLQQEANRIDAERSHLVERLQKLESFTSNIQVAEEWLSKSSSVPNQDKTTDEVLAQSLQQFIRWLSPKHHSIAERLKTERQVLAGAIRQKELELVELTRFRYIARPKPAGVPHHAKAGNLNYAIFSGETSGEFILTLDADHIPKPQFLKRVLPYFYTYNLFNGKYEQNRIAFVQTPQDFYNIPPSDPFGHRASLFYGPLQQGKDGMNAAFYTGTNAILRREALINVGLQYFADDFTKDEKRLDEFQLVGGLSSNSITEDMNTAMRLHGAGWKSVYHHELLAEGLAPDDLSSTLKQRLRWAQGTIQVLVKENPLRKSGLTFWQRLQYFKTMYSYFSGFATLIFISCPIIYFFTEIVPVKTYGTDFILHFLPTFIINRLTFVVAIWGIPASEIWRSEQYAIALFPIFIQAVWSVFTGQKMNFQVTPKERQSGIYLSMIWPQLLIFFLTIIGIFWSLYSFAIGRLNHPWVNLLNSSWAVYNLLLLSGIIRASVWQMPKYDSKKV

SEQ ID NO: 9592 - protein, 445 aa, Oryza sativa Indica Group
MDYYEILHVDRSATDDDIRRAYRRLAMRWHPDKNHTGKKDAEAKFKDITEAYNVLGDAGKRALYDQYGEEGLRAGGAPPQPGGGGGGADDIFAEFFGSTPFTYCNTGAGTTARAKQQAAWDAGGGGAYFGRGGFARDHGGGGAAASPQPPPVESKLACTLEELYVGVTKNMKISRNVVDASGRMKTESEILSIEVKPGWKKGTKITFPGKGNQQWSQLPADLVFVVDEKPHDVYRRDGNDLVAEARVTLADALGGTVVVLATLDGRELLVEVSGGGVAAGDEDDDDEDPVVYPGNTCEAELAIKAGGHDSSGGKATWRRDGGAMVAAGGATAAGQRGEKESDGRQKLAADTITNRRRRCGGIWEVKRWWWLAVTGDARLLAPLPPTLGAIESHVPTAGNALRSLHPMAPASSSLPMPVARVEGRGGRARAASPRIHNTFLPVCYL

SEQ ID NO: 9593 - protein, 1130 aa, Physcomitrella patens
MSTPKLAYSSGSSVKSKHSVRVAQTTADAKLQAVYEESGDSGDSFDYSKSVHASKSTGENVSAQAVTAYLQRMQRGGLMQTFGCMLCVEESNFRVIAFSENAPEMLDLMPQAVPSVGQQEVLGIGTDARTLFTPSSAAALEKCAGTVDVTMLNPISVHCRSSGKPFYAILHRIDVGLVIDFEPVRSNDAIVSSAGVLQSHKLAAKAISRLQALPGGDIGLLCDIVVQEVRELSGYDRVMAYKFHEDEHGEVLAEIRRSDLEPYLGLHYPATDIPQASRFLFMKNKVRMIGDCFASPVKVIQDKDLRQPISLAGSTLRAPHGCHAQYMGNMNSIASLVMAVIVNDPDEDPNARGGQQRGRKLWGLVVCHHTSPRTVSFPLRSACEFLMQVFGLQLNMEVELAAQLREKHILRTQTLLCDMLLRDAPIGIVSQSPNIMDLVKCDGAALHYGKRFWLLGITPNDAQIKEIADWLLEHHQDSTGLSTDSLADAGYPGAAQLGDAVCGMAAAKITSKDFLFWFRSHTAKEIKWGGAKHDPDEKDDGRKMHPRSSFKAFLVVVKRRSLPWEDIEMDAIHSLQLILRGSFQDIDDSDTKTMIHARLNDLKLQDMDELSTVANEMVRLIETATAPILAVDSGGFINGWNAKVAELTGLPVEEAMGRSLVKDLILNESIDVVQRLLHLALQGDEEQNIEIQLKTFGPQKEKGAVILIVNACSSRDVQDNVVGVCFVGQDVTGQKQVLDKFTRIQGDYKAIVQNPNPLIPPIFGTDEYGYCSEWNPSMEKLTGWKREEVIGKLLVGEIFGIQLMCCRLKSQDAMTKFMIVLNGAMDGQDTDRFPFSFFDRQGKYVDPLLTVNKRTDAEGSITGVFCFLHTTSVELLQALTVQRSTEKVAFAKLKELAYIRQEIKNPLYGIVFTRNLMEDTDLSVDQRQLVETSAVCERQLRKILDDLDLESIEDGYLELDTTEFEMGTVMDAVVSQGMITSREKGLQLIRETPSEIKNMCLYGDQVRLQQVLADFLLNAVRFTPSSEGWVGIKVVPTKKRLGRGVHVMHVEFRVTHPGLGLPEELVHEMFGRGRGMTQEGLGLSMCRKLVKLMNGTVQYIRETGKSCFLVEVELPLAQRDDAGSVRSTVV

SEQ ID NO: 9594 - protein, 510 aa, Sorghum bicolor; identical to SEQ ID NO: 6028

SEQ ID NO: 9595 - protein, 408 aa, Vitis vinifera
MPGHRSQSEKTDAGKQLRRDPYEVLGVLRNSTDQEIKSAYRKMALKYHPDKNANDPKAADMFKEVTFSYNILSDPDKRRQYDTAGFEAVESEGQELELDLSNLGAVNTMFAALFSKLGVPIKTTVSATVLEDALNGVVTVRPLTLGQPVVKKVEKQCAHFYSVTLTEEEAQTGFVCRVQSSDKSKFKLLYFDQEEGGGLNLSLQEDSARTGKVTSAGMYFLGFPVYRLDQTVNSMAAAKDPDSAFFKRLDGFQPCEMTELKAGTHVFAVYGDNFFKSVSYTIEALCTAPFAEEKENLRAVEAQILTKRVELSKFETEYREVLTQFTEMTSRYAQEMQAIDDLLKQRNEIHASYSSAPPIKRSRSKNRGLSKDSKDDGQVKDKKPAFRERPKKKKWYNIHLKVDKSKPC

SEQ ID NO: 9596 - protein, 474 aa, Chlamydomonas reinhardtii
MAGDFAAFEAKMKAANLSQAAIAAFKKNYDQLVAGVTGMVAEADISSADGLPYLTSLPHVSPADAKSLLSATAVLKLNGGLGTSMGLEKAKSLLVVKDGKTFLDLICEQVKHMRATYGSQVVFTLMNSFSTSDDTRAFLAAAHPDLLQEPLIELLQNKSPKVDAASLSPASYPAQPDMEWCPPGHGDIYPSLLGSGMLDALAGQGIKYLFVSNSDNLGATLDLDLLHYFATSNKAFLMEVCERTAADKKGGHLCVRKADGRLMLRESAMCPDADKKAFEDIAKHKYFNTNNLWVSLEALAATLKSSGGALDLPLIKNKKTVNPRDAASPPVFQLETAMGSAIECFDSAGAIVVPRSRFAPVKTCSDLFVLRSDAYVIAEDSTVAVAPALKGAIPLVKLDDGHYKLVDQMEALAPAVPSLLHASSLTVKGAVKFSPGVVLKGEVTLEAEGSGPAVLTAGEYSGAVKLGEPAKVAA

SEQ ID NO: 9597 - protein, 1122 aa, Physcomitrella patens
MSAPKKTYSSTSSAKSKAHSVRVAQTTADAALHAVFEKSGVSGDNFDYSKSVSKSTAGSLHTGAVTAYLQRMQRGGLTQSFGCMVAVEETGFRVIAYSENAPEFLDLMPQAVPNIGEINTLGIGTDVRTLFTPSSAASLEKAAETQEISLLNPITVYCRSKKPLYAIAHRIDIGIVIDFEAVNMNDVTISADGALQSHKLAAKAITRLQALPGGDIGLLCDTVVEEVRELTGYDRVMAYKFHEDEHGEVVAEIRRTDLEPYLGLHYPATDIPQASRFLFMKNRVRMIGDCSAPPEKIVQDPNLRQPVSLAGSTLRSPHGCHAQYMGNMGSISSIVMAVIINDNEDDSRGSVQRGRKQWGLVVCHHTSPRTVPFPLRSACEFLMQVFGLQLNMEVELAAQLREKHILRTQTLLCDMLLRDAPTGIVSQVPNIMDLVKCDGAALYYGKRFWLLGTTPTESQIKDIAEWLLEYHKDSTGLSTDSLADANYPAAHLLGDAVCGMAAAKITSKDFLFWFRSHTAKEIKWGGAKHDPGEKDDNRKMHPRSPFKAFLEVVKRRSLPWEDVEMDAIHSLQLILRGSFQDIDDSDTKTMIHARLNDLKLHDMDELSIVANEMVRLIETATAPILAVDSNGMINGWNAKIAQETGLPVAEAMGRSLVKDLVMDESLEVVERLLYLALRGEEEQGVEIKLKTFGAQTVKGAVTLIVNACASRDVSENVVGVCFVGQDVTGQKMFMDKFTRIQGDYKTIVQNPHPLIPPIFGADEFGYCFEWNPAMEGLTGWKRDEVIGKLLVGEIFGMQKMCCQMKSQDAMTKFMISLNSAMDGQNTDKFSLSFFDREGRYVDALLSTNKRTNADGAITGVICFLQIASSELQQALRVQQATEKVAIAKLKELAYIRQEIKNPLCGITFTRQLLEDTDLSNDQKQFLDTSAVCEQQLQKVLNDLDLESIEDGYLELDTAEFEMRTVMDAVISQGMTISREKGLQIIRETPREIITMRLFGDQVRLQQVLSDFLLNAVRFTPSSEGWVKIKVVPTRKRLGGNEHVMHLEFRVSHPGAGLPEELVLEMFDKGKGMTQEGLGLNICRKLVRLMNGDVQYVREAMQCYFVLYVELPLAQQDDAASQM

SEQ ID NO: 9598 - protein, 364 aa, Salacia nitida
VQSQKLAVRAISQIQSLPGGDIKLLCDTVVESVRDLTGYDRVMVYKFHEDEHGEVVAECKRPDLEPYIGLHYPATDIPQASRFLFKQNRVRMIVDCHASPVRVIQDDGLMRPLRLVGSTLRAPHGCHAQYMENMGSIASLAMAVIINGNDEEVIGGRNPTRLWGLVVCHHTSARCIPFPLRYACEFLMQAFGLQLKMELQLAAQLLEKHVLKTQTLLCDMLLRDSPTGIVTQSPSIMDLVKCDGAALYFQGNYYPLGVTPTEAQIKDIVEWLLAFHGDSTGLSTDSSADAGYPGAALLGDAVCGMAVAYITNRDFLFWFRSHTAKEIKWGGAKHHPEDKDDGQRMHPRSSFKAFLEVVKRRSLP

SEQ ID NO: 9599 - protein, 374 aa, Salaciopsis glomerata
ALSIAGAVQSQKLAVRAISQLQSLPGGDIKLLCDAVVESVRDLTGYDRVMVYKFHEDEHGEVVAESKRSDLEPYIGLHYPATDIPQASRFLFKQNRVRMIADCHASPVRVIQDDGLMQPLCLVGSTLRAPHGCHAQYMENMGSVASLAMAVIVNGNDEEVIGGRNATRLWGLVVCHHASVRCIPFPLRYACEFLMQAFGLQLNMELQLAAQLSEKPVLKTQSLLCDMLLRDSPTGIVTQSPSIMDLVKCDGAALYYQGNYYPLGVTPAEPQIKDIVGWLLAFHGDSKGLSTDSLADAGYPGAALLGDAVCGMAVAYITNRDFLFWFRSHTAKEIKWGGAKHHPEEKDDGQRMHPRSSFKAFLEVVKSRSFPWEN

SEQ ID NO: 9600 - protein, 1134 aa, Selaginella martensii
MSTTKLTYSSGSSAKSKHSVRVAQTTADAKLHAVYEESGESGDSFDYSKSINATKSTGETIPAQAVTAYLQRMQRGGLVQPFGCMLAVEEGSFRVIAFSDNAGEMLDLMPQSVPSLGSGQQDVLTIGTDARTLFTAAASALEKAAGAVDLSMLNPIWVQSKTSAKPFYAIVHRIDVGLVMDLEPVKASDTRVGSAAGALQSHKLAAKAISRLQSLPGGDIGLLCDTVVEEVRDVTGYDLVMAYKFHEDEHGEVVAEIRRSDLEPYLGLHYPATDIPQASRFLFMKNRVRMICDCSAPPVKITQDKELRQPISLAGSTLRAPHGCHAQYMGNMGSVASLVMAMIINDNDEPSGGGGGGGQHKGRRLWGLVVCHHTSPRSVPFLRSACEFLMQVFGLQLNMEAAVAAHVREKHILRTQTLLCDMLLRDAPIGIVSQSPNIMDLVKCDGAALYYGKRFWLLGITPSEAQIKDIAEWLLEHHKDSTGLSTDSLADAGYPGAASLGDEVCGMAAAKITAKDFLFWFRSHTAKEVKWGGAKHDPDDKDDGRKMHPRSSFKAFLEVVKRRSLPWEDVEMDAIHSLQLILRGSFQDIDDSDTKTMIHARLNDLKLQGMDELSTVANEMVRLIETATAPILAVDSSGFINGWNAKVADVTGLPVTEAMGRSLAKELVLHESADMVERLLYLALQGDEEQNVELKLKTFGGQKDKEAVILVVNACASRDVSDNVVGVCFVGQDVTGQKVVMDKFTRIQGDYKAIVQNPNPLIPPIFGADEFGYCSEWNPAMEKLSGWRREEVLGKMLVGEIFGIQMMYCRLKGQDAVTKFMIVLNSAADGQDTEKFPFAFFDRQGKYVEALLTATKRADAEGSITGVFCFLHIASAELQQALTVQRATEKVALSKLKELAYIRQEIKNPLYGIMFTRTLMETTDLSEDQKQYVETGAVCEKQIRKILDDMDLESIEDGYLELDTTEFMMGTVMDAVISQGMITSKEKNLQLIRETPKEIKAMFLYGDQVRLQQVLADFLLNAIRFTPSSENWVGIKVATSRKRLGGVVHVMHLEFRITHPGVGLPEELVQEMFDRGRGMTQEGLGLSMCRKLVKLMNGEVEYIREAGKNYFLVSLELPLAQRDDAGSVKFQASS

SEQ ID NO: 9601 - protein, 369 aa, Schaefferia frutescens
ALSIAGAVQSQKLAIRSISQLQSLPGGDIKLLCDTVVESVRELTGYDRVMVYKFHEDEHGEVVAESKRPDLEPYIGLHYPATDIPQASRFLFKQNRVRMIVDCHASPVLVIQDDGLMQPLCLVGSTLRAPHGCHAQYMENMGSKASLAMAVIINGNDEEVTGGRNATRLWGLVVCHHTSARCIPFPLRYACEFLMQAFGLQLNMELQLAAQLSEKHVLKTQTLLCDMLLRDSPTGIVTQSPSIMDLVKCDGAALYYQGKYYPIGVTPAEAQIKDIVEWLLAFHGDSTGLSTDSLADAGYPGATLLGDAVCGMAVAYITNRDFLFWFRSHTTKEIKWGGAKHHPEDKDDGPRMHPRSSFKAFLEVVKSRS

SEQ ID NO: 9602 - protein, 309 aa, Schaefferia frutescens
ALSIAGAVQSQKLAIRSISQLQSLPGGDIKLLCDTVVESVRELTGYDRVMVYKFHEDEHGEVVAESKRPDLEPYIGLHYPATDIPQASRFLFKQNRVRMIVDCHASPVLVIQDDGLMQPLCLVGSTLRAPHGCHAQYMENMGSKASLAMAVIINGNDEEVTGGRNCTRLWGLVVCHHTFARCIPFPLRYAWEFLMQAFGLQLNMELQLAAQLSEKHVLKTQTLLCDMLLRDSPTGIVTQSPSIMDLVKCDGAALYYQGKYYPIGVTPAEAQIKDIVEWLLAFHGDSTGLSTDSLADAGYPGATLLGDAV

SEQ ID NO: 9603 - protein, 392 aa, Spathiphyllum wallisii
PYEVPMTAAGALQSYKLAAKAISRLQSLPGGSMQKLTDTVVQEVFELTGYDRVMAYKFHEDDHGEVVSEITKPGLEPYLGLHYPATDIPQAARFLFMKNKVRMICDCHAKPVKVYQDEKLTFDLTFCGSTLRAPHSCHLLYMKNMNSIASLVMAVVVNEGDEEDEPLEHGQQLQQKRKRLWGLVVCHNTTPRFVPFLLRYACEFLMQVFAIHVNKEFELENQIREKNILRTQTLLCDMLLRDAPLGIISRSPNIKDLVKCDGAALLYQNKIWRLGSTPTESHIRDIASWLSEYHMDSTGLSTDSLYDAGYPGALTLGDAVCGMAAARITSKDILFWFRSHTAAEIRWGGAKHDPADEDDGRRMHPRSSFKAFLEVVKTRCLPWKDYEMEAIH

SEQ ID NO: 9604 - protein, 270 aa, Medicago truncatula
MHNNNVSVGSPQQLVTTNTLPQEMNMNISVGNSIVTTIGTSIVALEAPTVTPTTTTPGSLDLFGKKKRGRPRKYDADGNLNPSYKKIVKTTTPILTSPPGFTLSTNEFASKKGRGKSTGFVNYQTFSSFGEVFPSTAAVDFAPHVVTVYAGEDVGGKILSFAQKSPRGICILSANGAISKVALGQPGSTGVNSKKQCNGKAYHRQCPLAREVVTQGRFEILSLSGSYTASDNSGIRTREGGLSVSLAGPDGRVIGGAVAGVLIAAGPIQV

SEQ ID NO: 9605 - protein, 172 aa, Treponema denticola ATCC 35405
MENYYSILNISNNADEDQIKQAYRALAMKYHPDKNPDSKTAEEKFKRISEAYSVLSDPQKRRDYDLSMSSPFSSSGRTYTHDQNTNPFGDDIFSSNWWKNWRNIRSENAKKREKISRSEAFRILIRGIILTIVGLLLFKSIIFLGIFGFLLALSIVTEGVLRIRKGYMAIFD

SEQ ID NO: 9606 - protein, 1014 aa, Arabidopsis thaliana
MASHAVPSVGEHPVLGIGTDIRSLFTAPSASALQKALGFGDVSLLNPILVHCRTSAKPFYAIIHRVTGSIIIDFEPVKPYEVPMTAAGALQSYKLAAKAITRLQSLPSGSMERLCDTMVQEVFELTGYDRVMAYKFHEDDHGEVVSEVTKPGLEPYLGLHYPATDIPQAARFLFMKNKVRMIVDCNAKHARVLQDEKLSFDLTLCGSTLRAPHSCHLQYMANMDSIASLVMAVVVNEEDGEGDAPDATTQPQKRKRLWGLVVCHNTTPRFVPFPLRYACEFLAQVFAIHVNKEVELDNQMVEKNILRTQTLLCDMLMRDAPLGIVSQSPNIMDLVKCDGAALLYKDKIWKLGTTPSEFHLQEIASWLCEYHMDSTGLSTDSLHDAGFPRALSLGDSVCGMAAVRISSKDMIFWFRSHTAGEVRWGGAKHDPDDRDDARRMHPRSSFKAFLEVVKTRSLPWKDYEMDAIHSLQLILRNAFKDSETTDVNTKVIYSKLNDLKIDGIQELEAVTSEMVRLIETATVPILAVDSDGLVNGWNTKIAELTGLSVDEAIGKHFLTLVEDSSVEIVKRMLENALEGTEEQNVQFEIKTHLSRADAGPISLVVNACASRDLHENVVGVCFVAHDLTGQKTVMDKFTRIEGDYKAIIQNPNPLIPPIFGTDEFGWCTEWNPAMSKLTGLKREEVIDKMLLGEVFGTQKSCCRLKNQEAFVNLGIVLNNAVTSQDPEKVSFAFFTRGGKYVECLLCVSKKLDREGVVTGVFCFLQLASHELQQALHVQRLAERTAVKRLKALAYIKRQIRNPLSGIMFTRKMIEGTELGPEQRRILQTSALCQKQLSKILDDSDLESIIEGCLDLEMKEFTLNEVLTASTSQVMMKSNGKSVRITNETGEEVMSDTLYGDSIRLQQVLADFMLMAVNFTPSGGQLTVSASLRKDQLGRSVHLANLEIRLTHTGAGIPEFLLNQMFGTEEDVSEEGLSLMVSRKLVKLMNGDVQYLRQAGKSSFIITAELAAANK

SEQ ID NO: 9607 - protein, 363 aa, Simicratea welwitschii
QSQKLAVRAISQLQSLPGGDIKLLCDTAVESVRDLTGYDRVMVYRFHEDEHGEVVAESKRPDLEPYIGLHYPATDIPQASRFLFKQNRVRIIVDCHASPVSVIQDDGLMQPLCLVGSTLRAPHGCHAQYMENMGSIASLAMAVIINGNDEEGMGGRNPTRLWGLVVCHHTSSRCIPFPLRYACEFLMQAFGLQLNMELQLAAQLLEKHVLKTQTLLCDMLLRESPTGIVTQSPSIMDLVKCDGAALYYQANYYPLGVTPTEAQIRDIVEWLLACHGDSTGLSTDSLADAGYPGATLLGDAVCGMAVAYITNRDFLFWFRSHTAKEIKWGGAKHHPEDKDDGQRMHPRSSFKAFLEVVKSRSLP

SEQ ID NO: 9608 - protein, 465 aa, Spathiphyllum wallisii
SGKPFYAIMHRIDMGLIIDLEPVNPADVPVTAAGALKSYKLAAKAISRLQSLPSGNISLLCDVLVREVRELTGYGRVMAYKFHEDEHGEVVSECRRPDLEPYLGLHYPATDIPQASRFLFMKNKVRMICDCSAQPIKVIQDKRLAQPLSLCGSTLRAPHGCHAQYMANMGSIGSLVMSVTINEDEDDDSSGEQQQKGRKLWGLVVCHHTSPRFVPFPLRYACEFLMQVFAIQLNKEVELAAQTREKHILRTQTLLCDMLLRDTPVGIFTQSPNVMDLVKCDGAALYYQNQFWLLRVTPTEAQIRDIAAWLIDCHNSTTGLSTDSLSEAGYPSASTLGDAVCGMAAIKITSRDLIFWFRSHTAKEIKWGGAKHDPVDRDDDGRKMHPRSSFKAFLEVVKRRSLPWEDVEMDAIHSLQLILRSSLQDENVRDNSKGIVNVISDDAKKIQGVDELRTVANEMVRLMET

SEQ ID NO: 9609 - protein, 342 aa, Oryza sativa Japonica Group
MGMDYYNVLKVNRNATEEDLKKSYRRMAMKWHPDKNPGDKKKEAEAKFKKISEAYEVLSDPQKRAIYDKYGEEGLKASVDAGASSSMNGNRRFNPRNAEDVFAEFFGSSKPFEGMGRAKSMRFQTEGAGTFGGFGGGNENKFRSYNDSAGTSSSQPRKPPAVETKLPCTLEELYAGSTRKMKISRNVVRPTGQIGTESEILTIDIKPGWKKGTKITFPDKGNEQPNQLPADLVFVIDEKPHDLYTREGNDLLVHQKIELVDALAGTTVNLKTLDGRDLVIKLTDVVTPGYELAIAKEGMPIVKENGRRGNLRIKFDIVFPKRLSSDQRQNIRKVLGGQTQQQ

SEQ ID NO: 9610 - protein, 177 aa, Oryza sativa Japonica Group
MPPVAPGAGASACCYYSLLGIRKNASATDVRAAYRRLAMKWHPDRCVSDPGEANRRFQRIQEAYSVLSDKGKRAMYDAGLFDPLDDDDQDFSDFMQEMLVMMDNVKNEDFSDFMQEMLVMMDNVKNEKPDTLEDLQKMLQDIVSGDGGSRGGGVGGRVPSDGTRRTRVAPYPAQSRR

SEQ ID NO: 9611 - protein, 467 aa, Tacca chantieri
SGKPFYAIIHRVTACLIVDFEPVKPSELPMTAAGALQSYKLAAKAIARLQSLPGGSMERLCDTVIEEVFELTGYDRVMVYKFHEDDHGEVFREITKPGLEPYQGLHYPATDIPQAARFLFMKNKVRMICDCRAKPVKIYQDDKLPLDLTFCGSTLRAPHSCHLQYMENMNSIASLVMAEVVNEGEEDDENLEPGQTQQQKKKRLWGLVVCHHESPRFVPFPLRYACEFLMQVFAIHVNKEFELENQIREKNILRTQTLLCDMLLRDTTPVGIMNQSPNIMDLVKCDGAALLYQNKVWRLGLTPTEAQIRDIAYWLAEYHMDSTGLSTDSLHDAGYPGALGLADVVCGMAAARITSKDMLFWFRSHIAAEIRWGGAKHDPADKDDGRRMHPRTSFKAFLEAVKMRSLPWKDYEMDAIHSLQLILRGTFSDSRNVNSRASLDARVNDLKLEGMVELQAVTNEMVRLMET

SEQ ID NO: 9612 - protein, 465 aa, Tetracentron sinense
SGKPFYAIVHRVTGSLIIDFEPVKPYEVPMTAAGALQSYKLAAKAIARLQSLPSGSIERLCDTVVQEVFELTGYDRAMVYKFHEDDHGEVVSEITKPGLEPYLGLHYPATDIPQAARFLFMKNKVRMICDCRAKHVKVLQDEKLPFDLTLCGSTLRAPHSCHLQYMENMNSIASLVMAVVVNEEDEEGESSSSEQSQKRKKLWGLLVCHHTTPRFVPFPLRYACEFLAQVFAIHVNKELELENQILEKNILRTQTLLCDMLMRDAPLGIVSQSPNIMDLVKCDGAVLLYKNRIWQLGSTPSEFHIHDITSWLSEYHMDSTGLSTDSLYDAGFPGALALGDGVCGMAAVRITSKDMLFWFRSHTAAEVRWGGAKHEPGEKDDGRKMHPRSSFKAFLEVVKTRSLPWKDYEMDAIHSLQLILRNAFKDVENEGLNTSTIRTQLNDLSIEGTEELEAVTNEMVRLMET

SEQ ID NO: 9613 - protein, 432 aa, Nicotiana sp.
MAQILAPSGEWQMRMTKSSTDANPLTSKMWSSVVIKIIKELAVKSSAKFRVFALESDSGTVNQSEQLLNLDVTPYTDLIIAEYIWIGGSGIDMRSKSRTISKPVKHASELPKWNYDGSSTGQAPGEDSEVILYPQAIFKDPFRGGNNILVICDAYWPAGEPIPSNLRHKAAQIFSDSLVVSEVPWFEIEQEYTLLQQNVKWPLGWPVGGYPGTQGPYYLCAGADKSFGLDISDAHYKACLYAGINISGTNGEVMPGQWEFQVGPSVGIEAGDHIWCARYILERITGQAGVVLSLDPLPIEGDTNGAGCHTNYSTLSMREDGGFEVIKKANLNLSLRHLEHINAYGEGILEKLTGNHETASIDYFSWGVAFRGASIRVGADTEKQGKGYLEDRRPASNMDPYVVTGLLAQTTILWEPTLEAEALAAQKLALKV

SEQ ID NO: 9614 - protein, 390 aa, Tetracentron sinense
DLEPVNPADVPVTAAGALKSYKLAAKAISRLQSLPSGNLSLLRDVLVQEVSDLTGYDRVMVYKFHEDEHGEVVAECLISDLEPYLGLHYPATDIPQASRFLFMKNKIRMICDCLAPPVKVIQDKRLVQPLSLCGSTLRAPHGCHAQYMENMGSIASLVMSVTINDDDDEIESDKRGRKLWGLVVCHHTSPRFVPFPLRYACEFLIQVFGIQLNKEVELVAQLREKQTLRTQTVLCDMLLRDAPVGIVTQSPNVMELVKCDGAALYYRSTFWLLGVTPTEAQIRDIAEWLLEYHNGSTGLSTDSFMEAGYPGAAVLGDAVCGMSAVKITSKDFLFWFRSHTAKEIKWGGAKHDPFDKDDGKKMHPRSSFKAFLEVVKWRSLPWEDMEMDAI

SEQ ID NO: 9615 - protein, 390 aa, Oryza sativa
  misc_feature (82)..(82): Xaa can be any naturally occurring amino acid
MGMDYYNILKVNRNATLEDLKKSYRRLARTWHPDKNPTGGAEAEAKFKQITEAYEVLSDPEKRAIYDRYGEEGLQGMPPPGXSQSRTSAAAGSSGPSNFRYNPSDPDDFFAEFMASNKPYSFDQERTRFQPRSQWTAGNTRGEASSASHKESSTSTSQLEKPPAIEKTLLCTLEELYNGTKRKMKITRNVANTDGWASGDRHGWAASGDGSDWNDGGEAGLTGVRITSGGRVVLLTLFVKFLFALKVEIETEVLPVEVLPGWKKGTKITFPNKGDRLSGQLPQDLTFVIDLKPHDVYLLEGNNLVATQVIPLVDALAGTTIHLKTLDGRNLPIRVEEVVRPGHEIVLANEGWPIRKEPGKKGNLKIKFDVTFPTRLSSSQRAAIRQIMGG

SEQ ID NO: 9616 - protein, 137 aa, Gossypium barbadense
MAEEHRCQAPQLCANNCGFFGSPTTQNLCSECYRGLQLKEQQSSSAKQAFNHTLVPSSSSLPSSSSARSSFSASLPAKEEPSAGTKETKVVEEEEVQVTPNRCLSCKKRVGLTGFKCRCGMVFCGIHRYPGTTCLCF

SEQ ID NO: 9617 - protein, 523 aa, Aspergillus phoenicis; identical to SEQ ID NO: 6054

SEQ ID NO: 9618 - protein, 490 aa, Aspergillus fumigatus
MPTLGGLLKKRRTKDSHTLSKELESSSSPAAAQTQTSPNSADHDHHYQHYDQTHHHQHSASSNPSNNSATPSAAQPHRSSNDNPNRSSGTDQKSEGQTASMQFAVTQPHPSTHHNPRLHHLQQQQQQPQQQSHTSRLHNILHPSHHASSQASTEGHAHSQQANQTEARTTKGKYSLDDFTIQRTLGTGSFGRVHLVQSKHNHRFYAIKVLKKAQVVKMKQVEHTNDERRMLNRVRHPFLITLWGTWQDARNLYMVMDFVEGGELFSLLRKSQRFPNPVAKFYAAEVTLALEYLHSQQIIYRDLKPENLLLDRHGHLKITDFGFAKEVPDITWTLCGTPDYLAPEVVSSKGYNKSVDWWSLGILIFEMLCGFTPFWDSGSPVKIYENILRGRVKYPPYLHPDAVDLLSQLITADLTKRLGNLHGGSEDVKNHPWFAEVTWDRLARKDIDALYVPPIREGQGDASQYDRYPEETEQYGQQGEDVHGHLFPDF

SEQ ID NO: 9619 - protein, 227 aa, Glycine max
  misc_feature (192)..(192): Xaa can be any naturally occurring amino acid
MAQKKKARVSDDEEMEVQHDQTSLYQVLGVERTASQQEIKKAYYKLALRLHPDKNPGDDEEAKEKFQQLQKVISILGDEEKRALYDQTGCVDDADLAGDVVQNLQEFFRTMYKKVTEADIEEFEANYRGSDSEKNDLIDLYKKCKGNMNRLFCSMLCSDPKLDSHRFKDILDEAIASGELKAKKAYQKWAKXKVSEIKPPTNPLRRREKSNKQSETDLCAIIAQRRN

SEQ ID NO: 9620 - protein, 1126 aa, Ceratodon purpureus
  misc_feature (344)..(344): Xaa can be any naturally occurring amino acid
MASAKMAYSSGSGIKSKHSVRVAQTTSDAKLQAVYEESNDSGDSFDYSKSVAQAAKSTGQQQVPAQAVTAYLQRMQRGGLTQTFGCMLAVEENTFRVIAYSENAPELLDVMPQAVPSLGQQDVLGIGTDARSLFTPSSATALERAAGAADLSLVNPISVHSRASGKPFYAIIHRIDVGIVMGFEPVRPNDVIVSTAGTLHSHKLAAKAIARLQALSGGDIGLLCDTVVEEVRELTGYDRVMAYKFHEDEHGEVLAEIRRSDLEPYLGLHYPSTDIPQASRFLFMKNRVRMIVDCWAPPVKVIQDKDLRQPISLAGSTLRAPHGCHAQYMGNMGSVASVTMAVIXNDQEDDFGGQQTRARRLWGLVVCHHTSARTISFPLRSACEFLMQVFGLQLNMEVELENQKREKHILRTQTMLCDMLLRDAPVGIVSQCPNIMDLVKCDGAALYYGKRFWLLGITPSEEQIEEIANWLLEHHQDSTGLSTDSLADAGYPGANLLGDAVCGMAAARITPTDFLFWFRSHTAKEIKRGGAKHEADDKDDGRKMTPRSSFNAFLEVMKRRSVPWEDIEMDAIHSLQLILRGSFQDIDDSDTKTMIHARLNDLKLQGMDELSTVANEMVRLIETATAPILAVDSNGFINGWNAKVAELTGLPVGDAMGRSLVQDLIVDESVEVVERLLYLALQGDEEQDVEIQLRTFGPQKGKGAVILIVNACSSRDVQDNVVGVCFVGQDVTSQKQVHDKFTRIHGDYKSIVQNPNPLIPPIFGSDELGYCTEWSPSMEKLTGWKRDEVLGKMLVGEVFGTQQICCRLKGQDSVTKFMIVLNNAMDGQDTDKYPFSFYDRQGKFVEALLTANKRTDADGYITGVFCFLHIASPELLQALTVQRATEKVAFAKLKELAYIRQEIKNPLYGIMFTRNLMEDTDLSDEQKQFMDTSAVCERQLRKILDDMDLESIEDGYLELETAESELGSMMDAVVSQGMITSREKGLQLIRETPREINDMSLFGDQVRLQHVLADFLLNAVRLTPSSEGWVGIKVVPTKKRLGGGFHVVHLEFRVAHPGSGLPEELVHEMFDRGRGMTQEGLGLSMCRKLVKLMNGEVKYIRDTGKSYFLVNLELPLTVRDESGMLR

SEQ ID NO: 9621 - protein, 418 aa, Physcomitrella patens subsp. patens
MADAGGQDTNTVVSRPNAGRRDPYEVLGLPRDATDQQIKSTYRKLALKYHPDKNTGNPEAAEKFKEVAYSYGILSDPEKRRQYDSAGFNAVDLEGLDMELDLSNLGTVNTMFAALFSKLGVPIKTTVSATVLEDALNGTVTIRPLPLGRPVNDKVEKQGANFFGITISEAQAEAGVVIRVVSNVQSKFKLLYFEQEENGGLGLALQEDSVKTGKVTSAGMYFLHFQVYRLDPTVNALAISRDPDAVFFKRLEGLQPCEMSELKAGTHIFAVYGDNFFKSASYTIEAICAEAYLETAVKLKEVEAQILSKRNELRQFEKEYRDVLARFQAVTNKYTQEKQAVDDLLKAREKIQESFTSVPTAPKKVSSTSNGKAVGEDSTVSADESESPTTEESSADKAKQSKKWFNLNFKSGIGSAGK

SEQ ID NO: 9622 - protein, 317 aa, Populus trichocarpa
MGVDYYNILKLNRNATEEDMKKAYKRLAMKWHPDKNPVNKKEAEAKFKLISEAYDVLSDPNKRQIYDLYGEEGLKSFDQIPPPTTNVGASFRFNPRDAEDIFAEFFGVGGGSGGVGKGYFRNNNGNNYGAELNRKAAPVESKLLCTLEELYKGTRRKMRISRSVPDDFGKPKTVEEILKIDIKPGWKKGTKITFPEKGNQEPGITPADLIFVVDEKPHSVFKRDGNDLVINQKISLLEALTGKTIELTTLDGRYLPVPVTDIVKPGQELLVSNEGMPISKEPTKRGNLRIKFDVTFPTRLTVEQKSDLKKALGAPDN

SEQ ID NO: 9623 - protein, 363 aa, Simicratea welwitschii
QSQKLAVRAISQLQSLPGGDIKLLCDTAVESVRDLTGYDRVMVYRFHEDEHGEVVAESKRPDLEPYIGLHYPATDIPQASRFLFKQNRVRIIVDCHASPVSVIQDDGLMQPLCLVGSTLRAPHGCHAQYMENMGSIASLAMAVIINGNDEEGMGGRNPTRLWGLVVCHHTSSRCIPFPLRYACEFLMQAFGLQLNMELQLAAQLLEKHVLKTQTLLCDMLLRESPTGIVTQRPSIMDLVKCDGAALYYQANYYPLGVTPTEAQIRDIVEWVLACHGDSTGLSTDSLADAGYPGATLLGDAVCGMAVAYITNRDFLFWFRSHTAKEIKWGGAKHHPEDKDDGQRMHPRSSFKAFLEVVKSRSLP

SEQ ID NO: 9624 - protein, 245 aa, Siphonodon australis
ALSIAGAVQSQKLAVRAISQLQSLAGGDIKLLCDTVVESVRDLIGYDRVMVYKFHEDEHGEVLAESKRPDLEPYIGLHYPATDIPQASRFLFKQNRVRMIVDCHASPVRVIQDDGLMQPLCLVGSTLRAPHGCHAQYMENMGSTASLVMAAMINGNDEKATGGRNTTKLWGLVVCHHTSARCIPFPLRYACEFLMQAFGLQLNMELQLAAQLSEKHVLKTQTLLCDMLLRDSPTGIVTQSPSIMD

SEQ ID NO: 9625 - protein, 49 aa, Ilex perado
  misc_feature (12)..(12): Xaa can be any naturally occurring amino acid
WEFQVGPSVGIXAADHIWCARYLLERITEQAGVVLTLDPKPIEGDWNGA

SEQ ID NO: 9626 - protein, 374 aa, Siphonodon celastrineus
ALSIAGAVQSQKLAVRAISQLQSLAGGDIKLLCDTVVESVRDLTGHDRVMVYKFHEDEHGEVLAESKRPDMEPYIGLHYPATDIPQASRFLFKQNRVRMIVDCHASPVRVIQDDGLMRPLCLVGSTLRAPHGCHAQYMENMGSTTSLVMAAYINGNDEKATGGRNATKLWGLAVCHHTSARCIPFPLRYACEFLMQAFGLQLNMELQLAAQLSEKHVLKTQTLLCDMLLRDSPTGIVTQSPSIMDLVRCDGAALYYQGNYYPLGVTPTEAQIKDIVEWLLAVHGDSMGLSTDCLADAGYPGSALLGDAVCGMAVAHITNRDFLLWFRSHTAEEIKWGGAKHRPKDKDDGQRMHPRSSFKAFLEVVKSRSLPWEN

SEQ ID NO: 9627 - protein, 465 aa, Xanthorhiza simplicissima
SGKPFYAIVHRVTGSLIIDFEPVKPYEVPMTAAGALQSYKLAAKAIARLQSLPSGSIERLCDTVVQEVFELTGYDRAMVYKFHEDDHGEVVSEITKPGLEPYLGLHYPATDIPQAARFLFMKNKVRMICDCRAKHVKVLQDEKLPFDLTLCGSTLRAPHSCHLQYMENMNSIASLVMAVVVNEGDEEGESSSSEQSQKRKKLWGLLVCHHTTPRFVPFPLRYACEFLAQVFAIHVNKELELENQILEKNILRTQTLLCDMLMRDAPLGIVSQSPNIMDLVKCDGAVLLYKNRIWQLGSTPSEFHIHDITSWLSEYHMDSTGLSTDSLYDAGFPGALALGDGVCGMAAVRITSKDMLFWFRSHTAAEVRWGGAKHEPGEKDDGRKMHPRSSFKAFLEVVKTRSLPWKDYEMDAIHSLQLILRNAFKDVENEGLNTSTIRTQLNDLSIEGTEELEAVTNEMVRLMET

SEQ ID NO: 9628 - protein, 205 aa, Triticum aestivum
MEEAKEKFQEIQGAYSVLSDANKRFLYDVGVYQEEEDSDDSMQGMGDFLGEMAHMMSQARPARQESFEELQQLFVDMFQSDIDSGFCNGPAKGHHDPFQTFSTSPSSSPSPPPPVATEAEAASCNGINKRGSSAMGSGKPPRAGEAGAGYGQPEFCFGTSDAKQAPKARGGNTSRRRNGQKQKLSSKHDVSSEDEMLSPQQPRVV

SEQ ID NO: 9629 - protein, 607 aa, Oryza sativa Japonica Group
MASAAAPKRCYYEVLGVPRDCSPADIKLAFRRLALSLHPDKQPPGSDVAAATAAFQELQHAHSVLSDPHERSYYDSHRSQILFSDHHPSSGPGRGGGVASASASPVPDLFAFFSSSAFSGFSDSGRGFYKVYGDVFDRVFAQELAYARRMGMPADAVPTPPVIGNLDSPHAQVAAFYSYWLGFGTAMDFGWAAEWDAARGESRRVRRLMEEDNKKATRKARREYNDAVRGLAAFCKKRDKRVVDMALKKKVEEEKRKAEEAARKKEEERRRKERAMAYQEPEWARVDEDEAAVFEDDEEEETRAKRKEELYCVACNKKFKSDKQWKNHEQSKKHRDKVSELRMVFEEEEEALKDAEEEEPEEVDVGFDFQPAQESEESEFSDAAEELADELSEGLEVRDEEEKGDKHLGNGEQKVGSYDETSVLEEMLSRSRRKNRKSGFVAPQEEASPAGAMDDDDDEDTSYEINNVKKKGRRRRAAKKGGTYADNGQGRKSENQPEESRHNNDENGADDKMEGPSSNEDSAAASKEDQQKGKTGNTKKNKKGTEKNTTISSEQKGTSKGKKQKEVSKAPSNDCETCGSTFDSRNKLFSHLEETGHAMLKTRQKNR

SEQ ID NO: 9630 - protein, 49 aa, Ilex perado
WEFQVGPSVGIEAADHIWCARYLLERITEQAGVVLTLDPKPIEGDWNGA

SEQ ID NO: 9631 - protein, 374 aa, Siphonodon celastrineus
ALSIAGAVQSQKLAVRAISQLQSLAGGDIKLLCDTVVESVRDLTGHDRVMVYKFHEDEHGEVLAESKRPDMEPYIGLHYPATDIPQASRFLFKQNRVRMIVDCHASPVRVIQDDGLMRPLCLVGSTLRAPHGCHAQYMENMGSTASLVMAAYINGNDKKATGGRNATKLWGLAVCHHTSARCIPFPFRYACEFLMQAFGLQLNMELQLAAQLSEKHVLKTQTLLCDMLLRDSPTGIVTQSPSIMDLVRCDGAALYYQGNYYPLGVTPTEAQIKDIVEWLLAVHGDSMGLSTDCLADAGYPGSALLGDAVCGMAVAHITNRDFLLWFRSHTAEEIKWGGAKHRPKDKDDGQRMHPRSSFKAFLEVVKSRSLPWEN

SEQ ID NO: 9632 - protein, 148 aa, Oryza sativa
  misc_feature (61)..(61): Xaa can be any naturally occurring amino acid
TLIQINSYIIEGRVCYLTMCDRSYPKKLAFQYLEDLRNEFERVNGSQIETAARPYAFIKFXTQRNLAKLNDELYEVHQIMTRNVQEVLGVGEKLDQVTEMSARLTSDTRIYADKAKDLNRQALIRKYAPVAIVIGVVLMLFWLKNKIW

SEQ ID NO: 9633 - protein, 391 aa, Xanthorhiza simplicissima
DLEPVNPADVPVTAAGAMKSYKLAAKAISRLQSLPSGNITVLCDVLVQEVSDLTGYDRVMVYKFHEDDHGEVVAECRVPELEPYLGLHYPATDIPQASRFLFMKNKVRMICDCSAAPVKVIQDNKLAQPLSLGGSALRAPHGCHALYMANMGSVASLVMSVTINEDDDQMETDQQKGRKLWGLLVCHHTRPRFVPYPLRYACEFLIQVFGMQINKEVELATQFREKHILQTQTVLCDMLLRDAPIGIVTQSPNIMDLVKCNGGALYYRSRFWLLGVTPTEAQIKDIAEWLLQYHNASTGLSTDSLMEAGFPGASVLGNEVCGMAAIKITTKDFLFWFRSHTAKEVKWGGAKHNPTEKDDGWKMHPRSSFKAFLEVVKHRSLPWEDVEMDAI

SEQ ID NO: 9634 - protein, 368 aa, Oryza sativa Indica Group
MASLTDLVNLNLSDTTEKIIAEYIWIGGSGMDLRSKARTLSGPVTDPSKLPKWNYDGSSTGQAPGEDSEVILYPQAIFKDPFRKGNNILCTSISVHPDQHMSCAIATRQPENRSPPTRGTMLPRSSAPLRLLLRSPGTVLSKSTPSSRRTSTGPLAGLLVASPGPQGPYYCGIGADKSFGRDIVDSHYKACLYAGINISGINGEVMPGQWEFQVGPSVGISAGDQVWVARYILERITEIAGVVVSFDPKPIPGDWNGAGAHTNYSTKSMRNDGGYEIIKSAIEKLKLRHKEHISAYGEGNERRLTGRHETADINTFSWGVANRGASVRVGRETEQNGKGYFEDRRPASNMDPYVVTSMIAETTIIWKP

SEQ ID NO: 9635 - protein, 345 aa, Schizosaccharomyces pombe
MNSNDKKKVVRSWIEQFVHDFVEQLSKPTKDSVNVALKRRKHNSWNGSLDSKANERQKVKVFSFPRNETTIAQLFRVLDCVHEAVISDTVITKRDIYYRDVDLFKRQTVVDELLGDISNTIGCSRSDLNVEASAKGLVFGSIHIALENGTVITATKPLLISHHRISSITSTAKWVLVIEKEAVFQTLTEEALADTIIVTAKGFPDLMTRKFLVKLAKALPDAKFFGIFDWDPHGLCIYSCFKYGSNAYSHEPHSQLRNLQLLGPLYEDIFNKNQEFSLKLNKRDIKMITTLLQFEGFQKEPVVREQLQRMLFIQKKAEIQAILEFPSWIKGKLADADKSGKHSVR

SEQ ID NO: 9636 - protein, 783 aa, Oryza sativa; identical to SEQ ID NO: 2519
  misc_feature (210)..(210): Xaa can be any naturally occurring amino acid

SEQ ID NO: 9637 - protein, 332 aa, Salinibacter ruber DSM 13855
MVSQCSPAAMPQTEDLYDVLGVDEDASQEEIKKTYRTLARKHHPDRNPDDPNAEEKFKEIQKAYSVLSDEEKREQYDAQRRFGGGGGFGGGGGGRGAWGRSAGGGPEVRFEQGGFDEAFGGRGGGGLGDIFENFFGGGARTQRQNPFDGGRQQQRQQRQRGRQGGQDLETTLRLSFREALEGGRKQVELPSGESIRLKIPKGVRDGFKIRLKGRGQPGPTGQRGDLYVTFEVGDHPHFDRKGDDVHRTETIGMFEAVFGTDIRVPTPYGQHLKLSVPAGTQPGEKLRLKGQGVKTDDGAGDLYVEIDVNIPENLSRKQRAVLHEAAEDANLL

SEQ ID NO: 9638 - protein, 1126 aa, Marchantia paleacea var. diptera
MSTTKVTYSSGSSAKSKHSVRIVQTTADAKLQAVFEESGESGDSFDYTKSINASKSTGESVPAQAVTAYLQRMQRGGLTQTFGCMLAVEELTFRVLAYSENAPEMLDLMPQAVPCVGQQDVLGIGTDARTLFNSASAVALEKAAGALDVSMFNPISVQCKSSGKPFYAIVHRIDAGLVIDIEPVRPSDPSVSAAGALQSHKLAAKAISRLQSLPGGDIGLLCDTVVEEVRELTGYDRVMAYKFHEDEHGEVVAEIRRSDLEPYLGLHYPATDIPQASRFLFMKNRVRMICDCCAQPVQVIQDKELRQPLSLAGSTLRAPHGCHAQYMGNMGSIASLVMAVIINVNDEEYSSRGYHHKGRKLWGLVVCHHTTPRSVPFPLRSACEFLMQVFGLQLNMEVELAAQLREKRILRTQTLLCDMLLRDAPIGIVSQSPNIMDLVKCDGAALYYGKRYWVLGTTPTELQIKDIADWLLEYHKDSTGLSTDSLADAGYPGAASLGDAVCGMAAARITSKDFLFWFRSHTAKEIKWGGAKHDPDDKDDGRKMHPRSSFKAFLEVVKRRSLPWEDVEMDAIHSLQLILRGSFQDIDDSDTKTMIHARLNDLKLQGMDELSTVANEMVRLIETATAPILAVDSSGFINGWNAKVAELTGLPVSEAMGRSLVKDLALEESVETVERLLYLALQGEEEQNVEIKLQTYGAQKDKGAVILIVNACSSRDVTENVVGVCFVGQDVTGQKVVMDKFTRIQGDYKAIVQNPNPLIPPIFGSDEFGYCSEWNPAMEKLAGWKREEVIGKMLVGEIFGTQMMCCRLKGQDAMTKFMIVLNSAMDGQDSEKFPFAFFDRQGKFVEALLTANKRTDSEGAFTGVFCFLQIASMELLQALTVQRATEKVAFSKLKELAYIRQEIKNPLYGIMFTRNLVEDTNLTEEQKQFIETSALCERQLRRILDDMDLESIEDGYLELDTAEFIMGTVMDAVISQGMITSREKGLQLIWDTPRDTKNLCLFGDQVRLQQVLADFLLNAIRFTPSSEGWVGIKGVSSRHRQGGGVHVVHFEFRVTHPGAGLPEELVQEMFDRGRGMTQEGLGLNMCRKLLKLMSGDVQYIREAGKCYFLVNVELPIAQRDDAGSVK

SEQ ID NO: 9639 - protein, 438 aa, Glycine max
  misc_feature (149)..(149): Xaa can be any naturally occurring amino acid
  misc_feature (204)..(204): Xaa can be any naturally occurring amino acid
MAITPFSSTSAAQWGIHPQLLLRSSITGKVASSSHNSTGRVSFMAATSSSFFSQDSTLLNVGAPQTFNHRKGSRLIVRANADYYSVLGVSRNASKSEIKSAYRKLARNYHPDVNKEPGAEQKFKEISNAYEVLSDDEKRSIYDRFGEAXGLKGSGMGMGDFSNPFDLFESLFEGMNRGAGSKSSWNGAIDGEDEYYSLGLNFKXAVFGIEKEIEISRLESCGTCNGSGAKPGTTPSRCSTCGGQGRVVSSTRTPLGIFQQSMTCSSCNGTGEISTPCNTCSGDGRVRKSKRISLKVPAGVDSGSRLRVRNEGNAGRRGGSPGDLFVVIEVIPDPILKRDDTNILYTCKVSYIDAILGTTIKVPTVDGTVDLKIPAGTQPNTTLVMAKKGVPFLNKDNMRGDQLVRVQVEIPKRLSNDERKLIEELADLSKGKTATGRR

SEQ ID NO: 9640 - protein, 121 aa, Oryza sativa Japonica Group; identical to SEQ ID NO: 7143

SEQ ID NO: 9641 - protein, 305 aa, Triticum aestivum
MAPLAPGRPAACLLALLSVVTALSLAAPGLAAGKTGQVTVFWGRNKAEGSLREACDSGMYTMVTMSFLDVFGAKGKYHLDLSGHDLSAVGADIKHCQSKGVPVSLSVGGYGTGYSLPSNRSALDLFDHLWNSYLGGSNPGVPRPFGDAWLDGIDLFLEHGTPADRYDVLALELAKHNIRGGPGKPLHLTATVRCGYPPAAHVGRALATGILERVHVRIYEESDKACNQYGAWEEAWDRWTAAYPATRFFIGLTADEKSYQWIHPKNVYYGITPVVQKKDNYGGVMLWDRYFDKQSDYSSYIKYYA

SEQ ID NO: 9642 - protein, 306 aa, Zea mays
MFFDHAIGINVPRSRFLPVKATSDLKLVQSDLYTLVDGFVTRNSARTNPSNPSIELGPEFKKVGSFLGRFKSIPSIVELDILKVSGDVWFGSGIVLKGKVTITAKPGVKLEILDGAVIGNKVHMLMHATEVHYQCPKRVRVQSDVSERIANGTSVHVKYPIYDQTVYLNDYHKKMLKDQYEGLKTIEQITMDSASVETNMFKLCKVRFVQFGQKGIPYLNTYDGRAIRYLDPLIKANDTIKIDLETNKIMDFIKFDVDNMVMVTGGRNTERVGVIKNREKHKGSFCCLELFAMSSFLLFVVQENLE

SEQ ID NO: 9643 - protein, 88 aa, Capsicum annuum
MSQDLKKVKQEDDQLKDSLPPAKREVNRCSGCRRKVGLTGFRCRCGELFCGEHRYSDRHDCSYDYKTAGREAIARENPVVKAAKIIKV

SEQ ID NO: 9644 - protein, 280 aa, Oryza sativa Japonica Group; identical to SEQ ID NO: 6918

SEQ ID NO: 9645 - protein, 372 aa, Pasteurella multocida subsp. multocida str. Pm70
MAKKDYYDVLGVERGADEKEIKRAYKKLAMKYHPDRTQGNKELEEKFKEIQEAYEVLSDKQKRANYDQYGHAAFEQGGFGGGGFSGADFGDIFGDMFGDIFGGGRARQRVVRGDDLRYDLEISLEEAVRGTTKDIQINTLAHCDSCDGSGAEKGSKVETCSTCHGAGRVRRQQGFFVTEQVCPSCHGSGKKIEKPCKSCHGDGRVHKKKNLSVKIPAGVDTGNQLRLSGEGAAGENGAPNGDLYVVIHVRDHHIFERDGSNLYCEVPISFTMAALGGEIEVPTLDGRVKLKIPAETQTGKLFRMRGKGVTSARSAYAGDLICKIIVETPVKLNEEQKALLRQLEESLEGSSNKPKSSSFFDGVKKFFDNLGK

SEQ ID NO: 9646 - protein, 523 aa, Vitis vinifera
MAILAGLHHRRPILSNSVQTNRKTTVCYLFSSRSSCRIQWFSSSTEFGGENAYDLLGVSESSSFDEIKASFRKLAKETHPDLAHSNNDSTASQRFIQILAAYEILSDTEKRAHYDRDLLSQRRLVQKYSRQGSTLYTYESHIMKRQMEVVEWLKWYRFAINEILSEKKVVAGSGYFDVLEGEFYSAIHAAYYGPLIESMDLLPDRFEAEERSEYETPEVLHLVSGRDLFGMVCIVKKLPELSHACNEKLTSFASLGLDMRQFVGDASMSMNSDAADDTGTSQMQAKNIKYHTSDAYKDLELHVSGKVVALATRIPPKSYYDGIQNEDSQDQIQVFLSSDEGSMHVSHGISKDSLLGGAVGLRIPLGTITGLGTNPEEGSCFVYDSSGTKTHAIIKHRTLMVKHMHWYQVGDEVSVCECRCSRARLPPSKYWLFEPRCGMHDIGGWYVETFGKDKKGWTIPSQRYWDGFDAHEQYEKRVHPAMYLLALAYRTLDLEDARRRKRTVRNIVEGKLFRILSWCKKMI

SEQ ID NO: 9647 - protein, 348 aa, Vaucheria frigida
MNGLTPPLMFCSRSDDPSSTSNINLDDVFADVFFNSNGELLDIDEIDDFGDNTCPKSSMSVDDDASSQVFQGHLFGNALSSIALSDSGDLSTGIYESQGNASRGKSLRTKSSGSISSELTEAQKVERRERNREHAKRSRVRKKFLLESLQQSVNELNHENNCLKESIREHLGPRGDSLIAQCSPEADTLLTDNPSKANRILEDPDYSLVKALQMAQQNFVITDASLPDNPIVYASRGFLTLTGYSLDQILGRNCRFLQGPETDPRAVDKIRNAITKGVDTSVCLLNYRQDGTTFWNLFFVAGLRDSKGNIVNYVGVQSKVSEDYAKLLVNEQNIEYKGVRTSNMLRRK

SEQ ID NO: 9648 - protein, 469 aa, Oryza sativa Indica Group
MAVAADVKLEGLRAATDKLDQISENEKSGFISLVSRYLSGEAEQIEWSKIQTPTDEVVVPYDTLSAAPEDLNETKKLLDKLVVLKLNGGLGTTMGCTGPKSVIEVRNGFTFLDLIVIQIESLNKKYGCNVPLLLMNSFNTHDDTQKIVEKYSNSNIEIHTFNQSQYPRIVTEDFLPLPSKGKTGKDGWYPPGHGDVFPSLNNSGKLDTLLAQGKEYVFVANSDNLGAIVDIKILNHLIHNQNEYCMEVTPKTLADVKGGTLISYEGRVQLLEIAQVPDEHVNEFKSIEKFKIFNTNNLWVNLKAIKRLVEAEALKMEIIPNPKEVDGVKVLQLETAAGAAIRFFEKAIGINVPRSRFLPVKATSDLLLVQSDLYTLVDGFVIRNPARTNPSNPSIELGPEFKKVANFLARFKSIPSIVELDTLKVSGDVWFGSGVTLKGKVTITAKSGKLEIPDGAVLENKHINGPEDL

SEQ ID NO: 9649 - protein, 180 aa, Lotus japonicus
QAACKFLRRKCMPGCIFAPYFPPEEPQKFANVHKIFGASNVTKLLNELLPHQREDAVNSLAYEAEARVRDPVYGCVGAISYLQRQVQRLQKELDSANADLLRFAYNELPQVTLPPVPPTITTIQQMVPSQRQYGGRFGNFEGTGFYRQSATTFSFPYALPWTDISSGGEGGIGGEGGGNL

SEQ ID NO: 9650 - protein, 72 aa, Chlamydomonas reinhardtii; identical to SEQ ID NO: 352

SEQ ID NO: 9651 - protein, 425 aa, Ostreococcus tauri
MVSDTRAREPTEGLGKDGPATGGGYASVELVTDERYAGEMWRRATLREFRWRARCLGVESDPAIARALGEMAALTVDLSEMSETQERSTARAPWWRDGEYDARRAEEANDRGMEAMSGKRYETACQRYELAIERCKTLLEDSLDRKYIIAETRWRMGDVDGALTEISSASFRDSYDEFSCKKCIELGARLLHLQDLINRAAREVEDAQFTNAIRLFDMILQRPEGRMRTRFRGRILRSRAECQLRRHEYDAADDPIARENLKQTARDLSECIALNGNDHEAYVLRAEMRLGRGDHQGAFTDLRSAQTIAPALRGIDKMVRDAAARALRGSSRANIKSEKDPCARGGKYYDVLGIKPDADLRAVKSAYRRLAAVWHPDKWIQASPEDAAAAETRFKIVQRAYATLSDVKQRKIYDLDPARLDAESS

SEQ ID NO: 9652 - protein, 369 aa, Thermotoga sp. RQ2
MKKEKKDYYEILGVPRDATQEEIKRAYKRLVKEWHPDRHPENRKEAEQRFKEIQEAYEVLSDPQKRAMYDRFGYVGEQPTYQETESGGFFDDIFREFENIFNRDIFDVFFGERPHQEERREYARRGEDIRYEIEVTLSDLINGAEIPVEYERYETCPRCGGTGVEPNAGYINCPSCGGTGRIREERRSFFGYFVSERTCERCGGTGKIPREYCHECGGSGRVLRKVRKTVKIPPNVEDGTQLRITGGGNAGYYGGPYGDLIVIVRVKPDPRFKKSGSDLVYDITIDYLQAILGTTVEVPLPEGGTTMLKIPPGTQPETVFRLKGKGLPNRYGRRGDLIVNVHVEIPKSLSREERKVLEELAKKRGVTID

SEQ ID NO: 9653 - protein, 321 aa, Bacteroides thetaiotaomicron VPI-5482
MAYIDYYKILGVDKSASQDDIKKAFRKLARKYHPDLNPNDPSAKDKFQEINEANEVLSDPEKRKKYDEYGEHWKHADEFEAQKKARQQAGGFGGAGGFGGFGGGGQGFSDGDGTYWYSSDGGKGFSGGNAGGFSDFFESMFGHRGRGQSSAGFRGQDFNAELHLSLRDAAQTHKQILTVNGKQVRITIPAGVADGQVIKLKGYGAEGVNGGPAGDLYITFVIAEDPVFKRLGDDLYVDVEVDLYTAVLGGDKVVDTLDGKVKLKIKPETQNGTKVRLKGKGFPVYKKEGQFGDLIVTYSVKIPTNLTEAQKELFRQLQSMN

SEQ ID NO: 9654 - protein, 377 aa, Mycoplasma pulmonis
MNKKEDYYKILGIDKSANEKEIKKAYRKLAMEHHPDRSSSKESEAKMREINEAYEVLSNPEKKAIYDKYGHEAANNPGFNGFNAGSAGFGNFGGFSNFGGFDSIFEEFFGGSRSHSKQNSNYPYPGESYSTQVKISFLDSVHGRVISQKLDKYKDCESCNGTGARSKSDIKTCSTCNGRGSVEKLVNSLFGKIKQSVTCSTCNGLGQEITHKCPSCKGAKKIKESISQKISIPAGVISGQEVLLRGFGGPGFNGGPNGDLYIRVYVTEHPYYQRINDDIYVDFPISIVNLILEKPVVVPTPYGDEKIKIKSTFKNDQIITFKGKGFKRKNRVGDLKIRLKFEIPNFSSKVKKNLESLLSETNDSINEDFVKKVNSIK

SEQ ID NO: 9655 - protein, 370 aa, Oryza sativa; identical to SEQ ID NO: 364

SEQ ID NO: 9656 - protein, 1122 aa, Armoracia rusticana
MSGSRPSQSSEGSRRSRHSARIIAQTTVDAKLHADFEESGSSFDYSTSVRVTGPVVENQPPRSDKVTTTYLHHIQKGKLIQPFGCLLALDEKTFKVIAYSENAPELLTMASHAVPSVGEHPVLGIGTDIRSLFTAPSASALQKALGFGDVSLLNPILVHCKTSAKPFYAIVHRVTGSIIVDFEPVKPYEVPMTAAGALQSYKLAAKAITRLQSLPSGSMERLCDTMVQEVFELTGYDRVMAYKFHEDDHGEVVSEVTKPGMEPYLGLHYPATDIPQAARFLFMKNKVRMIVDCNAKHARVLQDEKLSFDLTLCGSTLRAPHSCHLQYMANMDSIASLVMAVVVNEEDGEGDAPDSTTQPQKRKRLWGLVVCHNTTPRFVPFPLRYACEFLAQVFAIHVNKEVELENQIVEKNILRTQTLLCDMLMRDAPLGIVSQSPNIMDLVKCDGAALLYKDKIWKLGTTPSEFHLQEIASWLYEYHTDSTGLSTDSLYDAGFPKALSLGDAVCGMAAVRISSKDMIFWFRSHTAGEVRWGGAKHDPDDRDDARRMHPRSSFKAFLEVVKTRSLPWKDYEMDAIHSLQLILRNAFKDGESTDVNTKFIHSKLNDLKIDGIQELEAVTSEMVRLIETATVPILAVDSDGLVNGWNTKIAELTGLPVDEAIGKHLLTLVEDSSVEIVKRMLENALEGTEEQNVQFEIKTHLSRADAGPISLVVNACASRDLHENVVGVCFVAHDLTGQKTVMDKFTRIEGDYKAIIQNPNPLIPPIFGTDEFGWCTEWNPAMSKLTGLKREEVIDKMLLGEVFGTQTACCRLKNQEAFVNLGIVLNSAVTSQESEKVSFAFFTRGGKYIECLLCVSKKLDREGVVTGVFCFLQLASHELQQALHVQRLAERTALKRLKTLAYIKRQIRNPLSGIMFTRKMMEGTELGPEQRQILQTSSLCQKQLSKVLDDSDLERIIEGCLDLEMKEFSLNEVLTASTSQVMMKSNGKSVRITNETGEEVMSDTLYGDSIRLQQVLADFMLMSVNFTPSGGQLTVTASLRKDQLGRSVHLAYLEIRLTHTGAGIPELLLNQMFGTEKDVSEEGLSLMVSRKLVKLMNGDVQYLRQAGKSSFIISAELAAANK

SEQ ID NO: 9657 - protein, 559 aa, Gibberella moniliformis
MPSLGFLKEKRTREGNSDPSASSPTSPVTPTTSRSKSISKAFHLPRTSRQSTSAPSAQPTNGQSQQQPDQIQEGAVSQSNQSSAPNEQTTAATDGQQQEDMSAINLHQPSYGAGSPMNHDHQNLPSINNLINPPQQQQQHNAQGNSYNNGQTNPQYLAATIDSHRPQTVSPGTDPAALQQQQQQALPQPSMPPQQQQSQAQQQHQQNQSQNQAQQQQQYQHQPHHQQNASTGSVMRVTKGKYSLGDFDILRTLGTGSFGRVHLVQSKHNQRFYAVKVLKKAQVVKMKQVEHTNDERRMLADVKHPFLITLWGTFQDPKNLYMVMDFVEGGELFSLLRKSGRFPNPVAKFYAAEVTLALEYLHSKNIIYRDLKPENLLLDRHGHLKITDFGFAKRVPDKTWTLCGTPDCLAPEVVSNKGYNKSVDWWSLGILIYEMLCGYTPFWDSGSPMKIYENILKGKVKYPAYVNADAQNLLERLITADLTKRLGNLYGGPDDVKNHPWFAEVTWDRLARKDIDAPYTPPVKAGAGDASQFDRYPEDPEKYGVVTAPDEYGHMFTEF

SEQ ID NO: 9658 - protein, 454 aa, Physcomitrella patens subsp. patens
MGHKLVWEELGGSVGDLGTFVPIVLALVLVNGLDLGTTLVFTGAYNVVTGLLFGVPMPVQPMKSIAAVAITEGDPLSLNQIMAAGLSTALVLAILGITGLMSVVNRLVPLPVVRGVQLSQGIAFGITAVKYILKEQDLTKGKTTGDRPWLGMDGLVMALSALCFIVLTTGAGGGGIHECGSDNVGLLEGAEDESITRRERRMREGRFVGLPTALLVFIVGVLLAIARDPGVISKLHFGPSIPHFLTITKEDWKIGFMRAAIPQLPLSILNSVIAVCKLSNDLFPSKDVSPFKVSVSVGLMNLVGCWWGAMPVCHGAGGLAGQYRFGAKTGMAVVFLGSAKMFLGLVFGTSLVQLLAQFPIGLLGVLLLFSGLELAMACRDQNMRTDAFVMLTVSVISLTNSSSALGFGCGTALSALLHARNMDLWVRLWRRVSHRGPASRRSPSGYDILSQNPP

SEQ ID NO: 9659 - protein, 494 aa, Pisum sativum; identical to SEQ ID NO: 6112

SEQ ID NO: 9660 - protein, 1122 aa, Armoracia rusticana
MSGSRPSQSSEGSRRSRHSARIIAQTTVDAKLHADFEESGSSFDYSTSVRVTGPVVENQPPRSDKVTTTYLHHIQKGKLIQPFGCLLALDEKTFKVIAYSENSPELLTMASHAVPSVGEHPVLGIGTDIRSLFTAPSASALQKALGFGDVSLLNPILVHCKTSAKPFYAIVHRVTGSIIVDFEPVKPYEVPMTAAGALQSYKLAAKAITRLQSLPSGSMERLCDTMVQEVFELTGYDRVMAYKFHEDDHGEVVSEVTKPGLEPYLGLHYPATDIPQAARFLFMKNKVRMIVDCNAKHARVLQDEKLSFDLTLCGSTLRAPHSCHLQYMANMDSIASHVMAVVVNEEDGEGDATDSTTQPQKRKRLWGLVVCHNTTPRFVPFPLRYACEFLAQVFAIHVNKEVELENQIVEKNILRTQTLLCDMLMRDAPLGIVSQSPNIMDLVKCDGAALLYKDKIWKLGTTPSELHLQEIASWLYEYHTDSTGLSTDSLHDAGFPKALSLGDAVCGMAAVRISLKDMIFWFRSHTAGEVRWGGAKHNPDDRDDARRMHPRSSFKAFLEVVKTRSLPWKDYEMDAIHSLQLILRNAFKDGESTDVNTNIIHSKLNDLKIDGIQELEAVTSEMVRLIETATVPILAVDSDGLVNGWNTKIAELTGLPVDEAIGKHLLTLVEDSSVEIVKRMLENALEGTEEQNVQFEIKTHQSRADAGTISLAVNACASRDLHENVVGVCFVAHDLTGQKTVMDKFTRIEGDYKAIIQNPNPLIPPIFGTDEFGWCTEWNPAMSKLTGLKREEVIDKMLLGEVFGTQKSCCRLKNQEAFVNLGIVLNGAVTSQESEKVSFAFFTRGGKYIECLLCVSKKLDREGVVTGVFCFLQLASHELQQALHVQRLAERTALKRLKAIAYIKRQIRNPLSGVMFTRKMMEGTELGPEQRQILHTSALCQEQLSKVLDDSDLESIIEGCLDLEMKEFSLNEVLTASTSQVMMKSNGKSVRITNETGEEVMSDTLYGDSIRLQQVLADFMLMSVNFTPSGGQLTVTASLRKDQLGRSVHLAYLEIRLTHTGAGIPEFLLNQMFGTEEDVSEEGLSLMVSRKLVKLMNGDVQYLRQAGKSSFIISAELAAANK

SEQ ID NO: 9661 - protein, 362 aa, Arabidopsis thaliana
MEGKIAISETTNLLQRIKDFTQSVVEDLAEGRSPKISISQFRNYCMNPEADCLCSSDKPKGQEILTLKKEPQTYRIDMLLRVLLIVQQLLQENRHASKRDIYYMHPSAFKAQSIVDRAIGDICILFQCSRYNLNVVSVGNGLVMGWLKFREAGRKFDCLNSLNTAYPVPVLVEEVEDIVSLAEYILVVEKETVFQRLANDMFCKTNRCIVITGRGYPDVSTRRFLRLLMEKLHLPVHCLVDCDPYGFEILATYRFGSMQMAYDIESLRAPDMKWLGAFPSDSEVYSVPKQCLLPLTEEDKKRTEAMLLRCYLKREMPQWRLELETMLKRGVKFEIEALSVHSLSFLSEIYIPSKIRRELSSP

SEQ ID NO: 9662 - protein, 1122 aa, Armoracia rusticana
MSGSRPSQSSEGSRRSRHSARIIAQTTVDAKLHADFEESGSSFDYSTSVRVTGPVVENQPPRSDKVTTTYLHHIQKGKLIQPFGCLLALDEKTFKVIAYSENAPELLTMASHAVPSVGEHPVLGIGTDIRSLFTAPSASALQKALGFGDVSLLNPILVHCKTSAKPFYAIVHRVTGSIIVDFEPVKPYEVPMTAAGALQSYKLAAKAITRLQSLPSGSMERLCDTMVQEVFELTGYDRVMAYKFHEDDHGEVVSEVTKPGLEPYLGLHYPATDIPQAARFLFMKNKVRMIVDCNAKHARVLQDEKLSFDLTLCGSTLRAPHSCHLQYMANMDSIASLVMAVVVNEEDGEGDAPDSTTQPQKRKRLWGLVVCHNTTPRFVPFPLRYACEFLAQVFAIHVNKEVELENQIVEKNILRTQTLLCDMLMRDAPLGIVSQSPNIMDLVKCDGAALLYKDKIWKLGTTPSELHLQEIASWLYEYHTDSTGLSTDSLHDAGFPKALSLGDAVCGMAAVRISLKDMIFWFRSHTAGEVRWGGAKHNPDDRDDARRMHPRSSFKAFLEVVKTRSLPWKDYEMDAIHSLQLILRNAFKDGESTDVNTNIIHSKLNDLKIDGIQELEAVTSEMVRLIETATVPILAVDSDGLVNGWNTKIAELTGLPVDEAIGKHLLTLVEDSSVEIVKRMLENALEGTEEQNVQFEIKTHQSRADAGTISLAVNACASRDLHENVVGVCFVAHDLTGQKTVMDKFTRIEGDYKAIIQNPNPLIPPIFGTDEFGWCTEWNPAMSKLTGLKREEVIDKMLLGEVFGTQKSCCRLKNQEAFVNLGIVLNGAVTSQESEKVSFAFFTRGGKYIECLLCVSKKLDREGVVTGVFCFLQLASHELQQALHVQRLAERTALKRLKAIAYIKRQIRNPLSGVMFTREMIEGTELGPEQRQILHTSALCQEQLSKVLDDSDLESIIEGCLDLEMKEFSLNEVLTASTSQVMMKSNGKSVRITNETGEEVMSDTLYGDSIRLQQVLADFMLMSVNFTPSGGQLTVTASLRKDQPGRSVHLAYLEIRLTHTGAGIPEFLLNQMFGTEEDVSEEGLSLMVSRKLVKLMNGDVQYLRQAGKSSFIISAELAAANK

SEQ ID NO: 9663 - protein, 720 aa, Saccharomyces cerevisiae YJM789
MTQQEYRSPSQRLSKGRSMSLPKIFARNLRSLQNNAPPGKNINVNCLNVNSCSLSASPSSQINMACNGNKQDLPIPFPLHVECNDSWSSSKLNKFKSMFNHNRSKSSGTTDASTSEKGTHKREPRSTIHTELLQSSIIGEPNVHSTTSSTLIPNEAICSTPNEISGSSSPDAELFTFDMPTDPSSFHTPSSPSYIAKDSRNLSNGSLNDINENEELQNFHRKISENGSASPLANLSLSNSPIDSPRKNSETRKDQIPMNITPRLRRAASEPFNTAKDGLMREDYIALKQPPSLGDIVEPRRSRRLRTKSFGNKFQDITVEPQSFEKIRLLGQGDVGKVYLVRERDTNQIFALKVLNKHEMIKRKKIKRVLTEQEILATSDHPFIVTLYHSFQTKDYLYLCMEYCMGGEFFRALQTRKSKCIAEEDAKFYASEVVAALEYLHLLGFIYRDLKPENILLHQSGHVMLSDFDLSIQATGSKKPTMKDSTYLDTKICSDGFRTNSFVGTEEYLAPEVIRGNGHTAAVDWWTLGILIYEMLFGCTPFKGDNSNETFSNILTKDVKFPHDKEVSKNCKDLIKKLLNKNEAKRLGSKSGAADIKRHPFFKKVQWSFLRNQDPPLIPALNDNGCELPFILSCNKHPKRNSVSEQETKMFCEKVANDDEIDEADPFHDFNSMSLTKKDHNILTYSENYTYGKILYKATCTRPRHNSSHRSFFKDIIPEL

SEQ ID NO: 9664 - protein, 354 aa, Glomus mosseae
MAVANKSNTQTLAKYLSLDQGGKIQAEYIWIDGDGGLRGKTTTLDFKPTDVSELKEWNFDGSSTNQAPGDNSDILLRPCAIFKDPFRGGDNILVLAECYNNDGTPNRTNYRHSCTKLMSAHSEAKPWFGIEQEYTLFDMDGQVLGWPKGGFPGPQGPYYCSVGANVAFGRDVVEAHYRACLYSGVNISGVNGEVMPGQWEYQVGPCEGIDMGDHLWVSRYLLQRVAEDFGIVVSFHPKPIKGDWNGAGCHTNYSTEAMRIEGGIKAIHDAIDRMSKRHAEHIAVYGEDNDKRLTGRHETGHISEFSFGVANRGASIRIPRHVAAQGYGYFEDRRPASNIDPYRVTEVIVESTLG

SEQ ID NO: 9665 - protein, 387 aa, Methanosarcina thermophila
MATTRDYYEILGLSRDATPEDIKKSYRKLALKYHPDRNKEPGAEEKFKEISEAYAVLSDPEKRAQYDRFGHAGINGQYTAEDIFRGADFSGFGDIFEMFFGGSRRGPRGPRRGSDLQYDLYITFEEAAFGVRKDIDVPRTERCSNCSGTGARPGTSPKRCPTCGGTGQIRTTRTGLGMQFVSTTTCSTCRGKGQVIESPCPVCSGTGRVRNTRKITVNVPAGADSGMSLRLSGEGDAGDPGAPPGDLYVVLHVMEHKIFKRVDYDVISEVPISFAQAALGTDIMVDTLYGKVKMNIPAGTPTHSVFKIKEKGIQHLHGNRRGDQLVRVVIKTPTNLSHEQKRNFFASLKALSSGKNPGGEKGRYDKFTEKSKKSKGFFEKVKDAFES

SEQ ID NO: 9666 - protein, 434 aa, Oryza sativa
  misc_feature (399)..(399): Xaa can be any naturally occurring amino acid
  misc_feature (419)..(419): Xaa can be any naturally occurring amino acid
MRVPPLTSANVLGVTSIQYSFWLWIRWFKILMSTIAPKLSEFATKTYSLPCANKVSSFPLLFKEGNTSPWPGGYQPSLPVFPLLGSDKKYGCNVPLLLMNSFNTHDDTQKIVEKYSNSNIEIHTFNQSQYPRIVTEDFLPLPSKGKTGKDGWYPPGHGDVFPSLNNSGKLDTLLAQGKEYVFVANSDNLGAIVDIKILNHLIHNQNEYCMEVTPKTLADVKGGTLISYEGRVQLLEIAQVPDEHVNEFKSIEKFKIFNTNNLWVNLKAIKRLVEAEALKMEIIPNPKEVDGVKVLQLETAAGAAIRFFEKAIGINVPRSRFLPVKATSDLLLVQSDLYTLVDGFVIRNPARTNPSNPSIELGPEFKKVANFLARFKSIPSIVELDTLKVSGDVWFGSGXVTLKGKVTITAKSGKLEIPXGAVLENKDINGPEDL

SEQ ID NO: 9667 - protein, 1162 aa, Arabidopsis thaliana
GVGGRGGGRGGGRGGEEEPSSSHTPNNRRGGEQAQSSGTKSLRPRSNTESMSKAIQQYTVDARLHAVFEQSGESGKSFDYSQSLKTTTYGSSVPEQQITAYLSRIQRGGYIQPFGCMIAVDESSFRIIGYSENAREMLGIMPQSVPTLEKPEILAMGTDVRSLFTSSSSILLERAFVAREITLLNPVWIHSKNTGKPFYAILHRIDVGVVIDLEPARTEDPALSIAGAVQSQKLAVRAISQLQALPGGDIKLLCDTVVESVRDLTGYDRVMVYKFHEDEHGEVVAESKRDDLEPYIGLHYPATDIPQASRFLFKQNRVRMIVDCNATPVLVVQDDRLTQSMCLVGSTLRAPHGCHSQYMANMGSIASLAMAVIINGNEDDGSNVASGRSSMRLWGLVVCHHTSSRCIPFPLRYACEFLMQAFGLQLNMELQLALQMSEKRVLRTQTLLCDMLLRDSPAGIVTQSPSIMDLVKCDGAAFLYHGKYYPLGVAPSEVQIKDVVEWLLANHADSTGLSTDSLGDAGYPGAAALGDAVCGMAVAYITKRDFLFWFRSHTAKEIKWGGAKHHPEDKDDGQRMHPRSSFQAFLEVVKSRSQPWETAEMDAIHSLQLILRDSFKESEAAMNSKVVDGVVQPCRDMAGEQGIDELGAVAREMVRLIETATVPIFAVDAGGCINGWNAKIAELTGLSVEEAMGKSLVSDLIYKENEATVNKLLSRALRGDEEKNVEVKLKTFSPELQGKAVFVVVNACSSKDYLNNIVGVCFVGQDVTSQKIVMDKFINIQGDYKAIVHSPNPLIPPIFAADENTCCLEWNMAMEKLTGWSRSEVIGKMIVGEVFGSCCMLKGPDALTKFMIVLHNAIGGQDTDKFPFPFFDRNGKFVQALLTANKRVILEGKVIGAFCFLQIPSPELQQALAVQRRQDTECFTKAKELAYICQVIKNPLSGMRFANSLLEATDLNEDQKQLLETSVSCEKQISRIVGDMDLESIEDGSFVLKREEFFLGSVINAIVSQAMFLLRDRGLQLIRDIPEEIKSIEVFGDQIRIQQLLAEFLLSIIRYAPSQEWVEIHLSQLSKQMADGFAAIRTEFRMACPGEGLPPELVRDMFHSSRWTSPEGLGLSVCRKILKLMNGEVQYIRESERSYFLIILELPVPRKRPLSTASGSGD

SEQ ID NO: 9668 - protein, 220 aa, Pyrus communis
CDFEPVKPYEVPMTAAGALQSYKLAAKAIAAIARLQSLPSGSMERLCDTMVQEVSELTGYDRVMAYKFRDDDHGEVVSEITKPGLEPYLGLHYPSTDIPQASRFLFMKNKVRMIVDCCAKQVKVLQDEKVPFDLTLCGSTLRAPHSCHLQYMKNMDSIASLVMAVVVNEGDDEVASPDSVQPQKRKRLWGLVVCHNTSLRFVPFPLRYACEFLAQVFAIP

SEQ ID NO: 9669 - protein, 1158 aa, Arabidopsis thaliana
GVGGSGGGRGGEEEPSSSHTPNNRRGGEQAQSSGTKSLRPRSNTESMSKAIQQYTVDARLHAVFEQSGESGKSFDYSQSLKTTTYGSSVPEQQITAYLSRIQRGGYIQPFGCMIAVDESSFRIIGYSENAREMLGIMPQSVPTLEKPEILAMGTDVRSLFTSSSSILLERAFVAREITLLNPVWIHSKNTGKPFYAILHRIDVGVVIDLEPARTEDPALSIAGAVQSQKLAVRAISQLQALPGGDIKLLCDTVVESVRDLTGYDRVMVYKFHEDEHGEVVAESKRDDLEPYIGLHYPATDIPQASRFLFKQNRVRMIVDCNATPVLVVQDDRLTQSMCLVGSTLRAPHGCHSQYMANMGSIASLAMAVIINGNEDDGSNVASGRSSMRLWGLVVCHHTSSRCIPFPLRYACEFLMQAFGLQLNMELQLALQMSEKRVLRTQTLLCDMLLRDSPAGIVTQSPSIMDLVKCDGAAFLYHGKYYPLGVAPSEVQIKDVVEWLLANHADSTGLSTDSLGDAGYPGAAALGDAVCGMAVAYITKRDFLFWFRSHTAKEIKWGGAKHHPEDKDDGQRMHPRSSFQAFLEVVKSRSQPWETAEMDAIHSLQLILRDSFKESEAAMNSKVVDGVVQPCRDMAGEQGIDELGAVAREMVRLIETATVPIFAVDAGGCINGWNAKIAELTGLSVEEAMGKSLVSDLIYKENEATVNKLLSRALRGDEEKNVEVKLKTFSPELQGKAVFVVVNACSSKDYLNNIVGVCFVGQDVTSQKIVMDKFINIQGDYKAIVHSPNPLIPPIFAADENTCCLEWNMAMEKLTGWSRSEVIGKMIVGEVFGSCCMLKGPDALTKFMIVLHNAIGGQDTDKFPFPFFDRNGKFVQALLTANKRVSLEGKVIGAFCFLQIPSPELQQALAVQRRQDTECFTKAKELAYICQVIKNPLSGMRFANSLLEATDLNEDQKQLLETSVSCEKQISRIVGDMDLESIEDGSFVLKREEFFLGSVINAIVSQAMFLLRDRGLQLIRDIPEEIKSIEVFGDQIRIQQLLAEFLLSIIRYAPSQEWVEIHLSQLSKQMADGFAAIRTEFRMACPGEGLPPELVRDMFHSSRWTSPEGLGLSVCRKILKLMNGEVQYIRESERSYFLIILELPVPRKRPLSTASGSGD

SEQ ID NO: 9670 - protein, 1162 aa, Arabidopsis thaliana
GVGGSGGGRGGGRGGEEEPSSSHTPNNRRGGEQAQSSGTKSLRPRSNTESMSKAIQQYTVDARLHAVFEQSGESGKSFDYSQSLKTTTYGSSVPEQQITAYLSRIQRGGYIQPFGCMIAVDESSFRIIGYSENAREMLGIMPQSVPTLEKPEILAMGTDVRSLFTSSSSILLERAFVAREITLLNPVWIHSKNTGKPFYAILHRIDVGVVIDLEPARTEDPALSIAGAVQSQKLAVRAISQLQALPGGDIKLLCDTVVESVRDLTGYDRVMVYKFHEDEHGEVVAESKRDDLEPYIGLHYPATDIPQASRFLFKQNRVRMIVDCNATPVLVVQDDRLTQSMCLVGSTLRAPHGCHSQYMANMGSIASLAMAVIINGNEDDGSNVASGRSSMRLWGLVVCHHTSSRCIPFPLRYACEFLMQAFGLQLNMELQLALQMSEKRVLRTQTLLCDMLLRDSPAGIVTQSPSIMDLVKCDGAAFLYHGKYYPLGVAPSEVQIKDVVEWLLANHADSTGLSTDSLGDAGYPGAAALGDAVCGMAVAYITKRDFLFWFRSHTAKEIKWGGAKHHPEDKDDGQRMHPRSSFQAFLEVVKSRSQPWETAEMDAIHSLQLILRDSFKESEAAMNSKVVDGVVQPCRDMAGEQGIDELGAVAREMVRLIETATVPIFAVDAGGCINGWNAKIAELTGLSVEEAMGKSLVSDLIYKENEATVNKLLSRALRGDEEKNVEVKLKTFSPELQGKAVFVVVNACSSKDYLNNIVGVCFVGQDVTSQKIVMDKFINIQGDYKAIVHSPNPLIPPIFAADENTCCLEWNMAMEKLTGWSRSEVIGKMIVGEVFGSCCMLKGPDALTKFMIVLHNAIGGQDTDKFPFPFFDRNGKFVQALLTANKRVSLEGKVIGAFCFLQIPSPELQQALAVQRRQDTECFTKAKELAYICQVIKNPLSGMRFANSLLEATDLNEDQKQLLETSVSCEKQISRIVGDMDLESIEDGSFVLKREEFFLGSVINAIVSQAMFLLRDRGLQLIRDIPEEIKSIEVFGDQIRIQQLLAEFLLSIIRYAPSQEWVEIHLSQLSKQMADGFAAIRTEFRMACPGEGLPPELVRDMFHSSRWTSPEGLGLSVCRKILKLMNGEVQYIRESERSYFLIILELPVPRKRPLSTASGSGD

SEQ ID NO: 9671 - protein, 299 aa, Glycine max
MAALKQVSSLLLFPLFLIFSLFKSSHAGGIAVYWGQNGNEGSLEEACNTDNYQYVNIGFLNVFGNNQIPQLNLAGHCNPSTNECTGLSNDINVCQSKGIKVFLSLGGAVGSYSLNSASEATDLAAYLWDNFLGGQSNSRPFGDAVLDGIDFDIEDGSGQYYGDLARELDAYSQQRKVYLAAAPQCPYPDAHLDSAIATGLFDYVWVQFYNNPQCHYTSGNIDNLVSAWNQWTSSEAKQVFLGLPASEAAAPSGGYIPPDVLISDVLPAISGSPKYGGVMIWDRFNDGQSGYSDAIKASV

SEQ ID NO: 9672 - protein, 169 aa, Zea mays
MDGGGSGNASGGSGGASTCCYYALLGIRKNASATDIRAAYRRLAMKWHPDRWASDPGAAGEANQRFQRIQEAYSVLSDKGKKAMYDAGLFDPLDDDDQDFSDFMQEMLVMMDSVKNEKPDTLEDLQKMLADIVNGNGGDGVGGRVPPAPPDVARRTGVAPHPQPQQGGR

SEQ ID NO: 9673 - protein, 451 aa, Oryza sativa
MATGNSPSEVTLPYPPPWRRIFPITITVKCNGATSFTITASVRSSRIHLQRHCRKPATSSTINLCPGNKQYKQTTAALRPAAAAPRPAAVASGPAVAALGPGGVVALRGSGRGREGAAAAELPRARARSTKQYTMATRANGSSCSLASLMAAIFFLLVVSSRGAHGGRIAIYWGQNGNEGTLADTCATGNYAFVNLAFLCSFGSGQAPQLNLAGHCDAYSGACANLTADIARCQSMGVKVLLSIGGGAGGYSLASKQDVSHLARYLWESFLGGRPSAPGGRRPLGDAVLDGVDFDIEGGGGDPRYYGDLAAYLKAYSGKGAAGKEVLLSAAPQCPFPDQWVGKALDTGLFDYVWVQFYNNPPCQYAAGSGGGAANLLDAWRQWTSGVEARYIFLGLPASPGAAGSGFIPVGSLESQVLPALKASSKYGGVMLWSRYYDDQDGYSSAIKNAV

SEQ ID NO: 9674 - protein, 539 aa, Magnaporthe grisea
MPSLGFLKKKRTRDGNNDNSSQPASPVTPTAAQSFEQAQVLGAPSAINNSHAHTQQQSYLVPQPGYSVGTEVQAQQPQMNSISQQQQQAFAPPAHTPSPGTIDPQQSLPSISNLMNPAVQQQNSQPSANFQPQSQSQSQSQSQFPLPPSHGNGDQSQQQNFQVQQQIQSQQDAMDIQPSQVQDQSHSQQAQPQHQPQHHVQHHVNHAHQGSQDQQTRVTKGKYSLTDFEILRTLGTGSFGRVHLVQSRHNQRFYAVKVLKKAQVVKMKQVEHTNDERKMLGEVKNPFLITLWGTFQDCRNLYMVMDFVEGGELFSLLRKSGRFPNPVAKFYAAEVTLALEYLHAKNIIYRDLKPENLLLDRHGHLKITDFGFAKRVPDKTWTLCGTPDYLAPEVVSNKGYNKSVDWWSLGILIYEMLCGYPPFWDSGSPMKIYENILKGKVRYPAYINPDAQDLLQRLITADLTKRLGNLYGGSQDVRNHPWFAEVTWDRLARKDIDAPYTPPVKAGAGDASQFDRYPEETERYGQTGHDEYGNLFPGF

SEQ ID NO: 9675 - protein, 240 aa, Zea mays
MAAANGDACRSVGGVPRPTNPMVTPLLTDLYQFTMAYAYWKAGKHLDRAVFDLYFRKNPFGGEFTIFGGLEECIRFIANFKFTEEEIKFLRSVMPACEDDFFEYLRSIDCSDVEVYAIPEGYAVFPKVPLMRIEGPVAVVQLLETPFLSLVNYASLVTTNAARHRLVAGKSKNLLEFGLRRAQGPDGGISASRYCYMGGFDATSNVAAGRLFGIPIRGTHSHAFVSSFMGLDEITDKTLT

SEQ ID NO: 9676 - protein, 302 aa, Arabidopsis lyrata subsp. petraea
MTNINLLKHVIYLLFFISCFLTKPSDAFRGGIAIYWGQNGNEGNLSATCATGRYAYVNVAFLVKFGNGQTPELNLAGHCNPAANTCTHFGSQVKDCQSRGIKVMLSLGGGIGNYSIGSREDAKVVTDYLWNNFLGGKSSSRPLGDAVLDGIDFNIELGSPQHWDDLARSLSKLSHRGRKVYLTGAPQCPFPDRLMGSALNTRRFDYVWIQFYNNPACSYSSGNTQNLFDSWNKWTTSITAQKIFLGLPAAPEASGSGYIPPDVLTSQILPTLKKSRKYGGVMLWSKFWDDKNGYSSSILASV

SEQ ID NO: 9677 - protein, 387 aa, Bdellovibrio bacteriovorus HD100
MAKLLSIRDLKIDIPKEARILADKMLKDLESSKRPVLEAVKTSLDNSLYNAKVGYLTPGDKVVRTELNVSSVQKLARVVFLLEMLLRNLETGTVNTKRELYYMCKGEIKGNPRLKPLDFDDQPESDAIIDFIGDMLEVYREELNVFANDRGGQTYSQQLVVTETLTDGDKAVIDLSTLGTSPFQPKNKPQALKLKAKKKIDFCLIVESEGTANTLVTMGFTKRNNCIVMGAQGVPSNGVRGWAKLIQEELDVPMYFFGDLDAYTMQNIFRTLKAGSAASLIRNADFSAPNVKFLGVLPEDVKKYDLPHYKVKESDPAEARALKKAKDALENDPFFLDKKNKNLADILRWLIKEKIRCEQQSFFSVDPKDPIKTEKLILEKIKRGSYV

SEQ ID NO: 9678 - protein, 782 aa, Oryza sativa Japonica Group; identical to SEQ ID NO: 2544

SEQ ID NO: 9679 - protein, 374 aa, Wigglesworthia glossinidia endosymbiont of Glossina brevipalpis
MAKSDYYDILGISKNASDREIKTAYKRLAVKFHPDRNPGNLEAESKFKEIKEAYEVLLDPKKRAAYNQYGHTAFDQGSSNTEFTSNADFSDIFGDVFGDIFGNNRRKRSNRGSDLQYNINLSLEEAVKGISKEITIPKLERCNICSGKGMQPGTSAQNCSTCNGQGQIQMRQGFFSVQQTCPSCRGKCKIIRFPCRNCSGQGRVERSKNISIRIPAGVDNGDKIRLSGEGEAGKLGGSSGDLYVKISVKEHPIFKREEHNLYCEVPINFAMAALGGDIEVPALDGRVKLRIPAETQTGRLFRMRGKGVKSIRSGHQGDLLCRVVVETPVRLSEKQKSLLKELGISFVGRTGMYNSPRSKSFFDGVKKFFDGLTN

SEQ ID NO: 9680 - protein, 49 aa, Ilex canariensis
WEFQVGPSVGIEAGDHIWCARYLLERITEQAGVVLTLDPKPIEGDWNGA

SEQ ID NO: 9681 - protein, 464 aa, Arabidopsis thaliana
METTTTPLLPGDRSRCGWLRRRLRLKNPLSSELSGAVGDLGTFIPIVLTLTLVSNLDLSTTLIFTGFYNIATGLLFDIPMPVQPMKSIAAVAVSESPHLTPSQIAAAGASTAATLLLLGATGAMSFLYNIIPLPVVRGVQLSQGLQFAFTAIKYVRFNYDTATLKPSSSPRIWLGLDGLILALAALLFIILSTGSGNDREAEDGDLAETSSNESQSRRRRLRLLSSIPSALIVFALGLVLCFIRDPSIFKDLKFGPSKFHILRISWDDWKIGFLRAAIPQIPLSVLNSVIAVCKLSNDLFDKELSATTVSISVGVMNLIGCWFGAMPVCHGAGGLAGQYRFGARSGLSVIFLGIGKLIVGLVFGNSFVRILSQFPIGILGVLLLFAGIELAMASKDMNSKEDSFIMLVCAAVSMTGSSAALGFGCGVVLYLLLKLRTLDCSSVTLFSRSSDESQVDSEAAPRDV

SEQ ID NO: 9682 - protein, 588 aa, Oryza sativa
  misc_feature (565)..(565): Xaa can be any naturally occurring amino acid
MASAAAPKRCYYEVLGVPRDCSPADIKLAFRRLALSLHPDKQPPGSDVAAATAAFQELQHAHSVLSDPHERSYYDSHRSQILFSDHHPSSGPGRGGGVASASASPVPDLFAFFSSSAFSGFSDSGRGFYKVYGDVFDRVFAQELAYARRMGMPADAVPTPPVIGNLDSPHAQVAAFYSYWLGFGTAMDFGWAAEWDAARGESRRVRRLMEEDNKKATRKARREYNDAVRGLAAFCKKRDKRVVDMALKKKVEEEKRKAEEAARKKEEERRRKERAMAYQEPEWARVDEDEAAVFEDDEEEETRAKRKEELYCVACNKKFKSDKQWKNHEQSKKHRDKVSELRMVFEEEEEALKDAEEEEPEEVDVGFDFQPAQESEESEFSDAAEELADELSEGLEVRDEEEKGDKHLGNGEQKVGSYDETSVLEEMLSRSRRKNRKSGFVAPQEEASPAGAMDDDDDEDTSYEINNVKKKGRRRRAAKKGGTYADNGQGRKSENQPEESRHNNDENGADDKMEGPSSNEDSAAASKEDQQKGKTGNTKKNKKGTEKNTTISSEQKGTSKGKKQXRNKLFSHLEETGHAMLKTRQKNR

SEQ ID NO: 9683 - protein, 370 aa, Saccharomyces cerevisiae
MAEASIEKTQILQKYLELDQRGRIIAEYVWIDGTGNLRSKGRTLKKRITSIDQLPEWNFDGSSTNQAPGHDSDIYLKPVAYYPDPFRRGDNIVVLAACYNNDGTPNKFNHRHEAAKLFAAHKDEEIWFGLEQEYTLFDMYDDVYGWPKGGYPAPQGPYYCGVGAGKVYARDMIEAHYRACLYAGLEISGINAEVMPSQWEFQVGPCTGIDMGDQLWMARYFLHRVAEEFGIKISFHPKPLKGDWNGAGCHANVSTKEMRQPGGTKYIEQAIEKLSKRHAEHIKLYGSDNDMRLTGRHETASMTAFSSGVANRGSSIRIPRSVAKEGYGYFEDRRPASNIDPYLVTGIMCETVCGAIDNADMTKEFERESS

SEQ ID NO: 9684 - protein, 214 aa, Prunus dulcis
TGVRPYEVPMTAAGALQSYKLAVKAIARLQSLPSGSMERLCDTMVQEVFELTGYDRVMAYKFHDDDHGEVVSEITKPGLEPYLGLHYPSTDIPQASRFLFMKNKVRMIVDCCAKQVKVLQDEKLPFDLTLCGSTLRAPHSYHLQYMKNMESIASLVMAVVVNEGDDEVASPDSVQPQKRKRLWGLVVCHNTSPRFVPFPLRYACEFLAQVFPYT

SEQ ID NO: 9685 - protein, 356 aa, Fusarium phaseoli
MATSAPVTSRTETLAKYLKLDQKGQIMAEYVWVDAAGETRSKSRTLPEKDYKAEDLPVWNFDGSSTNQAPGDNSDVYLRPCAVYPDPFRGSPNIIVLAECWNAGGTPNKFNFRHDCVKVMDTYAEDEPWFGLEQEYTLLGPDNRPYGWPTGGFPAPQGEYYCGVGTGKVVQRDIVEAHYKACLYAGIQISGTNAEVMPAQWEYQVGPCLGIEMGDQLWVSRFFLARITEEFGAKVSLHPKPIAGDWNGAGLHSNFSTKAMREEGGMKVIEEALKKLEPHHAECIAEYGEDNELRLTGRHETGSIDSFSWGVANRGTSIRAPRETAAKGYGYFEDRRPASNADPYRVTKALLQFSLA

SEQ ID NO: 9686 - protein, 1168 aa, Arabidopsis thaliana
MVSGVGGSGGGRGGEEEPSSSHTPNNRRGGEQAQSSGTKSLRPRSNTESMSKAIQQYTVDARLHAVFEQSGESGKSFDYSQSLKTTTYGSSVPEQQITAYLSRIQRGGYIQPFGCMIAVDESSFRIIGYSENAREMLGIMPQSVPTLEKPEILAMGTDVRSLFTSSSSILLERAFVAREITLLNPVWIHSKNTGKPFYAILHRIDVGVVIDLEPARTEDPALSIAGAVQSQKLAVRAISQLQALPGGDIKLLCDTVVESVRDLTGYDRVMVYKFHEDEHGEVVAESKRDDLEPYIGLHYPATDIPQASRFLFKQNRVRMIVDCNATPVLVVQDDRLTQSMCLVGSTLRAPHGCHSQYMANMGSIASLAMAVIINGNEDDGSNVASGRSSMRLWGLVVCHHTSSRCIPFPLRYACEFLMQAFGLQLNMELQLALQMSEKRVLRTQTLLCDMLLRDSPAGIVTQSPSIMDLVKCDGAAFLYHGKYYPLGVAPSEVQIKDVVEWLLANHADSTGLSTDSLGDAGYPGAAALGDAVCGMAVAYITKRDFLFWFRSHTAKEIKWGGAKHHPEDKDDGQRMHPRSSFQAFLEVVKSRSQPWETAEMDAIHSLQLILRDSFKESEAAMNSKVVDGVVQPCRDMAGEQGIDELGAVAREMVRLIETATVPIFAVDAGGCINGWNAKIAELTGLSVEEAMGKSLVSDLIYKENEATVNKLLSRALRGDEEKNVEVKLKTFSPELQGKAVFVVVNACSSKDYLNNIVGVCFVGQDVTSQKIVMDKFINIQGDYKAIVHSPNPLIPPIFAADENTCCLEWNMAMEKLTGWSRSEVIGKMIVGEVFGSCCMLKGPDALTKFMIVLHNAIGGQDTDKFPFPFFDRNGKFVQALLTANKRVSLEGKVIGAFCFLQIPSPELQQALAVQRRQDTECFTKAKELAYICQVIKNPLSGMRFANSLLEATDLNEDQKQLLETSVSCEKQISRIVGDMDLESIEDGSFVLKREEFFLGSVINAIVSQAMFLLRDRGLQLIRDIPEEIKSIEVFGDQIRIQQLLAEFLLSIIRYAPSQEWVEIHLSQLSKQMADGFAAIRTEFRMACPGEGLPPELVRDMFHSSRWTSPEGLGLSVCRKILKLMNGEVQYIRESERSYFLIILELPVPRKRPLSTASGSGDMMLMMPY

SEQ ID NO: 9687 - protein, 381 aa, Rickettsiella grylli
MAKKTDYYETLGVSRHATDSELKKAYRKLAMKYHPDKHHAAETQQAKEAEEKFKAISEAYDVLSDSKKRAAYDQFGHAGVESTGTSGNAQGFNFNDVFGDIGDVFGNIFGNRGGPQQSQRAQRGADLRYTLELDLESAIHGTTVQIRIPRLVTCKSCQGSGARKGTKPIVCKTCGGQGQVRIQQGFLTIQQTCPECHGEGRIITTPCPDCRGQGHVQETKTLAVKIPAGIDEGNRIRLAGEGEAGHRGAPAGDLYVQIHLKPHPLFKREGNNLYCDVPIHLTLALLGGDIQIPTLTGIVNLHIPPETQSGKVLRLRGKGVPGRPGGTGDLLCRVSVETPVHLTKAQKELVIALENALKNGNHYPKAKIWFEHVKKFFSKQY

SEQ ID NO: 9688 - protein, 1168 aa, Arabidopsis thaliana
MVSGVGGSGGGRGGEEEPSSSHTPNNRRGGEQAQSSGTKSLRPRSNTESMSKAIQQYTVDARLHAVFEQSGESGKSFDYSQSLKTTTYGSSVPEQQITAYLSRIQRGGYIQPFGCMIAVDESSFRIIGYSENAREMLGLMPQSVPTLEKPEILAMGTDVRSLFTSSSSILLERAFVAREITLLNPVWIHSKNTGKPFYAILHRIDVGVVIDLEPARTEDPALSIAGAVQSQKLAVRAISQLQALPGGDIKLLCDTVVESVRDLTGYDRVMVYKFHEDEHGEVVAESKRDDLEPYIGLHYPATDIPQASRFLFKQNRVRMIVDCNATPVLVVQDDRLTQSMCLVGSTLRAPHGCHSQYMANMGSIASLAMAVIINGNEDDGSNVASGRSSMRLWGLVVCHHTSSRCIPFPLRYACEFLMQAFGLQLNMELQLALQMSEKRVLRTQTLLCDMLLRDSPAGIVTQSPSIMDLVKCDGAAFLYHGKYYPLGVAPSEVQIKDVVEWLLANHADSTGLSTDSLGDAGYPGAAALGDAVCGMAVAYITKRDFLFWFRSHTAKEIKWGGAKHHPEDKDDGQRMHPRSSFQAFLEVVKSRSQPWETAEMDAIHSLQLILRDSFKESEAAMNSKVVDGVVQPCRDMAGEQGIDELGAVAREMVRLIETATVPIFAVDAGGCINGWNAKIAELTGLSVEEAMGKSLVSDLIYKENEATVNKLLSRALRGDEEKNVEVKLKTFSPELQGKAVFVVVNACSSKDYLNNIVGVCFVGQDVTSQKIVMDKFINIQGDYKAIVHSPNPLIPPIFAADENTCCLEWNMAMEKLTGWSRSEVIGKMIVGEVFGSCCMLKGPDALTKFMIVLHNAIGGQDTDKFPFPFFDRNGKFVQALLTANKRVSLEGKVIGAFCFLQIPSPELQQALAVQRRQDTECFTKAKELAYICQVIKNPLSGMRFANSLLEATDLNEDQKQLLETSVSCEKQISRIVGDMDLESIEDGSFVLKREEFFLGSVINAIVSQAMFLLRDRGLQLIRDIPEEIKSIEVFGDQIRIQQLLAEFLLSIIRYAPSQEWVEIHLSQVSKQMADGFAAIRTEFRMACPGEGLPPELVRDMFHSSRWTSPEGLGLSVCRKILKLMNGEVQYIRESERSYFLIILELPVPRKRPLSTASGSGDMMLMMPY

SEQ ID NO: 9689 - protein, 290 aa, Ensifer adhaerens
PFWGFDGSSTMQAEGKSSDCVLKPVAVYPDSERKNGVLVLCEVMMPDGKTPHPSNTRATVMEDDDAWFGFEQEYFFYKNGRPLGFPETGFPAPQGPYYTGVGYSNVGDIARKIVEEHLDICLAAGINHEGINAEVAKGQWEFQIFGKGSKKAADEIWLARYLLQRLTEKYGIDIEYHCKPLGDTDWNGSGMHANFSTAYLRDVGGKEYFENLMSAFEDARADHIAVYGPDNHMRLTGKHETQSIHQFSYGVADRGASIRVPHSFVNNDYRGYLEDRRPNSQGDPYQIRFS

SEQ ID NO: 9690 - protein, 244 aa, Triticum aestivum
MVDHRQLGVADADLYAVLGLKKECSDADLRLAYRRLAMTWHPDRCSASGSSARVQEAKERFQEIQSAYSVLSDSGKRLLYDVGVYDSDDDRLDEQHVSGMGGFFGEMAEMMSQATPTDSFEELQQLFVDMFQADLVAGGFGGAPPMGRRVQAPVPSPSCTSGPTSAQARPSCNKGVNKRCSSAMGSGTPPRACRPGSASGPGLDSKGSDGRRGEEGPWTTTQEDASIGGRKKKQRLSTGHGVSS

SEQ ID NO: 9691 - protein, 289 aa, Bradyrhizobium elkanii
PLWGFDGSSTMQAEGHSSDCVLKPVAVYPDAARENGALVMCEVMMPDGKTPHPSNKRATILDDEGAWFGFEQEYFFYKDGRPLGFPSDGYPAPQGPYYTGVGYSNVGSVARKIVEEHLNLCLAAGINHEGINAEVAKGQWEFQIFGKGSKTAADQMWMARYLMLRLTESYGIDIEFHCKPLGDTDWNGSGMHANFSTKYMREVGGKEYFEKLMGAFEKNLMDHIAVYGPDNDKRLTGKHETAPWNKFSYGVADRGASIRVPHSFINNGYKGYLEDRRPNSQGDPYQIVR

SEQ ID NO: 9692 - protein, 428 aa, Brassica napus; identical to SEQ ID NO: 7462

SEQ ID NO: 9693 - protein, 174 aa, Zea mays
MGLSSSISVQKTLYEVLSVSEDATYDEIRAAYRSAALNTHPDKARTPLESCVLSGEQQEFFSVQKAWEILRHPTSRADYDKQLQSSRQNIEIIAFEVQVGDMIIESTADADTVELSYPCRCGDYFSITSCELSGMGISVSGDGDGEVELQASDFPSASVVLGCGSCSLKIRLVL

SEQ ID NO: 9694 - protein, 893 aa, Saccharomyces cerevisiae YJM789
MAGHHHEHEQEREHEQEHEHDSLQRPTTGSERTRSISFSKLLTRSWKRNASSSNNMSVSSVNLYSDPENSRESDHNNSGSEGQSSRFSKLKSMFQSGNSSKNASAHNSSQSSLEGDSASSSSKLRYVKPMTSVANAFPASPPLSPTIPETDVLQTPKMVHIDQHEHEREHSNCGSPIMLSSSSFSPTVARTGTGRRRSPSTPIMPSQNSNNSSSTSAIRPNNYRHHSGSQGFSSNNPFRERAGTVRSSNPYFAYQGLPTHAMSSHDLDEGFQPYANGSGIHFLSTPTSKTNSLTNTKNLSNLSLNEIKENEEVQEFNNEDFFFHDIPKDLSLKDTLNGSPSRGSSKSPTITQTFPSIIVGFDNEYEEDNNNDKHDEKEEQQTTTNNKTRNLSPTKQNGKATHPRIKIPLRRAASEPNGLQLASATSPTSSSARKTSGSSNINDKIPGQSVPPPNSFFPQEPPPKISDFPEPRRSRRLRTKSFSNKFQDIMVGPQSFEKIRLLGQGDVGKVFLVREKKTNRVYALKVLSKDEMIKRNKIKRVLTEQEILATSNHPFIVTLYHSFQSEDYLYLCMEYCMGGEFFRALQTRKTKCICEDDARFYASEVTAALEYLHLLGFIYRDLKPENILLHQSGHIMLSDFDLSIQAKDSKVPVVKGSAQSTLVDTKICSDGFRTNSFVGTEEYIAPEVIRGNGHTAAVDWWTLGILIYEMLFGFTPFKGDKTNETFTNILKNEVSFPNNNEISRTCKDLIKKLLTKNESKRLGCKMGAADVKKHPFFKKVQWSLLRNQEPPLIPVLSEDGYDFAKLSSNKKRQTSQDSHKHLDEQEKNMFEERVEYDDEVSEDDPFHDFNSMSLMEQDNNSMIYGNTNSYGKIAYTPNSNRSRSNSHRTFFKR

SEQ ID NO: 9695 - protein, 311 aa, Thermosynechococcus elongatus BP-1
MARTDFKDYYQILGVSKNATEAEIRQAFRRLARKYHPDLNPGDKEAEARFKEINEAHEVLSDPQKRRKYDQFGQYWQQASAAEAGGFNVNVGDFGADFSQFANFEDFINELLGRFATGTGRTRSWSTVGFDTSGFGSADVEAEMQISFQEAFQGCQKSFAIGNEQVTVTIPAGIKPGTKLRLRGKGQYNPYTQQRGDLYLTVQVAPHPLFRFEDDQLVIDLPITPDEAALGAQVTVPTPSGNVVLNVPAGTRSGQSLRLRGKGWRSSGGIAGDLLAKVQIVPPKSLSAQEKELYEKLRSLRSFNPRGHWPI

SEQ ID NO: 9696 - protein, 295 aa, Crucihimalaya himalaica
MTNINLVKHVIYFLFLISCFVIKPSDASRGGIAIYWGQNGNEGNLPATCATGRYAYVNVAFLVKFGNGQTPELNLAGHCNPAANTCTHFGSQVKDCQSRGIKVMLSLGGGIGNYSIGSRKDAKVVANYLWNNFLGGKSSSRPLGDAVLDGIDFNIELGSPQHWDDLARSISKFSHKGRKVYLTGAPQCPFPDRLMGSVLNTRLFDYVWIQFYNNPPCSYTLGNTQNLFDSWNKWTTSITAKKIFLGLPAAAEAAGSGYIPPNVLTSQILPILKKSRKYGGVMLWSKFWDDKNGYS

SEQ ID NO: 9697 - protein, 295 aa, Zea mays; identical to SEQ ID NO: 8761

SEQ ID NO: 9698 - protein, 961 aa, Aspergillus nidulans FGSC A4
MAPKLFTFVSALSGLASLASAFHAEAKSNIAVYYGQGVNQPRLAEFCAETSYDIINIGFINSFPEQNPLTGLPGSDFGNQCWADTFVVDGIASQLYSHCPNIAEDIPKCQAAGKKVFLSLGGATPTYWFDTIDASTKLADFLWGAFGPVTDAWTVADKPRPFGNAVVDGFDFDIEFFGSKGYANMIKRFRRRFGEVPDQTFYISAAPQCSIPDEQLSVAIKNAVIDFVWVQFYNTPGCSARDFVLGTKNGFNYDSWVEVIKAGANPNAKLYVGLPASGAAANLGYYLTPEEVKPLVKKYMDKYPETFGGVMLWEATQARNNQIDGVGYNEKIREILYDLDPNHPPPTTSPTPTPTPSTTTTSTTSTTSTTSATSTTSTTSTTSTTSTTPTTSTTSTTSTTTPTPSPSPSTASSSTTETVTPSPKPSPSESSTTSETSSLPSTSTPVVSETPSETKTPTSSSAPPLSSSSPVGGSSSTASSSTSTPSETPSASSTRAVSETSTHISTSTSSGPETSLTGSSTSVPATSSSVPSSAISPSSTPVISETPRPPVTSSSSSTFVSSTSTSTDCSESSTAIGTHSSSSISETPSASTPAASPSTSPETTKTLTVFPTPGSSVSTGTTSASTLSSSVPATSGGHTETSTVSTSSANQTPSASTSKPLIPTNSASSTSTGSVTSTPSAPGVPSSSAGSDETATTSTTDSEPTSTSSGSVTAKPTTTEPATTTTIIVTSYTSICPTGFTTITTTITSTYCPGTASATATAIAPTTDVPGSGSGSSPAQPTITADIPEGWTTTVTVCTVCAATPTTVTLTLPPATTTEESTSAQPTGEVPSSDGSGSGEVSTTTVVVVPAPTGNAGDGVPAPGANVGEEYTAAPGSATTSKPLIGGGASGAHTAYPYASSTFHIIPSASAHVPVPSGSGSSPSGTQGGASPTFTGAGSRYDVVKGVPALVALALSLLAVL

SEQ ID NO: 9699 - protein, 295 aa, Olimarabidopsis pumila
MTNINLLKHVIYFLFFISIFVIKPSDASRGGIAIYWGQNGNEGNLSATCATGRYAYVNLAFLVKFGNGQTPELNLAGHCNPAANTCTRFGSQVKDCQSRGIKVMLSLGGGIGNYSIGSREDAKVVADYLWNNFLGGKSSSRPLGDAVLDGIDFNIELGSPQHWDDLARTLSKLSHRGRKVYLTGAPQCPFPDRLMGSALNTRLFDYVWIQFYNNPPCSYTSGNTQNLFDSWNKWTTSITAQKIFLGLPAAPEAAGSGYIPPDVLTSQILPILKKSRKYGGVMLWSKFWDDKNGYS

SEQ ID NO: 9700 - protein, 302 aa, Olimarabidopsis cabulica
MTNINLLNHVIYFLFFISFFVIKPSDASRGGIAIYWGQNGNEGNLSATCATGRYAYVNVAFLVKFGNGQTPELNLAGHCNPAANTCTRFGSQVKDCQSRGIKVMLSLGGGIGNYSIGSREDAKVVADYLWNNFLGGKSSSRPLGDAVLDGIDFNIELGSPQHWDDLARSLSKLSYKGRKVYLTGAPQCPFPDRLMGSALNTRLFDYVWIQFYNNPPCSYTSSNTQNLFDSWNKWTTSITAQKIFLGLPAAPEAAGSGYIPPDVLTSQILPVLKKSRKYGGVMLWSKFWDDKNGYSSSILPGV

SEQ ID NO: 9701 - protein, 295 aa, Crucihimalaya wallichii
MTNINLVKHVIYFLFLISCFIIKPSDASRGGIAIIWGQNGNEGNLSATCATGRYAYVNVAFLVKFGNGQTPELNLAGHCNPAANTCTHFGSQVKDCQSRGIKVMLSLGGGIGNYSIGSRKDAKVVANYLWNNFLGGKSSSRPLGDAVLDGIDFNIELGSPQHWDDLARSISKFSHTGKKVYLTGAPQCPFPDRLMGSALNTRLFDYVWIQFYNNPPCSYTLGNTQNLFDSWNKWTTSITAKKIFLGLPAAAEAAGSGYIPPNVLTSQILPILKKSRKYGGVMLWSKFWDDKNGYS

SEQ ID NO: 9702 - protein, 302 aa, Arabidopsis halleri subsp. gemmifera
MTNINLIKHVIYLLFFISCFLTKPSDASRGGIAIYWGQNGNEGNLSATCATGRYAYVNVAFLVKFGNGQTPELNLAGHCNPAANTCTHFGSQVKYCQSRGIKVMLSLGGGIGNYSIGSKEDAKVVADYLWNNFLGGKSSSRPLGDAVLDGIDFNIELGSPQHWDDLARSLSKLSHRGRKVYLTGAPQCPFPDRLMGNALNTRRFDYVWIQFYNNPPCSYTSGNTQNLFDSWNKWTTSITAQKIFLGLPAAPEASGSGYIPPDVLTSQILPTLKKSRKYGGVMLWSKFWDDKNGYSSSILATV

SEQ ID NO: 9703 - protein, 373 aa, Methanococcoides burtonii DSM 6242
MVDTINSNYTEQKKQNDHLAKNRLMGLAEGLYDQFIDETVPNVSISSRTKNNIEYSNESDVWVYGDKETQRTAKTVKGAFQLLKTVHSIDFLVKNHLAQDRGSTLRELYYISENWDIAKFREQAESNRLIEDLEIITSLQREYFHMRPEEDGATMFGPIRIREETKRGSRIIHCQEDIGESGYQIPFNVENIEFLDHDAKFIIAIETGGMYARLIENGFDEKYNAILVHLKGQPARSTRRLIKRMNEELGIPVVVFTDGDPWSYRIFASVAYGAIKSAHLSEFMATPAAKFIGVQPTDIVEYELSTDKLTDKDVDALRSELTDPRFANDYWKEQISLQLSIKKKAEQQAFAGKGLDFVTDTYLPNRLSEMDII

SEQ ID NO: 9704 - protein, 60 aa, Glycine max
  misc_feature (12)..(12): Xaa can be any naturally occurring amino acid
  misc_feature (14)..(14): Xaa can be any naturally occurring amino acid
  misc_feature (16)..(16): Xaa can be any naturally occurring amino acid
  misc_feature (21)..(21): Xaa can be any naturally occurring amino acid
  misc_feature (26)..(26): Xaa can be any naturally occurring amino acid
  misc_feature (48)..(48): Xaa can be any naturally occurring amino acid
SPTEGRVQLLEXAXVXDAHVXEFKSXEKFKIFNTNNLWVNLKAIKRLXEADALKMEIIPN

SEQ ID NO: 9705 - protein, 127 aa, Triticum aestivum
  misc_feature (66)..(66): Xaa can be any naturally occurring amino acid
  misc_feature (85)..(85): Xaa can be any naturally occurring amino acid
  misc_feature (104)..(104): Xaa can be any naturally occurring amino acid
  misc_feature (108)..(108): Xaa can be any naturally occurring amino acid
  misc_feature (111)..(111): Xaa can be any naturally occurring amino acid
MDGGSGNASSGGAAVCCYYALLGVRKSASATDIRTAYRRLAMKWHPDRWASDPGAAGEAKRRFQAXIKEAYSVLSDKGKKACSTXGLFDSLDDNNKILRLMQEXLVMXDKXEKQKPDTLEDCRNLDT

SEQ ID NO: 9706 - protein, 289 aa, Oryza sativa
MAFRRRSCIPAALAVFFLLLAGQSTAGEDQTAVIWGRHGDEGTLREACDTGHYNTVIISFLSVFGHGRYSLDLSGHDLRRVGNDIKHCQRKGIVVLLSIGGQGGDYSLPSSRSAADVADNLWNAFLAGRRKGVLRPFGNAAVDGIDFFIDRGSGDHYDELARKLYSYRNNKGKGVMLTATPRCRFPDRRLEKALATGVFARIHVRMFGDDVNCTAAPRESWEKWAAAYPASQVYLGLVASSEQDPGYLSPKPLYYTLVMYIRDRLNYGGKMIWDRYYDKKTDYSIGKLI

SEQ ID NO: 9707 - protein, 198 aa, Craibia brevicaudata
EDDHGEVIAEITKPGLEQYLGLHYPATDIPQAARFLFMNNKVRMIVDCHAKHVKVLQDEKLLFDLTLCGSTLRAPHSCHLQYMANMDSIASLVMAVVVNDNEEDGDSSDAVQPQKRKRLWGLVVCHNTTPRFVPFPLRYACEFLAQVFAIHVNKEIELEYQIIENNILRTQTLLCDMLMRDAPLGIVSQSPNIMDLVK

SEQ ID NO: 9708 - protein, 431 aa, Arabidopsis thaliana
  misc_feature (39)..(39): Xaa can be any naturally occurring amino acid
MAQILAASPTCQMRVPKHSSVIASSSKLWSSVVLKQKKXQSNNKVRGFRVLALQSDNSTVNRVETLLNLDTKPYSDRIIAEYIWIGGSGIDLRSKSRTIEKPVEDPSELPKWNYDGSSTGQAPGEDSEVILYPQAIFRDPFRGGNNILVICDTWTPAGEPIPTNKRAKAAEIFSNKKVSGEVPWFGIEQEYTLLQQNVKWPLGWPVGAFPGPQGPYYCGVGADKIWGRDISDAHYKACLYAGINISGTNGEVMPGQWEFQVGPSVGIDAGDHVWCARYLLERITEQAGVVLTLDPKPIEGDWNGAGCHTNYSTKSMREEGGFEVIKKAILNLSLRHKEHISAYGEGNERRLTGKHETASIDQFSWGVANRGCSIRVGRDTEAKGKGYLEDRRPASNMDPYIVTSLLAETTLLWEPTLEAEALAAQKLSLNV

SEQ ID NO: 9709 - protein, 204 aa, Derris elliptica
YKFHEDDHGEVIAEITKPGLEPYLGLHYPATDIPQAARFLFMKNKVRMIVDCHAKHMKVLQDEKIPFDLTLCGSTLRAPHSCHLQYMANMDSIASLVMAVVVNDNEEDGDSSDAVQPQKRKRLWGLVVCHNTTPRFVPFPLRYACEFLAQVFAIHVNKEIELEYQIIEKNILRTQTLLCDMLMRDAPLGIVSQSPNIMDLVKCD

SEQ ID NO: 9710 - protein, 213 aa, Glycine max
GSNVPLLLMNSFNTHDDTQKIVEKYQNSNIEIHTFNQSQYPRLVVEDFLPLPSKGHTDKDGWYPPGHGDVFPSLLNSGKLDALLSQGKEYVFVANSDNLGAIVDLKILNHLIQNKNEYCMEVTPKTLADVKGGTLISYEGRVQLLEIAQVPDEHVNEFKSIEKFKIFNTNNLWVNLNAVKRLVEADALKMEIIPNPHRKDGKISLRLIKLIKW

SEQ ID NO: 9711 - protein, 290 aa, Sinorhizobium meliloti
PLWGFDGSSTQQAEGRSSDCVLKPVAVYPDPVRTNGALVMCEVMMPDGKTPHPSNTRATVLDDESAWFGFEQEYFFYKNGRPLGFPEQGYPAPQGPYYTGVGYKNVGDIARQIVEEHLDICLAAGINHEGINAEVAKGQWEFQVFGKGSKKAADEVWLARYLLLRLTEKYGIDVEFHCKPLGDTDWNGSGMHANFSTAYLREVGGKDYFEALMAAFEKNLHDHINVYGPDNHLRLTGKHETAPWDKFSYGVADRGASIRVPHSFVNNGYRGYLEDRRPNSQGDPYQIRFA

SEQ ID NO: 9712 - protein, 1118 aa, Adiantum capillus-veneris
MSSTRHSYSSGGSGKSKHGRRIAQTSADAKLYAAYEESSESGSFDYSQSVSAGKEGISSQLVTAYLQRMQRGGLVQQFGCLIAVEEETFRVLAYGANAPEMLDVATQAVPTMGQYSRLCIGADVRTLLSPASASALDRVIGVVDVSMFNPITVQSRSSGKPFYAILHRNDVGLVIDLEPIRPDDASITGGALQSHKLAAKAIARLQSLPGGDIGLLCDSVVEEVHELTGFDRVMAYKFHEDEHGEVVAEIRRTDLEPYIGLHYPATDIPQAARFLFMKNRVRMICDCRLPPVKLIQDKTLSQPMSLTGSKLRAPHGCHTQYMANMNSISSLVMAVIVNDSDDDSPGHSSQGIKLWGLVVCHHTSPRYVPFPVRSACEFLMQVFSLQLNMEVGMAAQVREKHILRTQTLLCDMLLRDAPIGIVSQSPNIMDLVTCDGAALYYGKKCWLLGTTPTEAQIVDIAAWLLDCHKDSTGLSTDSLAKTGYPEASCLGDAVCGLAAAKITATDFLFWFRSHTAKEVRWGGARHDPEERDDGRRMHPRSSFKAFLEVVKQQSLPWEDVEMDAIHSLQLILRGSFQDIDDSNTKTMIHARLNDLKLQGLDELSTVASEMVRLIETATAPILAVDGQGLINGWNGKVAELTGLSFETAMGKSLAKELVHEESKTIVERVLHLALEGEEEQDIEIHLRTYDQHKQKGVVILIVNTCCSRDVSNNVVGVCFVGQDVTGQKLVLDRFIRIQGDYKAIVQSLNPLIPPIFGADEYGFCSEWNAAMEKLSNWRREEVLGKMLVGEIFGLQMVCCRLQGQDVVTKLMIVLNDAVNGQESEKFPLVFYDRNGRRVEALLIASKRTDADGRITGVFCFLHTASPELLQALIIKRAKEKVDKELSYVKEELKKPLEGLAFTRTVLEGTNLTIEQRQLIKTNAWCERQLRKILEDDLNNIEEGYMDLEMSEFFMGSVIDAVISQGMAASRGKGVQILTEIPNDVKLMCLFGDQARLQQVLADLLFCAINHATTTNEDEKDWVTIKVSRTKTRLDDGVHLMHFEFRISHSGQGISEALVEEMTNKSQKWTPEGLAISISCTLIRLMNGDVKYTTDAGNKCFLVTIQFPLAHRDDATSVR

SEQ ID NO: 9713 - protein, 453 aa, Kluyveromyces lactis; identical to SEQ ID NO: 6177

SEQ ID NO: 9714 - protein, 203 aa, Echinacea paradoxa
DARRDDLNAAIFNLKEIESYDDYERSLLISQMSFEKTFGMSSVFIESTLMENGGLAESANPATMINEAIHVISCGYEEKTAWGKEIGWIYGSITEDILTGFKMHCRGWRSIYCMPVRPAFKGSAPINLSDRLHQVLRWALGSVEIFLSRHCPLWYGWGGGRLKLLQRFAYINTIVYPFTSLPLVAYCTLPAICLLTGKFIIPT

SEQ ID NO: 9715 - protein, 628 aa, Zea mays
MSSLVPEEGRELKIVHRLPPNQHGDDQKQDVMKCKLVVQIGSQSVVVARGQAYPPKDVVTVHGIERRDDHTKVQVDFVFDNFLEFPLPIPIAGGDMFTLGEAKNSFVLWPKSGIQLAEEGYHWALLVIFPKWNTVYNIDSKGYQSPSWAFGAYVDKKGRHNKNFGRTVIWKHFQGSAGFATCPLLPDEIANVRERLLDFFMNESDLYTLVDGFVTRNSARTNPSNPSIELGPEFKKVGSFLGRFKSIPSIVELDSLKVSGDVWFGSRIVLKSLVNGANKASRRTEHGRTPSVLVLLPTRELANQVHADFEFYGATFGLSACCVYGGSPYHPQEMALRRGVDIVVGTPGRVKFLMYATSLVKDFIVKGTLNLKCLKFCVLDEADEMLNMGFVDDVELILGKVEDATKVQTLLFNATLPDWVNKLSMRFLKVDRKTVDLVGNEKLKASASVKHLALPCNKAARAQVILDIIRCYSQDVLPHRCGGRTIIFTETKDSASQLSGLISGSRALHGDVAQAQRECQQTRKGVWVKFEHISVPQPTDVAQSAGSEAADAIASVSDSVIPIFRQQAEQLLSSSSLSAADLLAKALAKAGYTAIKKRSLLSSLEDYSTLHLQTGRPMWSPGFAITFR

SEQ ID NO: 9716 - protein, 170 aa, Malus x domestica
EGTLAEACNSGNYQFVNIAFLSTFGNNKAPVLNLAGHCDPASGTCTGQSADIRTCQSKNIKVLLSIGGATETYSLTSADEARQVADYIWNNFLGGQSDSRPLGDAVLDGVDFDIELGGTQFYDELARSLKGHNGQGKTVYLAAAPRCPFPDTHLDGAIQTGLFDYVWVQF

SEQ ID NO: 9717 - protein, 750 aa, Chlamydomonas reinhardtii
MAGVPAPASQLTKVLAGLRHTFVVADATLPDCPLVYASEGFYAMTGYGPDEVLGHNCRFLQGEGTDPKEVQKIRDAIKKGEACSVRLLNYRKDGTPFWNLLTVTPIKTPDGRVSKFVGVQVDVTSKTEGKALADNSGVPLLVKYDHRLRDNVARTIVDDVTIAVEKAEGVEPGQASAVAAAAPLGAKGPRGTAPKSFPRVALDLATTVERIQQNFCISDPTLPDCPIVFASDAFLELTGYSREEVLGRNCRFLQGAGTDRGTVDQIRAAIKEGSELTVRILNYTKAGKAFWNMFTLAPMRDQDGHARFFVGVQVDVTAQSTSPDKAPVWNKTPEEEVAKAKMGAEAASLISSALQGMAAPTTANPWAAISGVIMRRKPHKADDKAYQALLQLQERDGKMKLMHFRRVKQLGAGDVGLVDLVQLQGSELKFAMKTLDKFEMQERNKVARVLTESAILAAVDHPFLATLYCTIQTDTHLHFVMEYCDGGELYGLLNSQPKKRLKEEHVRFYASEVLTALQYLHLLGYVYRDLKPENILLHHTGHVLLTDFDLSYSKGSTTPRIEKIGGAGAAGGSAPKSPKKSSSKSGGSSSGSALQLENYLLLAEPSARANSFVGTEEYLAPEVINAAGHGPAAVDWWSLGILIFELLYGTTPFRGARRDETFENIIKSPLKFPSKPAVSEECRDLIEKLLVKDVGARLGSRTGANEIKSHPWFKGINWALLRHQQPPYVPRRASKAAGGSSTGGAAFDNY

SEQ ID NO: 9718 - protein, 394 aa, Fusobacterium nucleatum subsp. polymorphum
MAKRDYYEVLGVDKNASENDIKKAYRKAAMKYHPDKFANATDAEKKDAEEKFKEINEAYQVLSDNEKKQQYDQFGHAAFEQGGAGFGGGFNAGGFDFGDIFGDNIFGGGGGFGGFEGFSGFGGSSRRSYVEPGNDLRYNLEITLEEAAKGVEKTIKYKRTGKCEHCHGTGAEDDKMKTCPTCNGQGTIKTQQRTILGVMQSQSVCPDCHGTGKVPEKKCKHCRGTGTAKETVEKKINVPAGIDDGQKLKYAGLGEASQSGGPNGDLYIVIRIKPHDIFIRQGDNLYCEVPISYSTAVLGGEVEVPTLNGKKTVKVPEGTESGKLLKVSGEGIKSLKGYGKGDIIVKFTIETPKKLTDKQKELLQKFEESLNDKNYEQKTSFMKRLKKIFKDIID

SEQ ID NO: 9719 - protein, 290 aa, Rhizobium leguminosarum
LPLWGFDGSSTMQAEGRSSDCVLKPVAIYPDPARTNGALVMCEVMMPDGVTPHASNARATILDDEDAWFGFEQEYFFYQNGRPLGFPEQGYPAPQGPYYTGVGYSNVGDVAREIVEEHLDLCLAAGINHEGINAEVAKGQWEFQIFGKGSKKAADQIWMARYLLQRLTEKYGIDIEYHCKPLGDTDWNGSGMHCNFSTKYMREVGGKAYFEALMAQFEKNLMDHINVYGPDNDKRLTGKHETAPWNKFSYGVADRGASIRVPHSFVKNDYKGYLEDRRPNSQGYPYQNRS

SEQ ID NO: 9720 - protein, 290 aa, Bradyrhizobium elkanii
PLWGFDGSSTQQAEGHSSDCVLKPVACYPDAARENGVLVMCEVMMPDGKTPHPSNKRATILDDDGAWFGFEQEYFFYKDGRPLGFPEEGYPAPQGPYYTGVGYKNVGSVARKIVEEHLNLCLAAGINHEGINAEVAKGQWEFQIFGKGSKTAADQMWMARYLMLRLTESYGIDIEFHCKPLGDTDWNGSGMHANFSTKYMREVGGKEYFEKLMGAFEKNLMDHIAVYGPDNDKRLTGKHETAPWNKFSYGVADRGASIRVPHSFVNNGYKGYLEDRRPNSQGDPYQNRFA

SEQ ID NO: 9721 - protein, 291 aa, Bradyrhizobium japonicum
PLWGFDGSSTQQAEGHSSDCVLKPVAVFPDAARTNGVLVMCEVMMPDGKTPHASNKRATILDDAGAWFGFEQEYFFYKDGRPLGFPSSGYPAPQGPYYTGVGFSNVGDVARKIVEEHLDLCLAAGINHEGINAEVAKGQWEFQIFGKGSKKAADEMWMARYLMLRLTEKYGIDIEFHCKPLGDTDWNGSGMHANFSTEYMRTVGGKEYFEALMAAFDKNLMDHIAVYGPDNDKRLTGKHETAPWNKFSYGVADRGASIRVPHSFVNNGYKGYLEDRRPNSQGDPYEIGSQL

SEQ ID NO: 9722 - protein, 1168 aa, Arabidopsis thaliana
MVSGVGGSGGGRGGEEEPSSSHTPNNRRGGEQAQSSGTKSLRPRSNTESMSKAIQQYTVDARLHAVFEQSGESGKSFDYSQSLKTTTYGSSVPEQQITAYLSRIQRGGYIQPFGCMIAVDESSFRIIGYSENAREMLGLMPQSVPTLEKPEILAMGTDVRSLFTSSSSILLERAFVAREITLLNPVWIHSKNTGKPFYAILHRIDVGVVIDLEPARTEDPALSIAGAVQSQKLAVRAISQLQALPGGDIKLLCDTVVESVRDLTGYDRVMVYKFHEDEHGEVVAESKRDDLEPYIGLHYPATDIPQASRFLFKQNRVRMIVDCNATPVLVVQDDRLTQSMCLVGSTLRAPHGCHSQYMANMGSIASLAMAVIINGNEDDGSNVASGRSSMRLWGLVVCHHTSSRCIPFPLRYACEFLMQAFGLQLNMELQLALQMSEKRVLRTQTLLCDMLLRDSPAGIVTQSPSIMDLVKCDGAAFLYHGKYYPLGVAPSEVQIKDVVEWLLANHADSTGLSTDSLGDAGYPGAAALGDAVCGMAVAYITKRDFLFWFRSHTAKEIKWGGAKHHPEDKDDGQRMHPRSSFQAFLEVVKSRSQPWETAEMDAIHSLQLILRDSFKESEAAMNSKVVDGVVQPCRDMAGEQGIDELGAVAREMVRLIETATVPIFAVDAGGCINGWNAKIAELTGLSVEEAMGKSLVSDLIYKENEATVNKLLSRALRGDEEKNVEVKLKTFSPELQGKAVFVVVNACSSKDYLNNIVGVCFVGQDVTSQKIVMDKFINIQGDYKAIVHSPNPLIPPIFAADENTCCLEWNMAMEKLTGWSRSEVIGKMIVGEVFGSCCMLKGPDALTKFMIVLHNAIGGQDTDKFPFPFFDRNGKFVQALLTANKRVSLEGKVIGAFCFLQIPSPELQQALAVQRRQDTECFTKAKELAYICQVIKNPLSGMRFANSLLEATDLNEDQKQLLETSVSCEKQISRIVGDMDLESIEDGSFVLKREEFFLGSVINAIVSQAMFLLRDRGLQLIRDIPEEIKSIEVFGDQIRIQQLLAEFLLSIIRYAPSQEWVEIHLSQVSKLMADGFAAIRTEFRMACPGEGLPPELVRDMFHSSRWTSPEGLGLSVCRKILKLMNGEVQYIRESERSYFLIILELPVPRKRPLSTASGSGDMMLMMPY

SEQ ID NO: 9723 - protein, 173 aa, Camellia sinensis
MEQNETGCQVPPDAPMLCVNNCGFFGSAATMNPCSKCHKDLMLKQQQTELAASSIGSIANGGSGSPGKEPDSAITTVHVDAGSSDSMIVSMQASHESLLNENNVIVKEVPPNRCSACRKRVGLTGFNCRCGNLFCAVHRYSDKHDCPFDYRSAAQDAIAKANPVVKAEKLDKL

SEQ ID NO: 9724 - protein, 1158 aa, Arabidopsis thaliana
GVGGSGGGRGGEEEPSSSHTPNNRRGGEQAQSSGTKSLRPRSNTESMSKAIQQYTVDARLHAVFEQSGESGKSFDYSQSLKTTTYGSSVPEQQITAYLSRIQRGGYIQPFGCMIAVDESSFRIIGYSENAREMLGLMPQSVPTLEKPEILAMGTDVRSLFTSSSSILLERAFVAREITLLNPVWIHSKNTGKPFYAILHRIDVGVVIDLEPARTEDPALSIAGAVQSQKLAVRAISQLQALPGGDIKLLCDTVVESVRDLTGYDRVMVYKFHEDEHGEVVAESKRDDLEPYIGLHYPATDIPQASRFLFKQNRVRMIVDCNATPVLVVQDDRLTQSMCLVGSTLRAPHGCHSQYMANMGSIASLAMAVIINGNEDDGSNVASGRSSMRLWGLVVCHHTSSRCIPFPLRYACEFLMQAFGLQLNMELQLALQMSEKRVLRTQTLLCDMLLRDSPAGIVTQSPSIMDLVKCDGAAFLYHGKYYPLGVAPSEVQIKDVVEWLLANHADSTGLSTDSLGDAGYPGAAALGDAVCGMAVAYITKRDFLFWFRSHTAKEIKWGGAKHHPEDKDDGQRMHPRSSFQAFLEVVKSRSQPWETAEMDAIHSLQLILRDSFKESEAAMNSKVVDGVVQPCRDMAGEQGIDELGAVAREMVRLIETATVPIFAVDAGGCINGWNAKIAELTGLSVEEAMGKSLVSDLIYKENEATVNKLLSRALRGDEEKNVEVKLKTFSPELQGKAVFVVVNACSSKDYLNNIVGVCFVGQDVTSQKIVMDKFINIQGDYKAIVHSPNPLIPPIFAADENTCCLEWNMAMEKLTGWSRSEVIGKMIVGEVFGSCCMLKGPDALTKFMIVLHNAIGGQDTDKFPFPFFDRNGKFVQALLTANKRVSLEGKVIGAFCFLQIPSPELQQALAVQRRQDTECFTKAKELAYICQVIKNPLSGMRLANSLLEATDLNEDQKQLLETSVSCEKQISRIVGDMDLESIEDGSFVLKREEFFLGSVINAIVSQAMFLLRDRGLQLIRDIPEEIKSIEVFGDQIRIQQLLAEFLLSIIRYAPSQEWVEIHLSQVSKQMADGFAAIRTEFRMACPGEGLPPELVRDMFHSSRWTSPEGLGLSVCRKILKLMNGEVQYIRESERSYFLIILELPVPRKRPLSTASGSGD

SEQ ID NO: 9725 - protein, 521 aa, Magnaporthe grisea 70-15
MASNVAKAVKSALPSHLKPESAETKGDSEFAPRHHGKTQSHMAFENASTNIAAAQMRNALTALAETLFETEMDNFFALFRRFVNDKAKGSTVDWDRIAPPAQGQVVDYDELANSESVEFLSKLAVLKLNGGLGTSMGCVGPKSVIEVRDGMSFLDLSVRQVEHLNRTYGTNVPFILMNSFNTDEDTASIIKKYEGHNVDIMTFNQSRYPRILKDSLLPVPKSYDSNIDAWYPPGHGDVFESLYNSGVLDKLIERGIEYIFLSNVDNLGAVVDLRILQHMVETGAEYIMELTNKTKADVKGGTIIDYEGKVRLLEIAQVPKEHVNEFKSIKKFRYFNTNNIWMNVQAIKRVVENHELEMEIIPNGKTIPGDKKGESDISIIQLETAVGAAIRHFNNAHGVNVPRRRFLPVKTCSDLMLVKSDLYTVKHGQLQMSAARFGDAPLIKLGTDFKKVSDFQKRISSIPKMIELDHLTITGAVNLGRGVTFKGTVIIVATEGQTIDIPPGSILENVVVQGSLRLLEH

SEQ ID NO: 9726 - protein, 302 aa, Arabidopsis halleri subsp. gemmifera
MTNINLIKHVIYLLFFISCFLTKPSDASRGGIAIYWGQNGNEGNLSATCATGRYAYVNVAFLVKFGNGQTPELNLAGHCNPAANTCTHFGSQVKYCQSRGIKVMLSLGGGIGNYSIGSKEDAKVVADYLWNNFLGGKSSSRPLGDAVLDGIDFNIELGSPQHWDDLARSLSKLSHRGRKVYLTGAPQCPFPDRLMGNALNTRRFEYVWIQFYNNPPCSYTSGNTQNLFDSWNKWTTSITAQKIFLGLPAAPEASGSGYIPPDVLTSQILPTLKKSRKYGGVMLWSKFWDDKNGYSSSILATV

SEQ ID NO: 9727 - protein, 304 aa, Schizosaccharomyces pombe
LLPVPHTADSAIDEWYPPGHGDVFEALTNSGIIDTLIAQGKEYLFVSNIDNLGAVVDLNILNHMVETNAEYLMELTNKTKADVKGGTLIDYDGNVRLLEIAQVPPQHVEEFKSIKKFKYFNTNNLWFHLPSVKRVVNNHELSMEIIPNKKTIKHKGENINIIQLETAAGAAIRHFKNAHGVNVPRRRFLPVKTCSDLLLVKSDLYSINHGQVEMNPRRFGGTAPLVKLGAHFKKVADFSAHIPSIPKILELDHLTITGDVNIGRNVTLKGTVIIVASDANRIDIPNGSVLENCVITGNLNILEH

SEQ ID NO: 9728 - protein, 298 aa, Medicago truncatula
MKMALKSTISFTFFSLVILALANDSNAGKISIYWGQNGNEGTLAEACATGNYEYVIIAFLPTFGDGQTPMINLAGHCDPYSNECTGLSSDIKSCQAKGIKVLLSLGGGAGSYSIASTQDAKSVATYLWNNFLGGQSSSRPLGPAVLDGIDFDIEGGSNQHWGDLAKYLKGYNGKKVYITAAPQCPFPDAWIGNALTTGLFDYVWVQFYNNPPCQYNPGEISNLEDAWKQWTSGIPANKIFLGLPASPEAAGSGFIPATDLTSTVLPAIKGSAKYGGVMLWSRYDDVQSGYSSSIKSHV

SEQ ID NO: 9729 - protein, 297 aa, Medicago truncatula
MKMELKSTISFTFFSLLVLALANGSNAGKIAMYRGQNGNEGTLAEACATENYEYVIIAFLPTFGDGQTPMINLAGHCDPYSNGCTGLSSDIKSCQAKGIKVLLSIGGGAGSYSIASTKDANSVATYLWNNFLGGKSSSRPLGPAVLDGIDFDIEGGSSQHWGDLARYLKGFNKKVYITAAPQCPFPDAWIGNALTTGLFDYVWVQFYNNPPCQYNPDAFMNFEDAWKQWTSGIPANKIFLGLPASPTAAGSGFISADDLTSTVLPVIKGSSKYGGVMLWSRYDDVQSGYSSSIKSHV

SEQ ID NO: 9730 - protein, 1146 aa, Populus tremula
MASQSQRQSNQPAHNQAQSSGTSNMRQHHHPTESVSKAIAQYTVDAQLHAVFEQSGGTGKSFDYSKSVRTPNQSVPEEQITAYLSKIQRGGHIQPFGCMIAADEQSFRLIAYSENAKDMLGLTPQSVPSLEKQEILFVGADVRILFRPSSAVLLEKAFGAREITLLNPIWIHSKNSGKPFYAILHRIDVGIVIDLEPARTEDPALSIAGAVQSQKLAVRAISQLQSLPGGDIKLLCDTVVDSVRELTGYDRVMVYKFHEDEHGEVVAENKRVDLEPYIGLHYPSTDIPQASRFLFKQNRVRMIVDCHAIPVSVIQDEGLMQPLCLVGSTLRAPHGCHAQYMENMGSIASLAMAVIIYGNDEEAIGGRNSMRLWGLVVCHHTSARCIPFPLRYACEFLMQAFGLQLNMELQLASQLLEKHVLRTQTLLCDMLLRDSPTGIVTQSPSIMDLVKCDGAALYYQGQYYPLGVTPTEAQIKDIVEWLLTLHGDPTGLSTDSLADAGYPGAAFLGDAVCGMAVAYIAERDFLFWFRSHTAKEVKWGGAKHHPEDKDDGQRMHPRSSFKAFLEVVKSRSLPWENAEMDAIHSLQLILRDSFRDAEATNSKAVVHTQLKDMELQGMDELSSVAREMVRLIETATAPIFAVDVEGRINGWNAKVAELTGLSVEEAMGKSLVHDLVYKEYEEIVDKLIHRAVKGEEDKNVEIKLRTFCSEHQKKAVFVVVNACSSKDYMDNIVGVCFVGQDVTGQKVVMDKYVLIQGDYKAIVHSPNPSIPPIFASDENTCCLEWNTALEKLTGWSRGEVVGKMLVGEVFGSCCRLKGPDALTKFMIALHNAIGGIDTDKLPFSFFDRNEKNVQTLLTANKRVNMKGDIIGAFCFLQIASPELQPSLKVQKQQEKKSFARMKELAYICQEIKNPLSGIHFTNSLLENTDLTEDQQQFLETSAACEKQILKIIRDIDLESIENGSLELEKAEFLLGSVINAVVSQAMLLLRERNLQLLRDIPEEIKTLAVYGDQARIQQVLADFLLNMVRYAPSSAGWVEIHVCPTLKQISDGHTLVHTEFRYLERVLQTRMLGLQHPLRSFLNCKLTLVMLHREGMVPKIQFQGLSVCQGRLIWLSFPENTTVALYPLTIWFLLLHRHQSRSITHT

SEQ ID NO: 9731 - protein, 302 aa, Arabidopsis halleri subsp. gemmifera
MTNINLIKHVIYFFFFISCFLTKPSDASRGGIAIYWGQNGNEGNLSATCATGRYAYVNVAFLVKFGNGQTPELNLAGHCNPAANTCTHFGSQVKYCQSRGIKVMLSLGGGIGNYSIGSKEDAKVVADYLWNNFLGGKSSSRPLGDAVLDGIDFNIELGSPQHWDDLARSLSKLSHRGRKVYLTGAPQCPFPDRLMGNALNTRRFDYVWIQFYNNPPCSYTSGNTQNLFDSWNKWTTSITAQKIFLGLPAAPEASGSGYIPPDVLTSQILPTLKKSRKYGGVMLWSKFWDDKNGYSSSILATV

SEQ ID NO: 9732 - protein, 1146 aa, Populus tremula
MASQSQRQSNQPAHNQAQSSGTSNMRQHHHPTESVSKAIAQYTVDAQLHAVFEQSGGTGKSFDYSKSVRTPNQSVPEEQITAYLSKIQRGGHIQPFGCMIAADEQSFRVIAYSENAKDMLGLTPQSVPSLEKQEILFVGADVRILFRPSSAVLLEKAFGAREITLLNPIWIHSKDSGKPFYAILHRIDVGIVIDLEPARTEDPALSIAGAVQSQKLAVRAISQLQSLPGGDIKLLCDTVVDSVRELTGYDRVMVYKFHEDEHGEVVAENKRVDLEPYIGLHYPSTDIPQASRFLFKQNRVRMIVDCHAIPVSVIQDEGLMQPLCLVGSTLRAPHGCHAHYMENMGSIASLAMAVIIYGNDEEAIGGRNSMRLWGLVVCHHTSARCIPFPLRYACEFLMQAFGLQLNMELQLASQLLEKHVLRTQTLLCDMLLRDSPAGIVTQSPSIMDLVKCDGAALYYQGQYYPLGVTPTEAQIKDIVEWLLTLHGDPTGLSTDSLADAGYPGAAFLGDAVCGMAVAYIAERDFLFWFRSHTAKEVKWGGAKHHPEDKDDGQRMHPRSSFKAFLEVVKSRSLPWENAEMDAIHSLQLILRDSFRDAEATNSKAVVHNQLKDMELQGMDELSSVAREMVRLIETATAPIFAVDVEGRINGWNAKVAELTGLSVEEAMGKSLVHDLVYKEYEEIVDKLIHRAVKGEEDKNVEIKLRTFCSEHQKKAVFVVVNACSSKDYMDNIVGVCFVGQDVTGQKVVMDKYVLIQGDYKAIVHSPNPSIPPIFASDENTCCLEWNTAMEKLTGWSRGEVVGKMLVGEVFGSCCRLKGPDALTKFMIALHNAIGGIDTDKLPFSFFDRNEKNVQTLLTANKRVNMKGDIIGAFCFLQIASPELQPSLKVQKQQEKKSFARMKELAYICQEIKNPLSGIHFTNSLLENTDLTEDQQQFLETSAACEKQILKIIRDIDLESIENGSLELEKAEFLLGSVINAVVSQAMLLLRERNLQLLRDIPEEIKTLAVYGDQARIQQVLADFLLNMVRYAPSSAGWVEIHVCPTLKQISDGHTLVHTEFRYLERVLQTRMLGLQHPLRSFLNCKLTLVMLHREGMVPKIQFQGLSVCQGRLIWLSFPENTTVALYPLTIWFLLLHRHQSRSITHT

SEQ ID NO: 9733 - protein, 302 aa, Arabidopsis halleri subsp. gemmifera
MTNINLIKHVIYLLFFISCFLTKPSDASRGGIAIYWGQNGNEGNLSATCATGRYAYVNVAFLVKFGNGQTPELNLAGHCNPAANTCTHFGSQVKYCQSRGIKVMLSLGGGIGNYSIGSKEDSKVVADYLWNNFLGGKSSSRPLGDAVLDGIDFNIELGSPQHWDDLARSLSKLSHRGRKVYLTGAPQCPFPDRLMGNALNTRRFDYVWIQFYNNPPCSYTSGNTQNLFDSWNKWTTSITAQKIFLGLPAAPEASGSGYIPPDVLTSQILPTLKKSRKYGGVMPWSKFWDDKNGYSSSILATV

SEQ ID NO: 9734 - protein, 294 aa, Saccharomyces cerevisiae
DRSANTNIAVYWGQNSAGTQESLATYCESSDADIFLLSFLNQFPTLGLNFANACSDTFSDGLLHCTQIAEDIETCQSLGKKVLLSLGGASGSYLFSDDSQAETFAQTLWDTFGEGTGASERPFDSAVVDGFDFDIENNNEVGYSALATKLRTLFAEGTKQYYLSAAPQCPYPDASVGDLLENADIDFAFIQFYNNYCSVSGQFNWDTWLTYAQTVSPNKNIKLFLGLPGSASAAGSGYISDTSLLESTIADIASSSSFGGIALWDASQAFSNELNGEPYVEILKNLLTSASQTA

SEQ ID NO: 9735 - protein, 292 aa, Physcomitrella patens subsp. patens
MLKVLQIVEVLLQQNRHATKRDVYYNDTALLKGQMVIYSRLDQSINDICCFFHCSRPSLNLATYAMRGSSLVTGQLSYYEEGRLINCSKRSSTSNGLPVPVHINKVSHLSSSAEYILLVEKETVFQRLANDKFCAKNCCILLTGKGYPDVATRSFLRRLVDQLHLPVYGLMDGDPYGLDILSIYRFGSLTMAYDAKVLAVPSILWLGIFLSDLGHFGLTENCLLPMSKRDEKKADAILNKSYIQQLAPAWWSKLAEFRTRRVKLEVEAISTVSFTSLADHYIPSKIRGQCYI

SEQ ID NO: 9736 - protein, 450 aa, Physcomitrella patens subsp. patens; identical to SEQ ID NO: 6205

SEQ ID NO: 9737 - protein, 199 aa, Oryza sativa Indica Group
MQQGRGRGRRRMMQGSSYYAVLGVHPGASAAEIRAAYHRLAMKWHPDKITSGRVDPEEAKSRFQQVHEAYQVLSDEKRRALYDSGMYDPLDDDQEEDVEGFHDFLQEMVSLMATVGREEPVYCLDELRSMLDGMMQDFASSELPSPSGGFFAGAPSSPFADTGAAQQQRGVGSASARAHAHPQVVGNSACLSRMAFSSY

SEQ ID NO: 9738 - protein, 286 aa, Zea mays
MAATSAPPASAHANGNGSLVGVAAPVGAPTNPMATALLTDQYQFSMAYAYWKAGKHADRAVFDLYFRKNPFGGEFTVFAGLEECIKFIANFKFTEHDISFLQSVMPMCEGAFFNYLREVDCSDVEVYSIPEGSVVFPKVPLMRVEGPVAVVQLRRETPFVNLINYASLVTTNAARHRHVAGKSKVLLEFGLRRAQGPDGAISASKYCFMGGFDATSNVLAGNLFGIPLRGTHSHAFVSSYMSLDEIPDKALKSKDGSRLCQDFVSLVQEWLQKIQAANSLWCILVI

SEQ ID NO: 9739 - protein, 469 aa, Populus tremula x Populus tremuloides
MATDTAKISQLKSAVANLDQISESEKTGFVNLVSRYLSGEAQQVEWSKIQTPTDEVVVPYDTLAPTPEDPEETKKLLDKLVVLKLNGGLGTTMGCTGPKSVIEVRNGLTFLDLIVIQIENLNKKYGCSVPLLLMNSFNTHDDTQKIVEKYSNSNIEIHTFNQSQYPRLVVDDFVPLPSKGHTDKDGWYPPGHGDVFPSLKNSGKLDDLLSQGKEYVFVANSDNLGAVVDLKILNHLIRNKNEYCMEVTPKTLADVKGGTLISYEGKVQLLEIAQVPDQHVNEFKSIEKFKIFNTNNLWVNLKAIKRLVEADALKMEIIPNPKEVDGVKVLQLETAAGAAIKFFDHAIGINAPRSRFLPVKATSDLLLVQSDLYTLVDGFVIRNPARTIPANPSIDLGPEYKKVANFLSRFKSIPSIIELDSLKVAGDVWFGAGITLKGKVSIVAKSGVKLEIPDGAVLQNKEINGPEDL

SEQ ID NO: 9740 - protein, 490 aa, Desulfovibrio desulfuricans subsp. desulfuricans str. G20
MRVFPSGTMTEQQTPAADDSPRAGNGQTAFAPFARKMRLHGLSEGLIRLFNSYYDEIVARHTGYLHEAELLPVSAADLPHVDSLESFREAGRQAARQAVVIKLNGGLGTSMGMTHAKSLIPVFGEMRFLDIIMQQALLQQKECGGPLPLALMNSFSTHEETLQALADIREEDCRQCTPVCFVQHKFPKVSRRTLQPVSYPQSPDMEWNPPGHGDLYASLVTSGVLDDLLSHGRRYAFVSNSDNLGAVLDMRILGYMAGNELPFIMEVAPRTASDKKGGHLAQHRDGGLILRELAQCPPDETDAFQDIRRYGLFNTNNLWVDLHALKKRIEKEGLLRLPVILNPKTVNPRDKSSEPVWQVETAMGAGISMFTGAQAVVVNRDRFIPVKKCSDLLAVMSDCFALNQGTVSFSPECRYPTPQVTLDDRYYDHYDKLLQRIPYGPPSLKECSSLTIKGDVTFGRNVVIRGDTTITTGGTAHIPDNTELEGEVIL

SEQ ID NO: 9741 - protein, 518 aa, Colletotrichum lagenarium
MPTLGFLKKKRTREGNQDPQGSLPTSPVTPTSSKPFDSSISTTLSSLSNNSQATSQPSGPGQKQQEDPASSEAAKNQQMYPVTVHPAPNQQHYNQQGEPQQNLPSISNLINPTQHDASSNGHNYLAQPTQTSQPNPSPGTDPTRLQQQQAQSMLHPPTQPQQQQQQQQQQQQQQQTQQLQQQKNGMPQQAPDQQVRQTKGKYTLQDFDILRTLGTGSFGRVHLVQSKHNQRFYAVKVLKKAQVVKMKQVEHTNDERRMLGEVKHPFLITLWGTFQDSKNLYMVMDFVEGGELFSLLRKSGRFPNPVAKFYAAEVTLALEYLHSRDIIYRDLKPENLLLDRHGHLKITDFGFAKRVPDKTWTLCGTPDYLAPEVVSNKGYNKSVDWWSLGILIYEMLCGYTPFWDSGSPMKIYENILKGKVKYPAYINPDAQDMLSKLITADLTKRLGNLYGGPNDVKTHPWFQEVTWDRLARKDIDAPYTPPVKAGAGDASQFDRYPEDPERYGSSGHDEYGHLFTDF

SEQ ID NO: 9742 - protein, 290 aa, Mesorhizobium huakuii
PLWGFDGSSTMQAEGRSSDCVLKPVALYPDPARTNGILVMCEVMMPDGVTPHESNSRATILDDEDAWFGFEQEYFFYKDGRPLGFPESGYPAPQGPYYTGVGYKNVGDVARKIVEEHLDQCLAAGINHEGINAEVAKGQWEFQIFGKGSKKAADQIWMARYLLLRLTETYGIDIEFHCKPLGDTDWNGSGMHCNFSTKFMREVGGKAYFEALMAQFDKNLMDHIVVYGPDNDKRLTGKHETAPWNKFSYGVADRGASIRVPHSFVKNDYKGYLEDRRPNSQGDPYQIVRI

SEQ ID NO: 9743 - protein, 290 aa, Rhizobium leguminosarum
LPLWGFDGSSTQQAEGRSSDCVLKPVAIYPDPARTNGALVMCEVMMPDGVTPHASNARATILDDEDAWFGFEQEYFFYQNGRPLGFPEQGYPAPQGPYYTGVGYSNVGDVAREIVEEHLDLCLAAGINHEGINAEVAKGQWEFQIFGKGSKKAADQIWMARYLLQRLTEKYGIDIEYHCKPLGDTDWNGSGMHCNFSTKYMREVGGKAYFEALMAQFEKNLMDHINVYGPDNDKRLTGKHETAPWNKFSYGVADRGASIRVPHSFIKNDYKGYLEDRRPNSQGYPYRIVR

SEQ ID NO: 9744 - protein, 1161 aa, Arabidopsis thaliana
VSGVGGSGGGRGGEEEPSSSHTPNNRRGGEQAQSSGTKSLRPRSNTESMSKAIQQYTVDARLHAVFEQSGESGKSFDYSQSLKTTTYGSSVPEQQITAYLSRIQRGGYIQPFGCMIAVDESSFRIIGYSENAREMLGLMPQSVPTLEKPEILAMGTDVRSLFTSSSSILLERAFVAREITLLNPVWIHSKNTGKPFYAILHRIDVGVVIDLEPARTEDPALSIAGAVQSQKLAVRAISQLQALPGGDIKLLCDTVVESVRDLTGYDRVMVYKFHEDEHGEVVAESKRDDLEPYIGLHYPATDIPQASRFLFKQNRVRMIVDCNATPVLVVQDDRLTQSMCLVGSTLRAPHGCHSQYMANMGSIASLAMAVIINGNEDDGSNVASGRSSMRLWGLVVCHHTSSRCIPFPLRYACEFLMQAFGLQLNMELQLALQMSEKRVLRTQTLLCDMLLRDSPAGIVTQSPSIMDLVKCDGAAFLYHGKYYPLGVAPSEVQIKDVVEWLLANHADSTGLSTDSLGDAGYPGAAALGDAVCGMAVAYITKRDFLFWFRSHTAKEIKWGGAKHHPEDKDDGQRMHPRSSFQAFLEVVKSRSQPWETAEMDAIHSLQLILRDSFKESEAAMNSKVVDGVVQPCRDMAGEQGIDELGAVAREMVRLIETATVPIFAVDAGGCINGWNAKIAELTGLSVEEAMGKSLVSDLIYKENEATVNKLLSRALRGDEEKNVEVKLKTFSPELQGKAVFVVVNACSSKDYLNNIVGVCFVGQDVTSQKIVMDKFINIQGDYKAIVHSPNPLIPPIFAADENTCCLEWNMAMEKLTGWSRSEVIEKMIVGEVFGSCCMLKGPDALTKFMIVLHNAIGGQDTDKFPFPFFDRNGKFVQALLTANKRVSLEGKVIGAFCFLQIPSPELQQALAVQRRQDTECFTKAKELAYICQVIKNPLSGMRFANSLLEATDLNEDQKQLLETSVSCEKQISRIVGDMDLESIEDGSFVLKREEFFLGSVINAIVSQAMFLLRDRGLQLIRDIPEEIKSIEVFGDQIRIQQLLAEFLLSIIRYAPSQEWVEIHLSQVSKQMADGFAAIRTEFRMACPGEGLPPELVRDMFHSSRWTSPEGLGLSVCRKILKLMNGEVQYIRESERSYFLIILELPVPRKRPLSTASGSGDM

SEQ ID NO: 9745 - protein, 429 aa, Brassica napus
PVRIPGSTHASEALYGYEPPKGPKRPKMISCGCCPCFGRRRKSKHESNGDIAGAEGDKEHLMSEMNFEQKFGQSSIFVTSTLMEDGGVPPSSSPAVLLKEAIHVISCGYEDKTEWGTELGWIYGSITEDILTGFKMHCRGWRSIYCMPKRAAFKGSAPINLSDRLNQVLRWALGSVEIFFSRHSPLWYGYKGGKLKWLERFAYANTTTHASASIRLLAYCILPAICLLTDKFIMPPISTFASLFFIALFGSIIATGILELRWSGVSIEEWWRNEQFWVIGGISAHLFAVVQGLLKILAGIDTNFTVTSKATDDDDFGELYAFKWTTLLIPPTTVLIINIVGVVAGISDAINNGYQSWGPLFGKLFFSFWVIVHLYPFLKGLMGRQNRTPTIVVIWSILLASIFSLLWVRIDPFVMKTKGPDTSMCGINC

SEQ ID NO: 9746 - protein, 322 aa, Oryza sativa Japonica Group; identical to SEQ ID NO: 9476

SEQ ID NO: 9747 - protein, 356 aa, Hydrogenobacter thermophilus
MPIKDYYQILGVSKDATAEEIKKAYRRLAKEYHPDISADENASEKFKEINEAYHILSDEERRKEYDRILKSGDEKSYRDFMEYIQDFLESIWQGMRRSPKPKKGGDVRLKLELTLEEAAFGCEKDIEYERWIDCPTCEGKGYVGKMEKVTCHACEGTGRRVSGIFSFPRPCSVCKGRGFIIKNQCPACSGRGRVAMHSLLRVNVPPGTDEGDVLKVPGKGHTGERGGEAGDLYLRVSLKPHPIFKKVGKDLYMEAFISFPLAVLGGTTKIKTLEGSYQEVFLQPGTECGSTKRLQGLGYPIAGGRGDLIITFRIEVPKNVNSNIRALIEKLAKELGEEGIEYQSGVITKILSLLKL

SEQ ID NO: 9748 - protein, 1158 aa, Arabidopsis thaliana
GVGGSGGGRGGKEEPSSSHTPNNRRGGEQAQSSGTKSLRPRSNTESMSKAIQQYTVDARLHAVFEQSGESGKSFDYSQSLKTTTYGSSVPEQQITAYLSRIQRGGYIQPFGCMIAVDESSFRIIGYSENAREMLGLMPQSVPTLEKPEILAMGTDVRSLFTSSSSILLERAFVAREITLLNPVWIHSKNTGKPFYAILHRIDVGVVIDLEPARTEDPALSIAGAVQSQKLAVRAISQLQALPGGDIKLLCDTVVESVRDLTGYDRVMVYKFHEDEHGEVVAESKRDDLEPYIGLHYPATDIPQASRFLFKQNRVRMIVDCNATPVLVVQDDRLTQSMCLVGSTLRAPHGCHSQYMANMGSIASLAMAVIINGNEDDGSNVASGRSSMRLWGLVVCHHTSSRCIPFPLRYACEFLMQAFGLQLNMELQLALQMSEKRVLRTQTLLCDMLLRDSPAGIVTQSPSIMDLVKCDGAAFLYHGKYYPLGVAPSEVQIKDVVEWLLANHADSTGLSTDSLGDAGYPGAAALGDAVCGMAVAYITKRDFLFWFRSHTAKEIKWGGAKHHPEDKDDGQRMHPRSSFQAFLEVVKSRSQPWETAEMDAIHSLQLILRDSFKESEAAMNSKVVDGVVQPCRDMAGEQGIDELGAVAREMVRLIETATVPIFAVDAGGCINGWNAKIAELTGLSVEEAMGKSLVSDLIYKENEATVNKLLSRALRGDEEKNVEVKLKTFSPELQGKAVFVVVNACSSKDYLNNIVGVCFVGQDVTSQKIVMDKFINIQGDYKAIVHSPNPLIPPIFAADENTCCLEWNMAMEKLTGWSRSEVIGKMIVGEVFGSCCMLKGPDALTKFMIVLHNAIGGQDTDKFPFPFFDRNGKFVQALLTANKRVSLEGKVIGAFCFLQIPSPELQQALAVQRRQDTECFTKAKELAYICQVIKNPLSGMRFANSLLEATDLNEDQKQLLETSVSCEKQISRIIGDMDLESIEDGSFVLKREEFFLGSVINAIVSQAMFLLRDRGLQLIRDIPEEIKSIEVFGDQIRIQQLLAEFLLSIIRYAPSQEWVEIHLSQVSKQMADGFAAIRTEFRMACPGEGLPPELVRDMFHSSRWTSPEGLGLSVCRKILKLMNGEVQYIRESERSYFLIILELPVPRKRPLSTASGSGD

SEQ ID NO: 9749 - protein, 291 aa, Bradyrhizobium yuanmingense
PLWGFDGSSTQQAEGHSSDCVLKPVAVFPDGARTNGVLVMCEVMMPDGKTPHPSNKRATILDDSGAWFGFEQEYFFYKDGRPLGFPTAGYPAPQGPYYTGVGYSNVGDVARKIVEEHLDLCLAAGINHEGINAEVAKGQWEFQIFGKGSKTAADQMWMARYLMLRLTEKYGIDIEFHCKPLGDTDWNGSGMHANFSTAYMREVGGKEYFEALMAAFEKNLMDHIAVYGPDNDKRLTGKHETAPCNKFSYGVADRGASIRVPHSFVNNGYKGYLEDRRPNSQGDPLLDRCSI

SEQ ID NO: 9750 - protein, 568 aa, Brassica napus
RPRVRPRVRVSREKRPGFQHHKKAGAMNALIRVSAVLTNGAYLLNVDCDHYFNNSKAIKEAMCFLMDPAYGKKCCYVQFPQRFDGIDLHDRYANRNIVFFDINLKGLDGIQGPVYVGTGCCFNRQALYGYDPVLTEEDLEPNIIVKSCCGSRKKGKKSKKYSYDQKRRGISRSDSNAPLFNMDDIDEGFEGYDDDRSILMSQKRVEKRFGQSPVFIAATFMEQGGIPPTTNPATLLKEAIHVISCGYEDKTEWGKEIGWIYGSVTEDILTGFKMHARGWMSIYCNPPRPAFKGSAPINLSDRLNQVLRWALGSIEILLSRHCPIWYGYTGRLRLLERLAYINTIVYPITALPLIAYCILPAFCLITDKFIIPEISNYASIWFILLFISIAVTGILELRWSGVSIEDWWRNEQFWVIGGTSAHLFAVFQGLLKVLAGIDTNFTVTSKASDEDGDFAELYIFKWTALLIPPTTVLVVNLIGIVAGVSYAVNSGYQSWGPLFGKLFFALWVIAHLYPFLKGLMGRQNRTPTIVIVWSVLLASIFSLLWVRINPFVSVTPEANPTAVPGGVF

SEQ ID NO: 9751 - protein, 235 aa, Burkholderia xenovorans LB400
MATLYDTLGVPTHATEEEIKRAYRKAAMKWHPDRNGGAEEVARATFQEIRDAYAILSDAAQRKVYDSVYAEQMRGWEAQHARRQQAQTEREAAARAADEAAYAEMVALAMRFADDGHNRDVLFGVLLGRRCEVGRAAQIADSVSALQAARREAAKAQADAANAPDVSGAHDVSGVADASAESDPTLAKQDAAVQDVPARRANPEKQEKRAEPAAATHPAGVLEGLWFQFLNGLRF

SEQ ID NO: 9752 - protein, 299 aa, Glycine max
MKTPNKASLLLFPLLSLSLFINHSHAAGIAVYWGQNGGEGTLAEACNTGNYQYVNIAFLSTFGNGQTPQLNLAGHCDPNNNGCTGLSSDINTCQDLGIKVLLSLGGGAGSYSLSSADDATQLANYLWENFLGGQTGSGPLGDVILDGIDFDIESGGSDHYDDLARALNSFSSQSKVYLSAAPQCIIPDAHLDAAIQTGLFDYVWVQFYNNPSCQYSSGNTNDLINSWNQWITVPASLVFMGLPASEAAAPSGGFVPADVLTSQILPVIKQSSNYGGVMLWDRFNDVQNGYSNAIIGSVN

SEQ ID NO: 9753 - protein, 368 aa, Haloarcula marismortui ATCC 43049
MSTDSDTTPDTEEAREQLIDLAADFYDQFADGEVPTMTIPTRTKSNIVFDEDEQVWVYGDRNSTRSAKTISGAEKILKAVYTIDFLSQQLEEDRSSTLRELYYLSESWDLDEAQFNTQDESNNLIEDLEIVSDVKREDFHMRPEESGAKVMGPLLLREQTNRGDREIHCQDDVGQGGYQIPNNPDTIEFLDNDAKFVLCVETGGMRDRLVENGFDDEYDALVVHLGGQPARATRRLIKRLHDELDLPVTVFTDGDPWSYRIFGSVSYGSIKSAHLSEYLATPEAQFIGIRPEDIVEYELPTDPLSDSDVNALESELEDPRFQTDFWEEQIELQLDINKKAEQQALASRGLDFVTETYLPERLDEMGIL

SEQ ID NO: 9754 - protein, 289 aa, Rhizobium tropici
PLWGFDGSSTMQAEGRSSDCVLKPVAIYPDPARTNGALVMCEVMMPDGVTPHESNSRATILDDEDAWFGFEQEYFFYKDGRPLGFPEAGYPAPQGPYYTGVGYKNVGDVAREIVEEHLDLCLEAGINHEGINAEVAKGQWEFQIFGKGSKKAADQIWMARYLLLRLCEKYGIDIEFHCKPLGDTDWNGSGMHCNFSTKFMREVGGKAYFEALMAQFDKNLEAHIAVYGPDNHMRLTGKHETAPWNKFSYGVADRGASIRVPHSFIKNDYKGYLEDRRPNSQGDPYQIRH

SEQ ID NO: 9755 - protein, 1168 aa, Arabidopsis thaliana
MVSGVGGSGGGRGGKEEPSSSHTPNNRRGGEQAQSSGTKSLRPRSNTESMSKAIQQYTVDARLHAVFEQSGESGKSFDYSQSLKTTTYGSSVPEQQITAYLSRIQRGGYIQPFGCMIAVDESSFRIIGYSENAREMLGLMPQSVPTLEKPEILAMGTDVRSLFTSSSSILLERAFVAREITLLNPVWIHSKNTGKPFYAILHRIDVGVVIDLEPARTEDPALSIAGAVQSQKLAVRAISQLQALPGGDIKLLCDTVVESVRDLTGYDRVMVYKFHEDEHGEVVAESKRDDLEPYIGLHYPATDIPQASRFLFKQNRVRMIVDCNATPVLVVQDDRLTQSMCLVGSTLRAPHGCHSQYMANMGSIASLAMAVIINGNEDDGSNVASGRSSMRLWGLVVCHHTSSRCIPFPLRYACEFLMQAFGLQLNMELQLALQMSEKRVLRTQTLLCDMLLRDSPAGIVTQSPSIMDLVKCDGAAFLYHGKYYPLGVAPSEVQIKDVVEWLLANHADSTGLSTDSLGDAGYPGAAALGDAVCGMAVAYITKRDFLFWFRSHTAKEIKWGGAKHHPEDKDDGQRMHPRSSFQAFLEVVKSRSQPWETAEMDAIHSLQLILRDSFKESEAAMNSKVVDGVVQPCRDMAGEQGIDELGAVAREMVRLIETATVPIFAVDAGGCINGWNAKIAELTGLSVEEAMGKSLVSDLIYKENEATVNKLLSRALRGDEEKNVEVKLKTFSPELQGKAVFVVVNACSSKDYLNNIVGVCFVGQDVTSQKIVMDKFINIQGDYKAIVHSPNPLIPPIFAADENTCCLEWNMAMEKLTGWSRSEVIGKMIVGEVFGSCCMLKGPDALTKFMIVLHNAIGGQDTDKFPFPFFDRNGKFVQALLTANKRVSLEGKVIGAFCFLQIPSPELQQALAVQRRQDTECFTKAKELAYICQVIKNPLSGMRFANSLLEATDLNEDQKQLLETSVSCEKQISRIIGDMDLESIEDGSFVLKREEFFLGSVINAIVSQAMFLLRDRGLQLIRDIPEEIKSIEVFGDQIRIQQLLAEFLLSIIRYAPSQEWVEIHLSQVSKQMADGFAAIRTEFRMACPGEGLPPELVRDMFHSSRWTSPEGLGLSVCRKILKLMNGEVQYIRESERSYFLIILELPVPRKRPLSTATGSGDMMLMMPY

SEQ ID NO: 9756 - protein, 250 aa, Catharanthus roseus
QEDQNEENHNNINQFSEVHSLDHDHEHGQFSSGDIVARRPRGRPPGSKNKAKPPVIITRESANTLRAHILEVGNGQDVFDCIATYARRRQRGICILSGSGIVTNVTLRQPAGGGGVVTLHGRFEILSLSGSFLPPPAPPGATSLTIFLGGGQGQVVGGSVVGELTAAGPVIVIASSFTNVAYERLPLEEEEQQQLQILPPVSQGSGAVAAGGGGEGINNNNTATFPDPSSGLPFFNLPLNNMPNCQLPPF

SEQ ID NO: 9757 - protein, 380 aa, Polaromonas sp. JS666
MAKKDYYDTLGVPKNASDDDIKKAYRKLAMKHHPDRNQGDKSKVSEEKFKEAKEAYEVLSDENKRMAYDQYGHAGVDPNMRGGGPGAEGFGGFAEAFGDIFGDVFGGQRGGQQRGGRQVYRGGDLSYAMEITLEEAAHGKEAQIRIPSWDDCNTCHGSGAKPGTKVVTCTTCHGHGVVQMRQGFFSVQQTCPQCKGTGKLIPEPCVACHGVGKTKNNKTLEVKIPAGIDDGMRIRSTGNGEPGTNGGPPGDLYIEIRIKKHEIFERDGDDLHCAVPISFTTAALGGEIEVPTLAGKAAIDIPEGTQAAKQFRLRGKGIKGVRSSYPGDLYCHITVETPVKLTEHQRKLLKELDESLKKGGARHSPSEEGWADKLKSFFSA

SEQ ID NO: 9758 - protein, 1160 aa, Arabidopsis lyrata
GVGGSGRGGEAEPSSSHTTNNRRGGEQAQSSGTKSLRPRESMSKAIQQYTVDARLHAVFEQSGESGKSFDYSQSLKTTTYGSSVPEQQITAYLSRIQRGGYIQPFGCMIAVDESSFRIIGYSENAREMLGLMPQSVPTLEKPEILAMGTDVRSLFTSSSSILLERAFVAREITLLNPVWIHSKNTGKPFYAILHRIDVGVVIDLEPARTEDPALSIAGAVQSQKLAVRAISQLQSLPGGDIKLLCDTVVESVRDLTGYDRVMVYKFHEDEHGEVVAESKRDDLEPYIGLHYPATDIPQASRFLFKQNRVRMIVDCNAKPVLVVQDDRLTQSMCLVGSTLRAPHGCHSQYMANMGSIASLAMAVIINGNEEDGSNVASGRSSMRLWGLVVCHHTSSRCIPFPLRYACEFLMQAFGLQLNMELQLALQMSEKRVLRTQTLLCDMLLRDSPAGIVTQSPSIMDLVKCDGAAFLYHGKYYPLGVAPSEVQIKDVVEWLLANHADSTGLSTDSLGDAGYPDAAALGDAVCGMAVAYITKRDFLFWFRSHTAKEIKWGGAKHHPEDKDDGQRMHPRLSFQAFLEVVKSRSQPWETAEMDAIHSLQLILRDSFKESEAAMNSKAVDGAVQPCRDMAGEQGIDELGAVAREMVRLIETATVPIFAVDAGGCINGWNAKIAELTGLSVEEAMGKSLVSDLIYKENEETVNKLLSRALRGDEEKNVEVKLKTFSPELQGKAVFVVVNACFSKDYLNNIVGVCFVGQDVTGQKLVMDKFINIQGDYKAIVHSPNPLIPPIFAADENTCCLEWNMAMEKLTGWSRSEVIGKMLVGEVFGSCCMLKGPDALTKFMIVLHNAIGGQETDKFPFPFFDRNGKFVQALLTANKRVSLDGKVIGAFCFLQIPSPELQQALAVQRRQDTECFTKAKELAYICQVIKNPLSGMRFANSLLEATDLNEDQKQLLETSVSCEKQISRIVGDMDLESIEDGSFELKMAEFFLGSVINAIVSQAMFLLRDRGLQLIRDIPEEIKSIVVFGDQIRIQQLLAEFLLSIIRYAPSQEWVEIHLSQVSKQAADGFTAIRTEFRMACPGEGLPPELVRDMFHSSRWTSPEGLGLSVCRKILKLMNGEVQYIRESERSYFFIILELPVPRKRPLSTASGNSNMMLMMPY

SEQ ID NO: 9759 - protein, 302 aa, Oryza sativa Japonica Group; identical to SEQ ID NO: 9183

SEQ ID NO: 9760 - protein, 290 aa, Bradyrhizobium elkanii
LPLWGFDGSSTQQAEGHSSDCVLKPVACYPDAARENGVLVMCEVMMPDGKTPHVSNNRATILDDEGAWFGFEQEYFFYKDGRPLGFPTDGYPAPQGPYYTGVGYSNVGSVARKIVEEHLNLCLAAGINHEGINAEVAKGQWEFQIFGKGSKTAADQMWMARYLMLRLTESYGIDIEFHCKPLGDTDWNGSGMHANFSTKYMREVGGKEYFESLMKAFDKNLMDHIAVYGPDNDKRLTGKHETAPWNKFSYGVADRGASIRVPHSFVNNGYKGYLEDRRPNSQGDPYRAVR

SEQ ID NO: 9761 - protein, 293 aa, Catharanthus roseus
MDHSLPPPFNTRDFNLQHQFHHQNHNSEDEQSGTSGLKRDRDEKNDSGDGKDGGGDPGSGEMTRRPRGRPAGSKNKPKPPIIITRDSANALRTHVMEIADGCDIMESVATFARRRQRGVCIMSGSGTVTNVTLRQPASPGAVVTLHGRFEILSLAGSFLPPPAPPAATSLTIYLAGGQGQVVGGSVVGALLASGPVVIMAASFSNAAYERLPLDEEENSIPLQSGGSLGSPGGGGGGNGGVPGQQQQQGGQQQQQLLGGGGDPSALFHGMPPNLLNSIQLPNEAYWATGRPPF

SEQ ID NO: 9762 - protein, 431 aa, Vitis vinifera
MANDTPSTTTTPLLRPSRRWFSSLRLKTTLSAELGGSVGDLGTYIPIVLALTLVNHLDLSTTLIFTALYNISTGFLFGIPMPVQPMKSIAAVAISDPLLSLPQIAAAGLSTAATLFILGATGLMSLLYRFIPLPVVRGVQLSQGLAFAFSAIKYIRYNQDFSAGKSGPPRNWLGLDGIALALFAILLRIMSSIPAALIVFILGLVLCFIRDPSIVKDLRFGPSRIHLLRITWEDWKIGFFRGAIPQIPLSILNSVIAVCKLSADLFPDREVSVTSVSVSVGVMNLVGCWFGAMPVCHGAGGLAGQYRFGGRSGASVVFLGLGKLLIGLVFGNSFVRILGQFPIGILGVLLLFAGIELAMASRDMNTKEESFVMLVCAAVSMTGSSAALGFGCGILLYGLLKLRQMECSCFGNFNFDPKRPVAVDDETSLNP

SEQ ID NO: 9763 - protein, 1164 aa, Arabidopsis thaliana
MVSGGGSKTSGGEAVSSGHRRSRHTSAAEQAQSSANKALRSQNQQPQNHGGGTESTNKAIQQYTVDARLHAVFEQSGESGKSFDYSQSLKTAPYDSSVPEQQITAYLSRIQRGGYTQPFGCLIAVEESTFTIIGYSENAREMLGLMSQSVPSIEDKSEVLTIGTDLRSLFKSSSYLLLERAFVAREITLLNPIWIHSNNTGKPFYAILHRVDVGILIDLEPARTEDPALSIAGAVQSQKLAVRAISHLQSLPSGDIKLLCDTVVESVRDLTGYDRVMVYKFHEDEHGEVVAESKRNDLEPYIGLHYPATDIPQASRFLFKQNRVRMIVDCYASPVRVVQDDRLTQSICLVGSTLRAPHGCHAQYMTNMGSIASLAMAVIINGNEEDGNGVNTGGRNSMRLWGLVVCHHTSARCIPFPLRYACEFLMQAFGLQLNMELQLALQVSEKRVLRMQTLLCDMLLRDSPAGIVTQRPSIMDLVKCNGAAFLYQGKYYSLGVTPTDSQINDIVEWLLANHSDSTGLSTDSLGDGGYPRAAALGDAVCGMAVACITKRDFLFWFRSHTEKEIKWGGAKHHPEDKDDGQRMNPRCSFQTFLEVVKSRCQPWETAEMDAIHSLQLILRDSFKESEAMDSKAAAAGAVQPHGDDMVQQGMQEIGAVAREMVRLIETATVPIFAVDIDGCINGWNAKIAELTGLSVEDAMGKSLVRELIYKEYKETVDRLLSSALKGDEGKNVEVKLKTFGSELQGKAMFVVVNACSSKDYLNNIVGVCFVGQDVTGHKIVMDKFINIQGDYKAIIHSPNPLIPPIFAADENTCCLEWNTAMEKLTGWPRSEVIGKLLVREVFGSYCRLKGPDALTKFMIVLHNAIGGQDTDKFPFPFFDRKGEFIQALLTLNKRVSVDGKIIGAFCFLQIPSPELQQALEVQRRQESEYFSRRKELAYIFQVIKNPLSGLRFTNSLLEDTDLNEDQKQLLETSVSCEKQISKIVGDMDVKSIDDGSFLLERTEFFIGNVTNAVVSQVMLVVRERNLQLIRNIPTEVKSMAVYGDQIRLQQVLAEFLLSIVRYAPMEGSVELHLCPTLNQMADGFSAVRLEFRMACAGEGVPPEKVQDMFHSSRWTSPEGLGLSVCRKILKLMNGGVQYIREFERSYFLIVIELPVPLMMMMPSS

SEQ ID NO: 9764 - protein, 256 aa, Catharanthus roseus
EDEDEDRENGSGGEPKEGAVEIGTRRPRGRPPGSKNKPKPPIFVTRDSPNALRSHVLEVSGGSDVAESIAVFARKRQRGVCVLSGSGSVANVTLRQPAAPGAVVALHGRFEILSLSGAFLPGPAPPGSTGLTVYLAGGQGQVVGGSVVGSLVAAGPVLIIAATFANATYERLPLEDDEEDQVSPATGATTAGQPQLGGGGGGNSSSPPGMGSSGMGAHDPNSSMPVYNLNPNLLPNGGQLNHDGGYPNWAQPRTQY

SEQ ID NO: 9765 - protein, 1144 aa, Populus tremula
MASQSQRQSNQPAHNQAQSSGTSNMRQHHHPTESVSKAIAQYTVDAQLHAVFEQSGGTGKSFDYSKSVRTPNQSVPEEQITAYLSKIQRGGHIQPFGCMIAANEQSFRVIAYSENAKDMLGLTPQSVPSLEKQEILFVGADVRILFRPSSAVLLEKAFGAREITLLNPIWIHSKNSGKPFYAILHRIDVGIVIDLEPARTEDPALSIAGAVQSQKLAVRAISQLQSLPGGDIKLLCDTVVDSVRELTGYDRVMVYKFHEDEHGEVVAENKRVDLEPYIGLHYPSTDIPQASRFLFKQNRVRMIVDCHAIPVSVIQDEGLMQPLCLVGSTLRAPHGCHAQYMENMGSIASLAMAVIIYGNDEEAIGGRNSMRLWGLVVCHHTSARCIPFPLRYACEFLMQAFGLQLNMELQLASQLLEKHVLRTQTLLCDMLLRDSPTGIVTQSPSIMDLVKCDGAALYYQGQYYPLGVTPTEAQIKDIVEWLLTLHGDPTGLSTDSLADAGYPGAAFLGDAVCGMAVAYIAERDFLFWFRSHTAKEVKWGGAKHHPEDKDDGQRMHPRSSFKAFLEVVKSRSLPWENAEMDAIHSLQLILRDSFRDAEATNSKAVVHTQLKDMELQGMDELSSVAREMVRLIETATAPIFAVDVDGRINGWNAKVAELTGLSVEEAMGKSLVHDLVYKEYEEIVDKLIHRAVKGEEDKNVEIKLRTFCSEHQKKAVFVVVNACSSKDYMDNIVGVCFVGQDVTGQKVVMDKYVLIQGDYKAIVHSPNPSIPPIFASDENTCCLEWNTAMEKLTGWSRGEVVGKMLVGEVFGSCCRLKGPDALTKFMIALHNAIGGIDTDKLPFSFFDRNEKNVQTLLTANKRVNMNIIGAFCFLQIASPELQPSLKVQKQQEKKSFARMKELAYICQEIKNPLSGIHFTNSLLENTDLTEDQQQFLETSAACEKQILKIIRDIDLESIENGSLELEKAEFLLGSVINAVVSQAMLLLRERNLQLLRDIPEEIKTLAVYGDQARIQQVLADFLLNMVRYAPSSAGWVEIHVCPTLKQISDGHTLVHTEFRYLERVLQTRMLGLQHPLRSFLNCKLTLVMLHREGMVPKIQFQGLSVCQGRLIWLSFPENTTVALYPLTIWFLLLHRHQSRSITHT

SEQ ID NO: 9766 - protein, 302 aa, Arabidopsis halleri subsp. gemmifera
MTNINLIKHVIYLLFFISCFLTKPSDASRGGIAIYWGQNGNEGNLSATCATGRYAYVNVAFLVKFGNGQTPELNLAGHCNPAANTCTHFGSQVKYCQSRGIKVMLSLGGGIGNYSIGSKEDAKVVADYLWNNFLGGKSSSRPLGDAVLDGIDFNIELGSPQHWDDLARSLSKLSHRGRKVYLTGAPQCPFPDRLMGNALNTRRFDYVWIQFYNNPPCSYTSGNTQNLFDSWNKWTTSITAQKIFLGLPAAPEASGSGYIPPDVLTSQILPTLKKSRKYGGVMLWSKFWDDKDGYSSSILATV

SEQ ID NO: 9767 - protein, 458 aa, Saccharomyces cerevisiae YJM789
MSGSDRGDRLYDVLGVTRDATVQEIKTAYRKLALKHHPDKYVDQDSKEVNEIKFKEITAAYEILSDPEKKSHYDLYGDDNGAASSSGANGFGDEDFMNFFNNFFNNGSHDGNSFPGEYDGYEEGNSTSSKDIDIDISLTLKDLYMGKKLKFDLKRQVICIKCHGSGWKPKRKIHVTHDVECESCAGKGSKERLKRFGPGLVASQWVVCEKCNGKGKYTKRPKNPKNFCPDCAGLGLLSKKEIITVNVAPGHHFNDVITVKGMADEEIDKTTCGDLKFHLTEKQENLEQKQIFLKNFDDGAGEDLYTSITISLSEALTGFEKFLTKTFDDRLLTLSVKPGRVVRPGDTIKIANEGWPILDNPHGRCGDLYVFVHIEFPPDNWFNEKSELLAIKTNLPSSSSCASHATVNTEDDSNLTNNETISNFRIIHTDDLPERRPFKPEAQDSAYQKARSSYCCIQ

SEQ ID NO: 9768 - protein, 1144 aa, Populus tremula
MASQSQRQSNQPAHNQAQSSGTSNMRQHHHPTESVSKAIAQYTVDAQLHAVFEQSGGTGKSFDYSKSVRTPNQSVPEEQITAYLSKIQRGGHIQPFGCMIAADEQSFRVIAYSENAKDMLGLTPQSVPSLEKQEILFVGADVRILFRPSSAVLLEKAFGAREITLLNPIWIHSKNSGKPFYAILHRIDVGIVIDLEPARTEDPALSITGAVQSQKLAVRAISQLQSLPGGDIKLLCDTVVDSVRELTGYDRVMVYKFHEDEHGEVVAENKRVDLEPYIGLHYPSTDIPQASRFLFKQNRVRMIVDCHAIPVSVIQDEGLMQPLCLVGSTLRAPHGCHAQYMENMGSIASLAMAVIIYGNDEEAIGGRNSMRLWGLVVCHHTSARCIPFPLRYACEFLMQAFGLQLNMELQLASQLLEKHVLRTQTLLCDMLLRDSPTGIVTQSPSIMDLVKCDGAALYYQGQYYPLGVTPTEAQIKDIVEWLLTLHGDPTGLSTDSLADAGYPGAAFLGDAVCGMAVAYIAERDFLFWFRSHTAKEVKWGGAKHHPEDKDDGQRMHPRSSFKAFLEVVKSRSLPWENAEMDAIHSLQLILRDSFRDAEATNSKAVVHNQLKDMELQGMDELSSVAREMVRLIETATAPIFAVDVDGRINGWNAKVAELTGLSVEEAVGKSLVHDLVYKEYEEIVDKLIHRAVKGEEDKNVEIKLRTFCSEHQKKAVFVVVNACSSKDYMDNIVGVCFVGQDVTGQKVVMDKYVLIQGDYKAIVHSPNPSIPPIFASDENTCCLEWNTAMEKLTGWSRGEVVGKMLVGEVFGSCCRLKGPDALTKFMIALHNAIGGIDTDKLPFSFFDRNEKNVQTLLTANKRVNINIIGAFCFLQIASPELQPSLKVQKQQEKKSFARMKELAYICQEIKNPLSGIHFTNSLLENTDLTEDQQQFLETSAACEKQILKIIRDIDLESIENGSLELEKAEFLLGSVINAVVSQAMLLLRERNLQLLRDIPEEIKTLAVYGDQARIQQVLADFLLNMVRYAPSSAGWVEIHVCPTLKQISDGHTLVHTEFRYLERVLQTRMLGLQHPLRSFLNCKLTLVMLHREGMVPKIQFQGLSVCQGRLIWLSFPENTTVALYPLTIWFLLLHRHQSRSITHT

SEQ ID NO: 9769 - protein, 302 aa, Arabidopsis halleri subsp. gemmifera
MTNINLIKHVIYLLFFISCFLTKPSDASRGGIAIYWGQNGNEGNLSATCATGRYAYVNVAFLVKFGNGQTPELNLAGHCNPAANTCTHFGSQVKYCQSRGIKVMLSLGGGIGNYSIGSKEDAKVVADYLWNNFLGGKSSSRPLGDAVLDGIDFNIELGSPQHWDDLARSLSKLSHRGRKVYLTGAPQCPFPDRLMGNALNTRRFDYVWIQFYNNPPCSYTSGNTQNLFDSWNKWTTSITAQRIFLGLPAAPEASGSGYIPPDVLTSQILPTLKKSRKYGGVMLWSKFWDDKNGYSSSILATV

SEQ ID NO: 9770 - protein, 444 aa, Oryza sativa Indica Group
MAQWPWRWRVLLPLLLLHSSPVFAQEGQDNDPSTLFKRASEMMNLRKYDGSLGLLNAVLEVDPNHSEAYRQRASVLRHKCRYKEAEGDYSKYLELKPGSSSVEKELSQLLQAQNALESAYGQFESHDFSKVLEYINKIVLVFSPNCLKAKLLKAKALLALEDYSSVISETGFILKEDEDNLDALLLRGRAYYYLADHDVASRHYQKGLRLDPEHSELKKAYFGLKNLLKKTKSAEDNAAKGKLRVSAEDYKAALAMDPDHTSYNVHLYLGLCKVLVKLGRGKEAISSCTEALNIDGELVDALTQDMGIREALMRAEKQLKLSKRKDWYKILGISKTASAADIKRAYKKLALQWHPDKNVDNREEAENMFREIAAAYEVLGDEDKRVRYDRGEDLDEMNMGGGGGGFNPFGGGGQQYTFHYDGGFHGGGGFPGGGFPGGFQFNFG

SEQ ID NO: 9771 - protein, 1144 aa, Populus tremula
MASQSQRQSNQPAHNQVQSSGTSNMRQHHHPTESVSKAIAQYTVDAQLHAVFEQSGGTGKSFDYSKSVRTPNQSVPEEQITAYLSKIQRGGHIQPFGCMIAADEQSFRVIAYSENAKDMLGLTPQSVPSLEKQEILFVGADVRILFRPSSAVLLEKAFGAREITLLNPIWIHSKNSGKPFYAILHRIDVGIVIDLEPARTEDPALSIAGAVQSQKLAVRAISQLQSLPGGDIKLLCDTVVDSVRELTGYDRVMVYKFHEDEHGEVVAENKRVDLEPYIGLHYPSTDIPQASRFLFKQNRVRMIVDCHAIPVSVIQDEGLMQPLCLVGSTLRAPHGCHAQYMENMGSIASLAMAVIIYGNDEEAIGGRNSMRLWGLVVCHHTSARCIPFPLRYACEFLMQAFGLQLNMELQLASQLLEKHVLRTQTLLCDMLLRDSPTGIVTQSPSIMDLVKCDGAALYYQGQYYPLGVTPTEAQIKDIVEWLLTLHGDPTGLSTDSLADAGYPGAAFLGDAVCGMAVAYIAERDFLFWFRSHTAKEVKWGGAKHHPEDKDDGQRMHPRSSFKAFLEVVKSRSLPWENAEMDAIHSLQLILRDSFRDAEATNSKAVVHTQLKDMELQGMDELSSVAREMVRLIETATAPIFAVDVEGRINGWNAKVAELTGLSVEEAMGKSLVHDLVYKEYEEIVDKLIHRAVKGEEDKNVEIKLRTFCSEHQKKAVFVVVNACSSKDYMDNIVGVCFVGQDVTGQKVVMDKYVLIQGDYKAIVHSPNPSIPPIFASDENTCCLEWNTAMEKLTGWSRGEVVGKMLVGEVFGSCCRLKGPDALTKFMIALHNAIGGIDTDKLPFSFFDRNEKNVQTLLTANKRVNINIIGAFCFLQIASPELQPSLKVQKQQEKKSFARMKELAYICQEIKNPLSGIHFTNSLLENTDLTEDQQQFLETSAACEKQILKIIRDIDLESIENGSLELEKAEFLLGSVINAVVSQAMLLLRERNLQLLRDIPEEIKTLAVYGDQARIQQVLADFLLNMVRYAPSSAGWVEIHVCPTLKQISDGHTLVHTEFRYLERVLQTRMLGLQHPLRSFLNCKLTLVMLHREGMVPKIQFQGLSVCQGRLIWLSFPENTTVALYPLTIWFLLLHRHQSRSITHT

SEQ ID NO: 9772 - protein, 1144 aa, Populus tremula
MASQSQRQSNQPAHNQAQSSGTSNMRQHHHPTESVSKAIAQYTVDAQLHAVFEQSGGTGKSFDYSKSVRTPNQSVPEEQITAYLSKIQRGGHIQPFGCMIAADEQSFRVIAYSENAKDMLGLTPQSVPSLEKQEILFVGADVRILFRPSSAVLLEKAFGAREITLLNPIWIHSKNSGKPFYAILHRIDVGIVIDLEPARTEDPALSIAGAVQSQKLAVRAISQLQSLPGGDIKLLCDTVVDSVRELTGYDRVMVYKFHEDEHGEVVAENKRVDLEPYIGLHYPSTDIPQASRFLFKQNRVRMIVDCHAIPVSVIQDEGLMQPLCLVGSTLRAPHGCHAQYMENMGSIASLAMAVIIYGNDEEAIGGRNSMRLWGLVVCHHTSARCIPFPLRYACEFLMQAFGLQLNMELQLASQLLEKHVLRTQTLLCDMLLRDSPTGIVTQSPSIMDLVKCDGAALYYQGQYYPLGVTPTEAQIKDIVEWLLTLHGDPTGLSTDSLADAGYPGAAFLGDAVCGMAVAYIAERDFLFWFRSHTAKEVKWGGAKHHPEDKDDGQRMHPRSSFKAFLEVVKSRSLPWENAEMDAIHSLQLILRDSFRDAEATNSKAVVHTQLKDMELQGMDELSSVAREMVRLIETATAPIFAVDVEGRINGWNAKVAELTGLSVEEAMGKSLVHDLVYKEYEEIVDKLIHRAVKGEEDKNVEIKLRTFCSEHQKKAVFVVVNACSSKDYMDNIVGVCFVGQDVTGQKVVMDKYVLIQGDYKAIVHSPNPSIPPIFASDENTCCLEWNTAMEKLTGWSRGEVVGKMLVGEVFGSCCRLKGPDALTKFMIALHNAIGGIDTDKLPFSFFDRNEKNVQTLLTANKRVNINIIGAFCFLQIASPELQPSLKVQKQQEKKSFARMKELAYICQEIKNPLSGIHFTNSLLENTDLTEDQQQFLETSAACEKQILKIIRDIDLESIENGSLELEKAEFLLGSVINAVVSQAMLLLRERNLQLLRDIPEEIKTLAVYGDQARIQQVLADFLLNMVRYAPSSAGWVEIHVCPTLKQISDGHTLVHTEFRYLERVLQTRMLGLQHPPRSFLNCKLTLVMLHREGMVPKIQFQGLSVCQGRLIWLSFPENTTVALYPLTIWFLLLHRHQSRSITHT

SEQ ID NO: 9773 - protein, 434 aa, Oryza sativa Indica Group
MAVTGPPRCGGGEATFAGSGRSGPAATRSSPMTAAGCCRGLFGVAAAPRRGFMAGSKFGSFKSEKGSSAGAAAGAGAAAQRRDPYEVLGVGRNATEQEIKSAFRRMALKYHPDKNADDPVASDKFQEATFSYNILSDPDKRRQYDSSGFEAIEADSQELELDLSSLNTVNTVFAALFSKLGVPIKTTVSATVLEEALNGSVGISQLELGQSVFRKVEKQSAHFYSVDITDKEAKMGLVCRVQSTAKSKFKLLYFEPEENGGLSLALQEDSVKTGKVTSAGMFFLGFPVYRFEQNNSEKLRCVEAKILAKRSELSKFESEYREVLAKFTEMTSRYAQEMQTIDELLKERNAIHASYTNNTTLQRSSSSNKGKTSSKESKSDDDQTVKKEKKSKSKSMEGSRSDDDGPRKEKKPKERLRRKKWFNIHLKVDKRRPC

SEQ ID NO: 9774 - protein, 201 aa, Oryza sativa Indica Group
MQQGRGRGRRRMMQGSSYYAVLGVHPGASAAEIRAAYHRLAMKWHPDKITSGRVDPEEAKSRFQQVHEAYQVLSDEKRRALYDSGMYDPLDDDQEEDVEGFHDFLQEMVSLMATVGREEPVYSLDELRSMLDGMMQDFASSELPSPSGGFFAGAPSSPFADTGAAQQQRGVGSASARARAHAHPQVVGNSACLSRMAFSSY

SEQ ID NO: 9775 - protein, 472 aa, Leptospira interrogans serovar Copenhageni str. Fiocruz L1-130
MDSLKSKSDELIQNKMTSEGLSSAFIQDFLKKTDLVRNGETGMVRWEEVGDLDPKADEITLEQIESENAPEPSILKNLVVIKLNGGLGTSMGLSGPKSLIELKNGMSFLEIVAKQSEVIEKKYNVSVPLILMDSFNTQKESQEELNRIGFRQKFPTSFLQHKVPRLLKKDLTPISCKNPDEEWCPPGHGDIWISLLETGLLDTLIQNGYKIAFVSNGDNLGATVHPGILSYMLKEKLEFCMEMTPKTLADKKGGAIYKRMIAGRAENYQLLETAQVPPEHMHEFEGLGKFRTFSTNNLWIDLVALRQRILLGSFELSLIVNPKTIEGQEVLQLETAMGSAIRNFEKVKGIIIPRDRFAPVKKCEDYLARRSDAYHLLENYSITMSDKRKESGLGEILIYLDERYYKKIGDFNRLFPEIPSLELCSSLTVQGEVLFDQKISIVGEVVIQNNETLPRRISDLKTRILESGKYSF

SEQ ID NO: 9776 - protein, 1144 aa, Populus tremula
MASQSQRQSNQPAHNQAQSSGTSNMRQHHHPTESVSKAIAQYTVDAQLHAVFEQSGGTGKSFDYSKSVRTPNQSVPEEQITAYLSKIQRGGHIQPFGCMIAADEQSFRVIAYSENAKDMLGLTPQSVPSLEKQEILFVGADVRILFRPSSAVLLEKAFGAREITLLNPIWIHSKNSGKPFYAILHRIDVGIVIDLEPARTEDPALSIAGAVQSQKLAVRAISQLQSLPGGDIKLLCDTVVDSVRELTGYDRVMVYKFHEDEHGEVVAENKRVDLEPYIGLHYPSTDIPQASRFLFKQNRVRMIVDCHAIPVSVIQDEGLMQPLCLVGSTLRAPHGCHAQYMENMGSIASLAMAVIIYGNDEEAIGGRNSMRLWGLVVCHHTSARCIPFPLRYACEFLMQAFGLQLNMELQLASQLLEKHVLRTQTLLCDMLLRDSPTGIVTQSPSIMDLVKCDGAALYYQGQYYPLGVTPTEAQIKDIVEWLLTLHGDPTGLSTDSLADAGYPGAAFLGDAVCGMAVAYIAERDFLFWFRSHTAKEVKWGGAKHHPEDKDDGQRMHPRSSFKAFLEVVKSRSLPWENAEMDAIHSLQLILRDSFRDAEATNSKAVVHTQLKDMELQGMDELSSVAREMVRLIETATAPIFAVDVDGRINGWNAKVAELTGLSVEEAMGKSLVHDLVYKEYEEIVDKLIHRAVKGEEDKNVEIKLRTFCSEHQKKAVFVVVNACSSKDYMDNIVGVCFVGQDVTGQKVVMDKYVLIQGDYKAIVHSPNPSIPPIFASDENTCCLEWNTALEKLTGWSRGEVVGKMLVGEVFGSCCRLKGPDALTKFMIALHNAIGGIDTDKLPFSFFDRNEKNVQTLLTANKRVNMNIIGAFCFLQIVSPELQPSLKVQKQQEKKSFARMKELAYICQEIKNPLSGIHFTNSLLENTDLTEDQQQFLETSAACEKQILKIIRDIDLESIENGSLELEKAEFLLGSVINAVVSQAMLLLRERNLQLLRDIPEEIKTLAVYGDQARIQQVLADFLLNMVRYAPSSAGWVEIHVCPTLKQISDGHTLVHTEFRYLERVLQTRMLGLQHPLRSFLNCKLTLVMLHREGMVPKIQFQGLSVCQGRLIWLSFPENTTVALYPLTIWFLLLHRHQSRSITHT

SEQ ID NO: 9777 - protein, 200 aa, Echinacea paradoxa
DARRDDLNAAIFNLKEIESYDDYERSLLISQMSFEKTFGMSSVFIESTLMENGGLAESANPATMINEAIHVISCGYEEKTAWGKEIYGSVTEDILTGFKMHCRGWRSIYCMPVRPAFKGSAPINLSDRLHQVLRWALGSVEIFLSRHCPLWYGWGGGRLKLLQRFAYINTIVYPFTSLPLVAYCTLPAICLLTGKFIIPT

SEQ ID NO: 9778 - protein, 337 aa, Triticum aestivum
MDYYNILKVNRNASLEDLKKSYRRLARTWHPDKNPTGGAEAEARFKQITEAYEVLSDPEKRAIYDQYGEEGLKGMPPPGSQSRTATASGSSGPSNFRYNPSDPDDIFNEFMASNKPYTFGQDRRRFQPAHRTSAVNGRSEASSSSQKEPGTSTSHLEKPPPVKKTLLCTLEELYNGTKRKMKITRNVAKSDGKVELETEILQVEVLPGWKKGTKMTFPNKGDTLPGYLPQDLTFVIDMKPHDTYTLEGNNLLVSQEIPLVDALAGTTINLRTLDGRSLPVRVEEVVRPGQEIVIENEGWPIRKEPGKKGSLRIRFDVAFPARLSSSQRAAIRRIMGS

SEQ ID NO: 9779 - protein, 1021 aa, Vitis vinifera
MFTPGPIFLNYPRKREVRELPIPHQATTDINSLSRATWNDQNTLPLLQKHLSCSACLSQSPPPSLTEINGVNTILFDYELVLVDLCYLCLCVEMEASDDSAKSPSLIPPLPRDSRGSLEVFNPSTYSTRPTNQAFRPQPTWKSWAEPRGTPEREVDNAAQRAAEWGLMLKTDTETGKPQGVAVRTSGGDEPNYKTGTSRRNSGNSDRAFPRVSEDLKDALSTFQQTFVVSDATKPDYPILYASAGFFKMTGYTSKEVIGRNCRFLQGSGTDPEDVAKIREALHAGNSYCGRLLNYKKDGTPFWNLLTISPIKDENGNVLKFIGMQVEVSKHTEGSKEKMTRPNGLPESLIRYDARQKDMATNSVSELVQAVKKPRSLSESSDRPFMRKSEDGEQERPEAPGRRNSESVAPPRRNSQSGRRASMQRISELPEKKPRKSSRLSFMRIMRKSQAHTEEFDTEVLVDDTSDSEDDERPDSIDNKTRQREMRRGIDLATTLERIEKNFVITDPRLPDNPIIFASDSFLELTEYSREEILGRNCRFLQGPETDPATVRKIREAIDNQTDVTVQLINYTKSGKKFWNLFHLQPMRDQKGEVQYFIGVQLDGSEHVEPLHNCIPESTAKESAKLVKETAENIDDAVRELPDANLKPEDLWSNHSKVVLPKPHRKESSAWKAIQKILEDGEQIGLKHFRPVKPLGSGDTGSVHLVELCGTGEYFAMKAMDKNVMLNRNKVHRACAEREILDMLDHPFLPALYASFQTKTHICLITDYCPGGELFLLLDRQPTKVLKEDAVRFYAAEVVVALEYLHCQGVIYRDLKPENVLLQSSGHVALTDFDLSCLTSCKPQLLMPNTNEKKRQHKGQQNPIFMAEPMRASNSFVGTEEYIAPEIITGAGHTSAVDWWALGILLYEMLYGYTPFRGKTRQKTFANILHKDLKFPSSISVSLNAKQLMYRLLHRDPKNRLGSREGANEIKRHPFFRGVNWALVRCMNPPELDAPPLETTDAEKEVKSVDPELLDLQTNIF

SEQ ID NO: 9780 - protein, 203 aa, Echinacea paradoxa
DARRDDLNAAIFNLKEIESYDDYERSLLISQMSFEKTFGMSSVFIESTLMENGGLAESANPATMINEAIHVISCGYEEKTAWGKEIGWIYGSVTEDILTGFKMHCRGWRSIYCMPVRPAFKGSAPINLSDRLHQVLRWALGSVEIFLSRHCPLWYGWGGGRLKLLQRFAYINTIVYPFTSLPLVAYCTLPAICLLTGKFITPT

SEQ ID NO: 9781 - protein, 1164 aa, Arabidopsis thaliana
MVSGGGSKTSGGEAASSGHRRSRHTSAAEQAQSSANKALRSQNQQPQNHGGGTESTNKAIQQYTVDARLHAVFEQSGESGKSFDYSQSLKTAPYDSSVPEQQITAYLSRIQRGGYTQPFGCLIAVEESTFTIIGYSENAREMLGLMSQSVPSIEDKSEVLTIGTDLRSLFKSSSYLLLERAFVAREITLLNPIWIHSNNTGKPFYAILHRVDVGILIDLEPARTEDPALSIAGAVQSQKLAVRAISHLQSLPSGDIKLLCDTVVESVRDLTGYDRVMVYKFHEDEHGEVVAESKRNDLEPYIGLHYPATDIPQASRFLFKQNRVRMIVDCYASPVRVVQDDRLTQSICLVGSTLRAPHGCHAQYMTNMGSIASLAMAVIINGNEEDGNGVNTGGRNSMRLWGLVVCHHTSARCIPFPLRYACEFLMQAFGLQLNMELQLALQVSEKRVLRMQTLLCDMLLRDSPAGIVTQRPSIMDLVKCNGAAFLYQGKYYSLGVTPTDSQINDIVEWLLANHSDSTGLSTDSLGDGGYPRAAALGDAVCGMAVACITKRDFLFWFRSHTEKEIKWGGAKHHPEDKDDGQRMNPRSSFQTFLEVVKSRCQPWETAEMDAIHSLQLILRDSFKESEAMDSKAAAAGAVQPHGDDMVQQGMQEIGAVAREMVRLIETATVPIFAVDIDGCINGWNAKIAELTGLSVEDAMGKSLVRELIYKEYKETVDRLLSSALKGDEGKNVEVKLKTFGSELQGKAMFVVVNACSSKDYLNNIVGVCFVGQDVTGHKIVMDKFINIQGDYKAIIHSPNPLIPPILAADENTCCLEWNTAMEKLTGWPRSEVIGKLLVREVFGSYCRLKGPDALTKFMIVLHNAIGGQDTDKFPFPFFDRKGEFIQALLTLNKRVSVDGKIIGAFCFLQIPSPELQQALEVQRRQESEYFSRRKELAYIFQVIKNPLSGLRFTNSLLEDTDLNEDQKQLLETSVSCEKQISKIVGDMDVKSIDDGSFLLERTEFFIGNVTNAVVSQVMLVVRERNLQLIRNIPTEVKSMAVYGDQIRLQQVLAEFLLSIVRYAPMEGSVELHLCPTLNQMADGFSAVRLEFRMACAGEGVPPEKVQDMFHSSRWTSPEGLGLSVCRKILKLMNGGVQYIREFERSYFLIVIELPVPLMMMMPSS

SEQ ID NO: 9782 - protein, 1164 aa, Arabidopsis thaliana
MVSGGGSKTSGGEAASSGHRRSRHTSAAEQAQSSANKALRSQNQQPQNHGGGTESTNKAIQQYTVDARLHAVFEQSGESGKSFDYSQSRKTAPYDSSVPEQQITAYLSRIQRGGYTQPFGCLIAVEESTFTIIGYSENAREMLGLMSQSVPSIEDKSEVLTIGTDLRSLFKSSSYLLLERAFVAREITLLNPIWIHSNNTGKPFYAILHRVDVGILIDLEPARTEDPALSIAGAVQSQKLAVRAISHLQSLPSGDIKLLCDTVVESVRDLTGYDRVMVYKFHEDEHGEVVAESKRNDLEPYIGLHYPATDIPQASRFLFKQNRVRMIVDCYASPVRVVQDDRLTQSICLVGSTLRAPHGCHAQYMTNMGSIASLAMAVIINGNEEDGNGVNTGGRNSMRLWGLVVCHHTSARCIPFPLRYACEFLMQAFGLQLNMELQLALQVSEKRVLRMQTLLCDMLLRDSPAGIVTQRPSIMDLVKCNGAAFLYQGKYYSLGVTPTDSQINDIVEWLLANHSDSTGLSTDSLGDAGYPRAAALGDAVCGMAVACITKRDFLFWFRSHTEKEIKWGGAKHHPEDKDDGQRMNPRSSFQAFLEVVKSRCQPWETAEMDAIHSLQLILRDSFKESEAMDSKAAAAGAVQPHGDDMVQQGMQEIGAVAREMVRLIETATVPIFAVDIDGCINGWNAKIAELTGLSVEDAMGKSLVRELIYKEYKETVDRLLSSALKGDEGKNVEVKLKTFGSELQGKAMFVVVNACSSKDYLNNIVGVCFVGQDVTGHKIVMDKFINIQGDYKAIIHSPNPLIPPIFAADENTCCLEWNTAMEKLTGWPRSEVIGKLLVREVFGSYCRLKGPDALTKFMIVLHNAIGGQDTDKFPFPFFDRKGEFIQALLTLNKRVSVDGKIIGAFCFLQIPSPELQQALEVQRRQESEYFSRRKELAYIFQVIKNPLSGLRFTNSLLEDTDLNEDQKQLLETSVSCEKQISKIVGDMDVKSIDDGSFLLERTEFFIGNVTNAVVSQVMLVVRERNLQLIRNIPTEVKSMAVYGDQIRLQQVLAEFLLSIVRYAPMEGSVELHLCPTLNQMADGFSAVRLEFRMACAGEGVPPEKVQDMFHSSRWTSPEGLGLSVCRKILKLMNGGVQYIREFERSYFLIVIELPVPLMMMMPSS

SEQ ID NO: 9783 - protein, 302 aa, Catharanthus roseus
MNRMTSPSTPPPSLHLRTTEQDFLDNTTATNSSGSNTNNHHHHHRNPNNTSQNPEEEEENPHERDLQLAEHNQTPEAAGGSGGSSGRRPRGRPPGSKNKPKPPIIITKESPNALRSHVLEISNGSDVVECISTFALRRHRGVSVLSGSGIVNNVSLRQPAAPGGVVTLHGRFEILSLSGSFLPAPSPPGATGLTVYLAGGQGQVVGGTVVGSLVASGPVMVIAATFTNATYERLPLEEEATATATDAAAEGGGGGTSGAASQSHGMADDPVSPNFYSLPPNLVPNGQEVFWTPPPRPPPPSY

SEQ ID NO: 9784 - protein, 864 aa, Pinus sylvestris
GESGKSFDYTRSIKSTTESVPEQQITAYLSRIQRGGRIQPFGCVLAVEETTFRIIAYSENAVEMLDLAPQSVPSMEKPQQDVLTIGTDVRTLFTAASAHSLEKAAVAQEISLMNPIWVHCKNSRKPFYAIVHRIDVGMVIDLEPLRTGDAFMSAAGAVQSQKLAVRAISRLQSLPCGDVGLLCDTVVENVRELTGYDRVMVYKFHEDEHGEVVAEIRRSDLEPYLGLHYPATDIPQASRFLFMQNRVRMICDCMATPVKVIQSEELMQPLCLVGSTLRAPHGCHAQYMANMGSIASLVMAVIINGNDDEGGGSGRNSMKLWGLVVCHHTSPRAVPFPLRYACEFLMQALGLQLNMELQLAAQLTEKHILRTQTLLCDMLLRDAPMGIVTQSPSIKDLVKCDGAALYYGGMCWMLGVTPTEAQIKDIADWLLEHHGDSTGLSTDSLADAGYPGAASLGDAVCGMASARITSKDFLFWFRSHTAKEMKWGGAKHHPDDKDDARRMHPRSSFKAFLEVVKRRSLPWDNVEIDAIHSLQLILRGSFRDIDDSGTKTMVHSRLNDLRLQGIDELSSVASEMVRLIETATAPILAVDYNGLVNGWNAKVAELTGLPVGEAMGMSLVQDLVFEQSVERVEKMLHNALRGEEEKNVEMMLKTFGPQKEKEAVILVVNACSSRDFTDNIVGVCFVGQDVTSQKVVMDKFIRIQGDYRSIVQSPNPLIPPIFASDEYACCSEWNAAMEKVTGWIHDEVIGKMPVGEIFGGCCRLKGQDAVTKFTIVLHSAIDGQEIEKFPFAFFDKQGKYVEALLTANKRTDADGRITGSFCFLQIASSELQHALEVQRQQEKKCFARLKELAYIRQEIKNPLH

SEQ ID NO: 9785 - protein, 1164 aa, Arabidopsis thaliana
MVSGGGSKTSGGEAASSGHRRSRHTSAAEQAQSSANKALRSQNQQPQNHGGGTESTNKAIQQYTVDARLHAVFEQSGESGKSFDYSQSLKTAPYDSSVPEQQITAYLSRIQRGGYTQPFGCLIAVEESTFTIIGYSENAREMLGLMSQSVPSIEDKSEVLTIGTDLRSLFKSSSYLLLERAFVAREITLLNPIWIHSNNTGKPFYAILHRVDVGILIDLEPARTEDPALSIAGAVQSQKLAVRAISHLQSLPSGDIKLLCDTVVESVRDLTGYDRVMVYKFREDEHGEVVAESKRNDLEPYIGLHYPATDIPQASRFLFKQNRVRMIVDCYASAVRVVQDDRLTQSICLVGSTLRAPHGCHAQYMTNMGSIASLAMAVIINGNEEDGNGVNTGGRNSMRLWGLVVCHHTSARCIPFPLRYACEFLMQAFGLQLNMELQLALQVSEKRVLRMQTLLCDMLLRDSPAGIVTQRPSIMDLVKCNGAAFLYQGKYYSLGVTPTDSQINDIVEWLLANHSDSTGLSTDSLGDAGYPRAAALGDAVCGMAIACITKRDFLFWFRSHTEKEIKWGGAKHHPEDKDDGQRMNPRSSFQAFLEVVKSRCQPWETAEMDAIHSLQLILRDSFKESEAMDSKAAAAGAVQPHGDDMVQQGMQEIGAVAREMVRLIETATVPIFAVDIDGCINGWNAKIAELTGLSVEDAIGKSLVRELIYKEYKETVDRLLSSALKGDEGKNVEVKLKTFGSELQGKAMFVVVNACSSKDYLNNIVGVCFVGQDVTGHKIVMDKFINIQGDYKAIIHSPNPLIPPIFAADENTCCLEWNTAMEKLTGWPRSEVIGKLLVREVFGSYCRLKGPDALTKFMIVLHNAIGGQDTDKFPFPFFDRKGEFIQALLTLNKRVSVDGKIIGAFCFLQIPSPELQQALEVQRRQESEYFSRRKELAYIFQVIKNPLSGLRFTNSLLEDTDLNEDQKQLLETSVSCEKQISKIVGDMDVKSIDDGSFLLERTEFFIGNVTNAVVSQVMLVVRERNLQLIRNIPTEVKSMAVYGDQIRLQQVLAEFLLSIVRYAPMEGSVELHLCPTLNQMADGFSAVRLEFRMACAGEGVPPEKVQDMFHSSRWTSPEGLGLSVCRKILKLMNGGVQYIREFERSYFLIVIELPVPLMMMMPSS

SEQ ID NO: 9786 - protein, 376 aa, Mycoplasma gallisepticum R
MRWLVKEQNYYEILGVSTNASSSDIKKAFRKLAKKYHPDVSSDPQSLELFQKINEAYEVLSDEKTRRDYDEFELDLYDSEDDVDDSTEFVDTKDVFSKIFTNIKNNQQTTSKANKPPFGSQASNTPPSSSNKTATKTDPNTPKNLYTILGANKKTSVDELKRLYSILKLKYSTNPKTEANEWLKKEIKCAYTVLSNHESKVKYDKTGIFSFEGVSHLGGVFSRTRHLQELEKRQKKSKATNQSTGTRKVNNKKSSIHNVPYSSPKDRSASFTKFSTPQAQKKSAWQAAKFDINIEDFYTNVNVADDELLSLREEVLEQKKKKEEKHNQDPNAKKQTALARFKENHPILSSVITGLLISVILTVILVVIIAKTGITK

SEQ ID NO: 9787 - protein, 872 aa, Klebsiella pneumoniae subsp. pneumoniae MGH 78578
MIRLSTLLLAPPVGERLRARYDDYRQHGASWLSASLGCLWASLVWALMPLETPRWQAILARHETYFPHINPHRPRPLDPLRYLLQSLWLLTTRVPEPEKKVNWRSLAALEGVHGRYTQWLEKLPEQMNARTGHLDKQKELAHLNPKLRRAILGGVTFCSLVLALMCITQPFNPLSQFIFLMLLWGVALLVRRIPGRFSALMLIVLSLTVSCRYIWWRYTSTLNWNDPVSLVCGIILLFAETYAWVVLVLGYFQVVWPLNRQPVPLPEDMDLWPTVDIFVPTYNEDLNVVKNTIYASQGIDWPKDKLNIWILDDGGREAFRQFAKDVGVHYIARTSHEHAKAGNINNALKYAKGEFVSIFDCDHVPTRSFLQMTMGWFLKEKELAMMQTPHHFFSPDPFERNLGRFRKTPNEGTLFYGLVQDGNDMWDATFFCGSCAVIRRGPLDEIGGIAVETVTEDAHTSLRLHRRGYTSAYMRIPQAAGLATESLSAHIGQRIRWARGMVQIFRLDNPLFGKGLKLVQRVCYANAMLHFLSGIPRLIFLTAPLAFLLLHAYIIYAPALMIALFVLPHMIHASLTNSKIQGKYRHSFWSEIYETVLAWYIAPPTFVALINPHKGKFNVTAKGGLVEEEYVDWVISRPYIYLVLLNLVGVAVGIWRFMYGPENEILTVWVSIVWVFYNLIILGGAVAVSVESKQVRRSHRVEMSMPAAIAREDGHLFSCTVHDYSDGGLGIKINGDAQVLEGQNARLLLKRGQQEYAFPVRVARVNGSEVGLQLLPLTNQQHIDFVQCTFARADTWALWQDSFPEDKPMESLLDILKLGFRGYRHLAEFSPPSVKVVFRALTSLVAWIASFVPRRPERAAPTLSADPAMAQQ

SEQ ID NO: 9788 - protein, 1144 aa, Populus tremula
MASQSQRQSNQPAHNQAQSSGTSNMRQHHHPTESVSKAIAQYTVDAQLHAVFEQSGGTGKSFDYSKSVRTPNQSVPEEQITAYLSKIQRGGHIQPFGCMIAADEQSFRVIAYSENAKDMLGLTPQSVPSLEKQEILFVGADVRILFRPSSAVLLEKAFGAREITLLNPIWIHSKNSGKPFYAILHRIDVGIVIDLEPARTEDPALSIAGAVQSQKLAVRAISQLQSLPGGDIKLLCDTVVDSVRELTGYDRVMVYKFHEDEHGEVVAENKRVDLEPYIGLHYPSTDIPQASRFLFKQNRVRMIVDCHAIPVSVIQDEGLMQPLCLVGSTLRAPHGCHAQYMENMGSIASLAMAVIIYGNDEEAIGGRNSMRLWGLVVCHHTSARCIPFPLRYACEFLMQAFGLQLNMELQLASQLLEKHVLRTQTLLCDMLLRDSPTGIVTQSPSIMDLVKCDGAALYYQGQYYPLGVTPTEAQIKDIVEWLLTLHGDPTGLSTDSLADAGYPGAAFLGDAVCGMAVAYIAERDFLFWFRSHTAKEVKWGGAKHHPEDKDDGQRMHPRSSFKAFLEVVKSRSLPWENAEMDAIHSLQLILRDSFRDAEATNSKAVVHNQLKDMELQGMDELSSVAREMVRLIETATAPIFAVDVDGRINGWNAKVAELTGLSVEEAMGKSLVHDLVYKEYEEIVDKLIHRAVKGEEDKNVEIKLRTFCSEHQKKAVFVVVNACSSKDYMDNIVGVCFVGQDVTGQKVVMDKYVLIQGDYKAIVHSPNPSIPPIFASDENTCCLEWNTAMEKLTGWSRGEVVGKMLVGEVFGSCCRLKGPDALTKFMIALHNAIGGIDTDKLPFSFFDRNEKNVQTLLTANKRVNINIIGAFCFLQIASPELQPSLKVQKQQEKKSFARMKELAYICQEIKNPLSGIHFTNSLLENTDLTEDQQQFLETSAACEKQILKIIRDIDLESIENGSLELEKAEFLLGSVINAVVSQAMLLLRERNLQLLRDIPEEIKTLAVYGDQARIQQVLADFLLNMVRYAPSSAGWVEIHVCPTLKQISDGHTLVHTEFRYLERVLQTRMLGLQHPLRSFLNCKLTLVMLHREGMVPKIQFQGLSVCQGRLIWLSFPENTTVALYPLTIWFLLLHRHQSRSITHT

SEQ ID NO: 9789 - protein, 1144 aa, Populus tremula
MASQSQRQSNQPAHNQAQSSGTSNMRQHHHPTESVSKAIAQYTVDAQLHAVFEQSGGTGKSFDYSKSVRTPNQSVPEEQITAYLSKIQRGGHIQPFGCMIAADEQSFRVIAYSENAKDMLGLTPQSVPSLEKQEILFVGADVRILFRPSSAVLLEKAFGAREITLLNPIWIHSKNSGKPFYAILHRIDVGIVIDLEPARTEDPALSIAGAVQSQKLAVRAISQLQSLPGGDIKLLCDTVVDSVRELTGYDRVMVYKFHEDEHGEVVAENKRVDLEPYIGLHYPSTDIPQASRFLFKQNRVRMIVDCHAIPVSVIQDEGLMQPLCLVGSTLRAPHGCHAQYMENMGSIASLAMAVIIYGNDEEAIGGRNSMRLWGLVVCHHTSARCIPFPLRYACEFLMQAFGLQLNMELQLASQLLEKHVLRTQTLLCDMLLRDSPTGIVTQSPSIMDLVKCDGAALYYQGQYYPLGVTPTEAQIKDIVEWLLTLHGDPTGLSTDSLADAGYPGAAFLGDAVCGMAVAYIAERDFLFWFRSHTAKEVKWGGAKHHPEDKDDGQRMHPRSSFKAFLEVVKSRSLPWENAEMDAIHSLQLILRDSFRDAEATNSKAVVHTQLKDMELQGMDELSSVAREMVRLIETATAPIFAVDVDGRINGWNAKVAELTGLSVEEAMGKSLVHDLVYKEYEEIVDKLIHRAVKGEEDKNVEIKLRTFCSEHQKKAVFVVVNACSSKDYMDNIVGVCFVGQDVTGQKVVMDKYVLIQGDYKAIVHSPNPSIPPIFASDENTCCLEWNTAMEKLTGWSRGEVVGKMLVGEVFGSCCRLKGPDALTKFMIALHNAIGGIDTDKLPFSFFDRNEKNVQTLLTANKRVNINIIGAFCFLQIASLELQPSLKVQKQQEKKSFARMKELAYICQEIKNPLSGIHFTNSLLENTDLTEDQQQFLETSAACEKQILKIIRDIDLESIENGSLELEKAEFLLGSVINAVVSQAMLLLRERNLQLLRDIPEEIKTLAVYGDQARIQQVLADFLLNMVRYAPASAGWVEIHVCPTLKQISDGHTLVHTEFRYLERVLQTRMLGLQHPPRSFLNCKLTLVMLHREGMVPKIQFQGLSVCQGRLIWLSFPENTTVALYPLTIWFLLLHRHQSRSITHT

SEQ ID NO: 9790 - protein, 1144 aa, Populus tremula
MASQSQRQSNQPAHNQAQSSGTSNMRQHHHPTESVSKAIAQYTVDAQLHAVFEQSGGTGKSFDYSKSVRTPNQSVPEEQITAYLSKIQRGGHIQPFGCMIAADEQSFRVIAYSENAKDMLGLTPQSVPSLEKQEILFVGADVRILFRPSSAVLLEKAFGAREITLLNPIWIHSKNSGKPFYAILHRIDVGIVIDLEPARTEDPALSIAGAVQSQKLAVRAISQLQSLPGGDIKLLCDTVVDSVRELTGYDRVMVYKFHEDEHGEVVAENKRVDLEPYIGLHYPSTDIPQASRFLFKQNRVRMIVDCHAIPVSVIQDEGLMQPLCLVGSTLRAPHGCHAQYMENMGSIASLAMAVIIYGNDEEAIGGRNSMRLWGLVVCHHTSARCIPFPLRYACEFLMQAFGLQLNMELQLASQLLEKHVLRTQTLLCDMLLRDSPTGIVTQSPSIMDLVKCDGAALYYQGQYYPLGVTPTEAQIKDIVEWLLTLHGDPTGLSTDSLADAGYPGAAFLGDAVCGMAVAYIAERDFLFWFRSHTAKEVKWGGAKHHPEDKDDGQRMHPRSSFKAFLEVVKSRSLPWENAEMDAIHSLQLILRDSFRDAEATNSKAVVHTQLKDMELQGMDELSSVAREMVRLIETATAPIFAVDVDGRINGWNAKVAELTGLSVEEAMGKSLVHDLVYKEYEEIVDKLIHRAVKGEEDKNVEIKLRTFCSEHQKKAVFVVVNACSSKDYMDNIVGVCFVGQDVTGQKVVMDKYVLIQGDYKAIVHSPNPSIPPIFASDENTCCLEWNTAMEKLTGWSRGEVVGKMLVGEVFGSCCRLKGPDALTKFMIALHNAIGGIDTDKLPFSFFDRNEKNVQTLLTANKRVNMNIIGAFCFLQIASPELQPSLKVQKQQEKKSFARMKELAYICQEIKNPLSGIHFTNSLLENTDLTEDQQQFLETSAACEKQILKIIRDIDLESIENGSLELEKAEFLLGSVINAVVSQAMLLLRERNLQLLRDIPEEIKTLAVYGDQARIQQVLADFLLNMVRYAPSSAGWVEIHVCPTLKQISDGHTLVHTEFRYLERVLQTRMLGLQHPPRSFLNCKLTLVKLHREGMVPKIQFQGLSVCQGRLIWLSFPENTTVALYPLTIWFLLLHRHQSRSITHT

SEQ ID NO: 9791 - protein, 486 aa, Chlamydomonas reinhardtii
MALQNAWQNTKERARETWAQLTWSEVSGSLGDLGTFLPLLIGLVQKVHLDLGTTLTITGLYNIISGWQFRIPMCVQPMKTIAAVALAGGAAGLDLPQLLHAGLFVAGCVGLLGASQAIDLFNWLVPPPVIRGVQLAVGVKLAMKGVDMALRLHGGPSSGWRPWLGTEGLVVGAVALAAMIATTLPPRAARRGTLEAADEGGLGPRPTDTAFEPLLRRLPACCGGGDRAPQVEGAAVSAERAGLLAHAEGGERSGNLDDGTEAGVGAAAGGGGCGGGGGGGRIPSALIAVVVGLAMAVLHRPGLVWELRLGPTLPRLLRPSWPDFKTGALRGGLPQLPLTTLNSVIAVTQLANALFGDKPEAERRRWRPSAVALSVALLNGAGVWLGAMPCCHGAGGLAAQYKFGARTGHAPILLGCIKAALGLLFGGSLVVLLEAFPQPLLGALLTVSGIELASVVRHTRSPRGYTFALLTAVAILALDNTGTGFL

SEQ ID NO: 9792 - protein, 512 aa, Kluyveromyces lactis NRRL Y-1140
MTYSVFNVKYSERFSSSKPYVFFTTGRFSVLHIWKYQMFKKQYEQEGHVDEEGAIGCTRLTNSNVNYDMAQTPYDVLGVEKDATEVEIRKAYRKLALKYHPDKIIDEAERETSEAMFKEVTAAYEILSDPELKSRYDMYGDSAFGSGGNGFPEDDHEFDDFMNFFQQYQRQQHGPHASYSNRHQYGEPESKRTPDSRISYKMTTRQLYMGKTVTFQLKRKCLCPHCSGTGLRKKHFQKPEISCTSCNGQGFKERITRLAGGYMVKDHTVCDACKGKGRYRKKSASDTCKHCSGKGLINEEKSQTVYIPRGSRHGDEFRLPQMADMEYGKETGDVIIVIDEDSSKSHLERKSNDLHTTLNISLVDALTGFSTIVCETYDNRRLRVNVPAGKVIRPGNYFKFKGEGWPLSNGDSFGDMYVQINIEFPKDNWFNEKSEITALRNILPGLKSKDTKDPDPLNTEDVLSYSVLHSHDELPDYLAEEKEKYNRKQQEEPHASAFDNDYTQMPSECATQ

SEQ ID NO: 9793 - protein, 1146 aa, Populus tremula
MASQSQRQSNQPAHNQAQSSGTSNMRQHHHPTESVSKAIAQYTVDAQLHAVFEQSGGTGKSFDYSKSVRTPNQSVPEEQITAYLSKIQRGGHIQPFGCMIAADEQSFRVIAYSENAKDMLGLTPQSVPSLEKQEILFVGADVRILFRPSSAVLLEKAFGAREITLLNPIWIHSKNSGKPFYAILHRIDVGIVIDLEPARTEDPALSIAGAVQSQKLAVRAISQLQSLPGGDIKLLCDTVVDSVRELTGYDRVMVYKFHEDEHGEVVAENKRVDLEPYIGLHYPSTDIPQASRFLFKQNRVRMIVDCHAIPVSVIQDEGLMQPLCLVGSTLRAPHGCHAQYMENMGSIASLAMAVIIYGNDEEAIGGRNSMRLWGLVVCHHTSARCIPFPLRYACEFLMQAFGLQLNMELQLASQLLEKHVLRTQTLLCDMLLRDSPTGIVTQSPSIMDLVKCDGAALYYQGQYYPLGVTPTEAQIKDIVEWLLTLHGDPTGLSTDSLADAGYPGAAFLGDAVCGMAVAYIAERDFLFWFRSHTAKEVKWGGAKHHPEDKDDGQRMHPRSSFKAFLEVVKSRSLPWENAEMDAIHSLQLILRDSFRDAEATNSKAVVHNQLKDMELQGMDELSSVAREMVRLIETATAPIFAVDVEGRINGWNAKVAELTGLSVEEAMGKSLVHDLVYKEYEEIVDKLIHRAVKGEEDKNVEIKLRTFCSEHQKKAVFVVVNACSSKDYMDNIVGVCFVGQDVTGQKVVMDKYVLIQGDYKAIVHSPNPSIPPIFASDENTCCLEWNTAMEKLTGWSKGEVVGKMLVGEVFGNCCKLKGPNALTKFMIALHNAIGGIDTDKLPFSFFDRNEKNVQTLLTANKRVNMKGDIIGAFCFLQIASPELQPSLKVQKQQEKKSFARMKELAYICQEIKNPLSGIHFTNSLLENTDLTEDQQQFLETSAACEKQILKIIRDIDLESIENGSLELEKPEFLLGSVINAVVSQAMLLLRERNLQLLRDIPEEIKTLAVYGDQARIQQVLADFLLNMVRYAPSSAGWVEIHVCPTLKQISDGHTLVHTEFRYLERVLQTRMLGLQHPLRSFLNCKLTLVKLHREGMVPKIQFQGLSVCQGRLIWLSFPENTTVALYPLTIWFLLLHRHQSRSITHT

SEQ ID NO: 9794 - protein, 464 aa, Arabidopsis thaliana
METTTTPLLPGDRSRCGWLRRRLRLKNPLSSELSGAVGDLGTFIPIVLTLTLVSNLDLSTTLIFTGFYNIATGLLFDIPMPVQPMKSIAAVAVSESPHLTPSQIAAAGASTAATLLLLGATGAMSFLYNIIPLPAVRGVQLSQGLQFAFTAIKYVRFNYDTATLKPSSSPRIWLGLDGLILALAALLFIILSTGSGNDREAEDGDLAETSSNESQSRRRRLRLLSSIPSALIVFALGLVLCFIRDPSIFKDLKFGPSKFHILRISWDDWKIGFLRAAIPQIPLSVLNSVIAVCKLSNDLFDKELSATTVSISVGVMNLIGCWFGAMPVCHGAGGLAGQYRFGARSGLSVIFLGIGKLIVGLVFGNSFVRILSQFPIGILGVLLLFAGIELAMASKDMNSKEDSFIMLVCAAVSMTGSSAALGFGCGVVLYLLLKLRTLDCSSVTLFSRSSDESQVDSEAAPRDV

SEQ ID NO: 9795 - protein, 167 aa, Glycine max
MDREGGSNAGSCYYSVLGIRRDASFSDIRTAYRKLAMRWHPDKWALNPATAGEAKRRFQQIQEAYSAYSVLSDQSKRSMYDAGLYDPLEEEDQQDFCDFMQEMISMMNNVKDEGDSLEDLQRMFVEMVGEDHGHGIGSDLNQDQTAGKRGRVNGSKGNAAKRRNSRS

SEQ ID NO: 9796 - protein, 1146 aa, Populus tremula
MASQSQRQSNQPAHNQAQSSGTSNMRQHHHPTESVSKAIAQYTVDAQLHAVFEQSGGTGKSFDYSKSVRTPNQSVPEEQITAYLSKIQRGGHIQPFGCMIAADEQSFRVIAYSENAKDMLGLTPQSVPSLEKQEILFVGADVRILFRPSSAVLLEKAFGAREITLLNPIWIHSKNSGKPFYAILHRIDVGIVIDLEPARTEDPALSIAGAVQSQKLAVRAISQLQSLPGGDIKLLCDTVVDSVRELTGYDRVMVYKFHEDEHGEVVAENKRVDLEPYIGLHYPSTDIPQASRFLFKQNRVRMIVDCHAIPVSVIQDEGLMQPLCLVGSTLRAPHGCHAQYMENMGSIASLAMAVIIYGNDEEAIGGRNSMRLWGLVVCHHTSARCIPFPLRYACEFLMQAFGLQLNMELQLASQLLEKHVLRTQTLLCDMLLRDSPTGIVTQSPSIMDLVKCDGAALYYQGQYYPLGVTPTEAQIKDIVEWLLTLHGDPTGLSTDSLADAGYPGAAFLGDAVCGMAVAYIAERDFLFWFRSHTAKEVKWGGAKHHPEDKDDGQRMHPRSSFKAFLEVVKSRSLPWENAEMDAIHSLQLILRDSFRDAEATNSKAVVHTQLKDMELQGMDELSSVAREMVRLIETATAPIFAVDVDGRINGWNAKVAELTGLSVEEAMGKSLVHDLVYKEYEEIVDKLIHRAVKGEEDKNVEIKLRTFCSEHQKKAVFVVVNACSSKDYMDNIVGVCFVGQDVTGQKVVMDKYVLIQGDYKAIVHSPNPSIPPIFASDENTCCLEWNTAMEKLTGWSRGEVVGKMLVGEVFGSCCKLKGPNSLTKFMIALHNAIGGIDTDKLPFSFFDRNEKNVQTLLTANKRVNMKGDIIGAFCFLQIASPELQPSLKVQKQQEKKSFARMKELAYICQEIKNPLSGIHFTNSLLENTDLTEDQQQFLETSAACEKQILKIIRDIDLESIENGSLELEKAEFLLGSVINAVVSQAMLLLRERNLQLLRDIPEEIKTLAVYGDQARIQQVLADFLLNMVRYAPSSAGWVEIHVCPTLKQISDGHTLVHTEFRYLERVLQTRMLGLQHPLRSFLNCKLTLVKLHREGMVPKIQFQGLSVCQGRLIWLSFPENTTVALYPLTIWFLLLHRHQSRSITHT

SEQ ID NO: 9797 - protein, 482 aa, Arabidopsis thaliana; identical to SEQ ID NO: 9231

SEQ ID NO: 9798 - protein, 323 aa, Alkalilimnicola ehrlichei MLHE-1
MKFKDYYQIMGVSRDASQDEIRRAYRKLARKYHPDVSKEPDAEQRFKELGEAYEVLKDPEKRAAYDQLGRDYQAGQDFRPPPDWGEQGFQFHGAEFTGADASEFSDFFESLFGGGFGRPGGFARGGRRAGGPHFRARGEDAHARILIDLDDAFHGANRTLTLNTTEIGDDGRPRRRERTLNVHIPKGVHQGQHIRLAGQGNPGIGGGPPGDLFLEVAFRPHPLYRVEGRDVFLDLPVAPWEAALGAHVQVPTPTGKVALHIPAGSLGGHKLRLKGRGIPGHPPGDLYAVLRIALPPADTEAARKAYRDMQQALDFNPRARLGV

SEQ ID NO: 9799 - protein, 1130 aa, Physcomitrella patens subsp. patens
MSTPKLAYSSGSSVKSKHSVRVAQTTADAKLQAVYEESGDSGDSFDYSKSVHASKSTGENVSAQAVTAYLQRMQRGGLMQTFGCMLCVEESNFRVIAFSENAPEMLDLMPQAVPSVGQQEVLGIGTDARTLFTPSSAAALEKCAGAVDVTMLNPISVHCRSSGKPFYAILHRIDVGLVIDFEPVRSNDAIVSSAGVLQSHKLAAKAISRLQALPGGDIGLLCDIVVQEVRELSGYDRVMAYKFHEDEHGEVLAEIRRSDLEPYLGLHYPATDIPQASRFLFMKNKVRMIGDCFASPVKVIQDKDLRQPISLAGSTLRAPHGCHAQYMGNMNSIASLVMAVIVNDPDEDPNARGGQQRGRKLWGLVVCHHTSPRTVSFPLRSACEFLMQVFGLQLNMEVELAAQLREKHILRTQTLLCDMLLRDAPIGIVSQSPNIMDLVKCDGAALYYGKRFWLLGITPNDAQIKEIADWLLEHHQDSTGLSTDSLADAGYPGAAQLGDAVCGMAAAKITSKDFLFWFRSHTAKEIKWGGAKHDPDEKDDGRKMHPRSSFKAFLVVVKRRSLPWEDIEMDAIHSLQLILRGSFQDIDDSDTKTMIHARLNDLKLQGMDELSTVANEMVRLIETATAPILAVDSGGFINGWNAKVAELTGLPVEEAMGRSLVKDLILNESIDVVQRLLHLALQGDEEQNIEIQLKTFGPQKEKGAVILIVNACSSRDVQDNVVGVCFVGQDVTGQKQVLDKFTRIQGDYKAIVQNPNPLIPPIFGTDEYGYCSEWNPSMEKLTGWKREEVIGKLLVGEIFGIQLMCCRLKSQDAMTKFMIVLNGAMDGQDTDRFPFSFFDRQGKYVDPLLTVNKRTDAEGSITGVFCFLHTTSVELLQALTVQRSTEKVAFAKLKELAYIRQEIKNPLYGIVFTRNLMEDTDLSVDQRQFVETSAVCERQLRKILDDLDLESIEDGYLELDTTEFEMGTVMDAVVSQGMITSREKGLQLIRETPSEIKNMCLYGDQVRLQQVLADFLLNAVRFTPSSEGWVGIKVVPTKKRLGRGVHVMHLEFRVTHPGLGLPEELVHEMFGRGRGMTQEGLGLSMCRKLVKLMNGTVQYIRETGKSCFLVEVELPLAQRDDAGSVRSTVV

SEQ ID NO: 9800 - protein, 423 aa, Zea mays
MAQAVVPAMQCRVGVKAAAGRVWSAGRTRTGRGGASPGFKVMAVSTGSTGVVPRLEQLLNMDTTPYTDKVIAEYIWVGGSGIDIRSKSRTISKPVEDPSELPKWNYDGSSTGQAPGEDSEVILYPQAIFKDPFRGGNNVLVICDTYTPQGEPLPTNKRHRAAQIFSDPKVGEQVPWFGIEQEYTLLQKDVNWPLGWPVGGFPGPQGPYYCAVGADKSFGRDISDAHYKACLYAGINISGTNGEVMPGQWEYQVGPSVGIEAGDHIWISRYILERITEQAGVVLTLDPKPIQGDWNGAGCHTNYSTKTMREDGGFEEIKRAILNLSLRHDLHISAYGEGNERRLTGKHETASIGTFSWGVANRGCSIRVGRDTEAKGKGYLEDRRPASNMDPYIVTGLLAETTILWQPSLEAEALAAKKLALKV

SEQ ID NO: 9801 - protein, 200 aa, Echinacea paradoxa
DARRDDLNAAIFNLKEIESYDDYERSLLISQMSFEKTFGMSSVFIESTLMENGGLAESANPATMINEAIHVISCGYEEKTAWIGWIYGSVTEDILTGFKMHCRGWRSIYCMPVRPAFKGSAPINLSDRLHQVLRWALGSVEIFLSRHCPLWYGWGGGRLKLLQRFAYINTIVYPFTSLPLVAYCTLPAICLLTGKFIIPT

SEQ ID NO: 9802 - protein, 392 aa, Chlamydia muridarum Nigg
MDYYTILGVAKTATPEEIKKAYRKLAVKYHPDKNPGDAEAERRFKEVSEAYEVLGDAQKRESYDRYGKDGPFAGAGGFGGAGMGNMEDALRTFMGAFGGDFGGNGGGFFEGLFGGLGEAFGMRGGSEGARQGASKKVHITLSFEEAAKGVEKELLVSGYKSCDACSGSGAKTSKGVKVCDRCKGSGQVVQSRGFFSMASTCPDCSGEGRVITDPCSECRGQGRIKDKRSVHVNIPSGVDSGMRLKMEGYGDAGQNGAPAGDLYIFIDVEPHPVFERHGDDLVLELPIGFVDAALGIKKEIPTLLKEGTCRLNIPEGIQSGTVLKVRGQGFPNVHGKARGDLLVRISVETPQHLSNEQKELLRKFSETEKAENFPKKRSFLDKIKGFFSDFAV

SEQ ID NO: 9803 - protein, 123 aa, Taraxacum officinale
NAKLAVEKSLTPPEVPQLPSPETSASSTTVSLSVATDLESGAVPSSLSPATVEVVPKPQQRNRCGSCSRRVGLTGFTCKCGTTFCGTHRYPELHACTFDFKTIGKEAISKANPLIKAEKLNKI

SEQ ID NO: 9804 - protein, 218 aa, Arabidopsis thaliana; identical to SEQ ID NO: 7823

SEQ ID NO: 9805 - protein, 1126 aa, Arabidopsis thaliana
  misc_feature (722)..(722): Xaa can be any naturally occurring amino acid
  misc_feature (733)..(733): Xaa can be any naturally occurring amino acid
MVSGGGSKTSGGEAASSGHRRSRHTSAAEQAQSSANKALRSQNQQPQNHGGGTESTNKAIQQYTVDARLHAVFEQSGESGKSFDYSQSLKTAPYDSSVPEQQITAYLSRIQRGGYTQPFGCLIAVEESTFTIIGYSENAREMLGLMSQSVPSIEDKSEVLTIGTDLRSLFKSSSYLLLERAFVAREITLLNPIWIHSNNTGKPFYAILHRVDVGILIDLEPARTEDPALSIAGAVQSQKLAVRAISHLQSLPSGDIKLLCDTVVESVRDLTGYDRVMVYKFREDEHGEVVAESKRNDLEPYIGLHYPATDIPQASRFLFKQNRVRMIVDCYASAVRVVQDDRLTQSICLVGSTLRAPHGCHAQYMTNMGSIASLAMAVIINGNEEDGNGVNTGGRNSMRLWGLVVCHHTSARCIPFPLRYACEFLMQAFGLQLNMELQLALQVSEKRVLRMQTLLCDMLLRDSPAGIVTQRPSIMDLVKCNGAAFLYQGKYYSLGVTPTDSQINDIVEWLLANHSDSTGLSTDSLGDAGYPRAAALGDAVCGMAIACITKRDFLFWFRSHTEKEIKWGGAKHHPEDKDDGQRMNPRSSFQAFLEVVKSRCQPWETAEMDAIHSLQLILRDSFKESEAMDSKAAAAGAVQPHGDDMVQQGMQEIGAVAREMVRLIETATVPIFAVDIDGCINGWNAKIAELTGLSVEDAIGKSLVRELIYKEYKETVDRLLSXALKGDEGKNVXVKLKTFGSELQGKAMFVVVNACSSKDYLNNIVGVCFVGQDVTGHKIVMDKFINIQGDYKAIIHSPNPLIPPIFAADENTCCLEWNTAMEKLTGWPRSEVIGKLLVREVFGSYCRLKGPDALTKFMIVLHNAIGGQDTDKFPFPFFDRKGEFIQALLTLNKRVSVDGKIIGAFCFLQIPSPELQQALEVQRRQESEYFSRRKELAYIFQVIKNPLSGLRFTNSLLEDTDLNEDQKQLLETSVSCEKQISKIVGDMDVKSIDDGSFLLERTEFFIGNVTNAVVSQVMLVVRERNLQLIRNIPTEVKSMAVYGDQIRLQQVLAEFLLSIVRYAPMEGSVELHLCPTLNQMADGFSAVRLEFRMACAGEGVPPEKVQDMFHSSRWPSPEGLGLSVCR

SEQ ID NO: 9806 - protein, 864 aa, Pinus sylvestris
GESGKSFDYTRSIKSTTESVPEQQITAYLSRIQRGGRIQPFGCVLAVEETTFRIIAYSENAVEMLDLAPQSVPSMEKPQQDVLTIGTDVRTLFTAASAHSLEKAAVAQEISLMNPIWVHCKNSRKPFYAIVHRIDVGMVIDLEPLRTGDAFMSAAGAVQSQKLAVRAISRLQSLPCGDVGLLCDTVVENVRELTGYDRVMVYKFHEDEHGEVVAEIRRSDLEPYLGLHYPATDIPQASRFLFMQNRVRMICDCMATPVKVIQSEELMQPLCLVGSTLRAPHGCHAQYMANMGSIASLVMAVIINGNDDEGGGSGRNSMKLWGLVVCHHTSPRAVPFPLRYACEFLMQALGLQLNMELQLAAQLTEKHILRTQTLLCDMLLRDAPMGIVTQSPSIKDLVKCDGAALYYGGMCWLLGVTPTEAQIKDIADWLLEHHGDSTGLSTDSLADAGYPGAASLGDAVCGMASARITSKDFLFWFRSHTAKEMKWGGAKHHPDDKDDARRMHPRSSFKAFLEVVKRRSLPWDNVEIDAIHSLQLILRGSFRDIDDSGTKTMVHSRLNDLRLQGIDELSSVASEMVRLIETATAPILAVDYNGLVNGWNAKVAELTGLPVGEAMGMSLVQDLVFEQSVERVEKMLHNALRGEEEKNVEMMLKTFGPQKEKEAVILVVNACSSRDFTDNIVGVCFVGQDVTSQKVVMDKFIRIQGDYRSIVQSPNPLIPPIFASDEYACCSEWNAAMEKVTGWTHDEVIGKMLVGEIFGGCCRLKGQDAVTKFTIVLHSAIDGQEIEKFPFAFFDKQGKYVEALLTANKRTDADGRITGSFCFLQIASSELQHALEVQRQQEKKCFARLKELAYIRQEIKNPLY

SEQ ID NO: 9807 - protein, 1129 aa, Petroselinum crispum
MSSSRPANSSSNPGRANQNARVVLTTLDAKIHADFEESGNSFDYSSSVRVTSAVGENSSIQSNKLTTAYLHHIQKGKLIQPVGCLLAVDEKSFKIMAYSENAPEMLTMVSHAVPSVGEHPVLGIGTDVRTIFTAPSAAALQKAVGFTDINLLNPILVHCKTSGKPFYAIAHRVTGSLIIDFEPVKPYEVPMTAAGALQSYKLASKAVNRLQALPGGSMERLCDTMVQEVFELTGYDRVMAYKFHDDDHGEVTAEVTKPGLEPYFGLHYPATDVPQAARFLFLKNKVRMICDCRANSAPVLQDEKLPFELTLCGSTLRAPHSCHLQYMENMNSIASLVMAVVINDSDEVVESSDRNSVKSKKLWGLVVCHNTSPRFVPFPLRYACEFLAQVFAIHVSKELELENQIVEKNILRTQTLLCDLLMRDAPLGIVSQSPNMMDLVKCDGAALLYKNKVYRLGATPSDYQLRDIVSWLTEYHTDSTGLSTDSLYDAGYPGALALGDVVCGMAVVKITSHDMLFWFRSHAAGHIRWGGAKAEPDENHDGRKMHPRSSFKAFLEVVKTRSTTWKEFEMDAIHSLQLILRKALSVEKAVAAQGDEIRSNTDVIHTKLNDLKIEGIQELEAVTSEMVRLIETATVPIFAVDADEIVNGWNTKIAELTGLPVDQAMGKHLLTLVEDSSVGTVVFLLALALQGKEEQGIPFEFKTYGSREDSVPITVVVNACATRGLHDNVVGVCFVAQDVTSQKTIMDKFTRIQGDYKAIVQNPNPLIPPIFGTDEFGWCSEWNQAMTELSGWRREDVMNKMLLGEIFGIQTSCCHLKSKEAFVNLGVVLNNALTGQISEKICFSFFATDGKYVECLLCASKKLHGEGTVTGIFCFLQLASQELQQALHIQRLTEQTAMKRLKTLSYLRRQAKNPLCGINFVREKLEEIGMGEEQTKLFRTSVHCQRHVNKILDDTDLDSIIDGYLDLEMSEFRLHDVYVASRSQVSMRSNGKAIQVVDNFSEEMMSETLYGDSLRLQKVLADFMSVCVNLTPVGGHLGISVTLTEDNLGQSVQLVHLEFRITHTGAGVPEEAVSQMFGSDSETSEEGISLLISRKLVKLMNGDVHYLREAGKSTFIITVELAAASKRES

SEQ ID NO: 9808 - protein, 1115 aa, Ipomoea nil
MENYGKAVTFSSSATSNLNTGKAIAQYNADAKLMAEFEQSRESGKSFDYSRSVIHAPQNVTEEEMTAYLSRIQRGGLIQPFGCMLAIEEPSFKIVGFSENCFDLLGLKSGVEPPERMSLIGIDARTLFTLSSRASLAKAVASREISLLNPIWVHSKINQKPFYAVLHRIDVGIVIDLEPANSADPALLLAGAVQSQKLAVRAISRLQSLPGGDIGTLCDTVVEDVQKLTGYDRVMVYKFHDDSHGEVVSEIRRSDLEPYLGLHYPATDIPQAARFLFKQNRVRMICDCNAQPVKVLQCEELKQPLCLVNSTLRSPHGCHTKYMANMGSIASLVMAVVINSSESMKLWGLVVCHHTSPRYVPFPLRYACEFLMQAFSLQLYMELQLASQLAEKKILQTQTLLCDMLLRDAPFGIVTQTPSIMDLVRCDGAALYYNGKCWLLGVTPTETQVKDIAEWLLHNHGDSTGLSTDCLSDAGYPGAPLLGDAVSGMATARITSKDFLFWFRSHTAKEVKWGGAKHHPEDKDDGGRMHPRSSFIAFLEVVKSRSLPWEDSEINAIHSLQLIMRDSLQGIGENYMKSVSSPQQNDSDGVRFYELSSMALELVRLVETATVPIFGVDSSGLINGWNAKIAELTGLQANVAIGKYLIDDVTHEDSHETFKALMCRALQGEEDRNVEVKLLKFGNHPTKEVVYLVVNACTSRDYKNDIIGVCFVGQDITPEKAVMDKFVRLQGDYEAIIQSLNPLIPPIFASDENACCSEWNAAMERLTGLVKCEVIGKRLPGEIFGGLCRLKGQDALTKFMILLYQGISGHDTEKLSFGFFDRKGNFIDVFITANKRTDERGNIIGCFCFLQTMAVDHPQISARDIEDDRECLSTLKEFAYIQQQMKNPLNGIRFTHKLLEGTVTSDHQKQFLETSEACEKQILSIIENMDSGGIVDGNRVELKTEEFVIGNVIDAVVSQVMIPLKEKNLQLLHDIPDQIKSLPIYGDQIKLQLVLSDFLLSIVRHAPSPDGWVEIRVSPGLKLIQDGNVFIHIQFRMTHPGQGLPSALIEDMVRGGTRWTTQEGVVLHLSQKLVRMMNGHVHYVREQQKCYFLIDLDFKTQKPRSRESSMDTKAD

SEQ ID NO: 9809 - protein, 1164 aa, Arabidopsis thaliana
  misc_feature (647)..(647): Xaa can be any naturally occurring amino acid
MVSGGGSKTSGGEAASSGHRRSRHTSAAEQAQSSANKALRSQNQQPQNHGGGTESTNKAIQQYTVDARLHAVFEQSGESGKSFDYSQSLKTAPYDSSVPEQQITAYLSRIQRGGYTQPFGCLIAVEESTFTIIGYSENAREMLGLMSQSVPSIEDKSEVLTIGTDLRSLFKSSSYLLLERAFVAREITLLNPIWIHSNNTGKPFYAILHRVDVGILIDLEPARTEDPALSIAGAVQSQKLAVRAISHLQSLPSGDIKLLCDTVVESVRDLTGYDRVMVYKFHEDEHGEVVAESKRNDLEPYIGLHYPATDIPQASRFLFKQNRVRMIVDCYASPVRVVQDDRLTQSICLVGSTLRAPHGCHAQYMTNMCSIASLAMAVIINGNEEDGNGVNTGGRNSMRLWGLVVCHHTSARCIPFPLRYACEFLMQAFGLQLNMELQLALQVSEKRVLRMQTLLCDMLLRDSPAGIVTQRPSIMDLVKCNGAAFLYQGKYYSLGMTPTDSQINDIVEWLLANHSDSTGLSTDSLGDAGYPRAAALGDAVCGMAVACITKRDFLFWFRSHTEKEIKWGGAKHHPEDKDDGQRMNPRSSFQAFLEVVKSRCQPWETAEMDAIHSLQLILRDSFKESEAMDSKAAAAGAVQPHGDDMVXQGMQEIGAVAREMVRLIETATVPIFAVDIDGCINGWNAKIAELTGLSVEDAMGKSLVRELIYKEYKETVDRLLSSALKGDEGKNVEVKLKTFGSELQGKAMFVVVNACSSKDYLNNIVGVCFVGQDVTGHKIVMDKFINIQGDYKAIIHSPNPLIPPIFAADENTCCLEWNTAMEKLTGWPRSEVIGKLLVREVFGSYCRLKGPDALTKFMIVLHNAIGGQDTDKFSFPFFDRKGEFIQALLTLNKRVSVDGKIIGAFCFLQIPSPELQQALEVQRRQESEYFSRRKELAYIFQVIKNPLSGLRFTNSLLEDTDLNEDQKQLLETSVSCEKQISKIVGDMDVKSIDDGSFLLERTEFFIGNVTNAVVSQVMLVVRERNLQLIRNIPTEVKSIAVYGDQIRLQQVLAEFLLSIVRYAPMEGSVELHLCPTLNQMADGFSAVRLEFRMACAGEGVPPEKVQDMFHSSRWTSPEGLGLSVCRKILKLMNGGVQYIREFERSYFLIVIELPVPLMMMMPSS

SEQ ID NO: 9810 - protein, 324 aa, Oryza sativa Indica Group
MAGMDPTGGGGGGGVAAHYLHMLRAQQHQPLSPAGDVKAERSMLSPDESPGADADLGSDHPTSSAMVAAEDSGGGGGSGSGGPMRRPRGRPLGSKNKPKPPIIVTRDSPNAFHSHVLEVAAGTDIVECVCEFARRRGRGVSVLSGGGAVANVALRQPGASPPGSLVATMRGQFEILSLTGTVLPPPAPPSASGLTVFLSGGQGQVVGGSVAGQLIAAGPVFLMAASFANAVYERLPLDGEDPEAEAAAATPPGDAAQPTGPPPPQQQPTASQSSEVTAGDGGGGGGLGMYLGGHVGSYQQQQQQLPGPGDNFGSWSGSIRPPPF

SEQ ID NO: 9811 - protein, 373 aa, Methylobacillus flagellatus KT
MAKRDYYEVLGVNRDATDEEIKKAYRKLAMKYHPDRNPDNPKAEEHFKEAKEAYEVLSDDQKRAAYDQYGHAGVDPSAAAGAGAGGFGNFADAFGDIFGDIFGGGGGGRRSNVYRGADLRYNMEISLEEAARGTETKIRIPVMAECETCHGSGARPGTQPVTCSTCGGHGQVRMQQGFFSVQQTCPKCHGSGKMVKDPCPTCHGGGRVKQHKTLSVKIPAGVDEGDRIRLSGEGEAGVNGGPPGDLYVVVHLKKHPIFERDGANLHCEMPISFTTAALGGEIEIPTLDGHAKMKVPPETQTGAVFRLRGKGIKPLRSNEHGDLFCHVIVETPVKLTERQKELLRELEDINQQDSGKHSPREKSWMTKVKDFFQ

SEQ ID NO: 9812 - protein, 1164 aa, Arabidopsis thaliana
  misc_feature (665)..(665): Xaa can be any naturally occurring amino acid
  misc_feature (699)..(699): Xaa can be any naturally occurring amino acid
MVSGGGSKTSGGEAASSGHRRSRHTSAAEQAQSSANKALRSQNQQPQNHGGGTESTNKAIQQYTVDARLHAVFEQSGESGKSFDYSQSLKTAPYDSSVPEQQITAYLSRIQRGGYTQPFGCLIAVEESTFTIIGYSENAREMLGLMSQSVPSIEDKSEVLTIGTDLRSLFKSSSYLLLERAFVAREITLLNPIWIHSNNTGKPFYAILHRVDVGILIDLEPARTEDPALSIAGAVQSQKLAVRAISHLQSLPSGDIKLLCDTVVESVRDLTGYDRVMVYKFHEDEHGEVVAESKRNDLEPYIGLHYPATDIPQASRFLFKQNRVRMIVDCYASPVRVVQDDRLTQSICLVGSTLRAPHGCHAQYMTNMGSIASLAMAVIINGNEEDGNGVNTGGRNSMRLWGLVVCHHTSARCIPFPLRYACEFLMQAFGLQLNMELQLALQVSEKRVLRMQTLLCDMLLRDSPAGIVTQRPSIMDLVKCNGAAFLYQGKYYSLGVTPTDSQINDIVEWLLANHSDSTGLSTDSLGDAGYPRAAALGDAVCGMAVACITKRDFLFWFRSHTEKEIKWGGAKHHPEDKDDGQRMNPRSSFQAFLEVVKSRCQPWETAEMDAIHSLQLILRDSFKESEAMDSKAAAAGAVQPHGDDMVQQGMQEIGAVAREMVRLIXTATVPIFAVDIDGCINGWNAKIAELTGLSVEDAXGKSLVRELISKEYKETVDRLLSSALKGDEGKNVEVKLKTFGSELQGKAMFVVVNACSSKDYLNNIVGVCFVGQDVTGHKIVMDKFINIQGDYKAIIHSPNPLIPPIFAADENTCCLEWNTAMEKLTGWPRSEVIGKLLVREVFGSYCRLKGPDALTKFMIVLHNAIGGQDTDKFPFPFFDRKGEFIQALLTLNKRVSVDGKIIGAFCFLQIPSPELQQALEVQRRQESEYFSRRKELAYIFQVIKNPLSGLRFTNSLLEDTDLNEDQKQLLETSVSCEKQISKIVGDMDVKSIDDGSFLLERTEFFIGNVTNAVVSQVMLVVRERNLQLIRNIPTEVKSMAVYGDQIRLQQVLAEFLLSIVRYAPMEGSVELHLCPTLNQMADGFSAVRLEFRMACAGEGVPPEKVQDMFHSSRWTSPEGLGLSVCRKILKLMNGGVQYIREFERSYFLIVIELPVPLMMMMPSS

SEQ ID NO: 9813 - protein, 1164 aa, Arabidopsis thaliana
  misc_feature (1116)..(1116): Xaa can be any naturally occurring amino acid
MVSGGGSKTSGGEAASSGHRRSRHTSAAEQAQSSANKALRSQNQQPQNHGGGTESTNKAIQQYTVDARLHAVFEQSGESGKSFDYSQSLKTAPYDSSVPEQQITAYLSRIQRGGYTQPFGCLIAVEESTFTIIGYSENAREMLGLMSQSVPSIEDKSEVLTIGTDLRSLFKSSSYLLLERAFVAREITLLNPIWIHSNNTGKPFYAILHRVDVGILIDLEPARTEDPALSIAGAVQSQKLAVRAISHLQSLPSGDIKLLCDTVVESVRDLTGYDRVMVYKFHEDEHGEVVAESKRNDLEPYIGLHYPATDIPQASRFLFKQNRVRMIVDCYASPVRVVQDDRLTQSICLVGSTLRAPHGCHAQYMTNMGSIASLAMAVIINGNEEDGNGVNTGGRNSMRLWGLVVCHHTSARCIPFPLRYACEFLMQAFGLQLNMELQLALQVSEKRVLRMQTLLCDMLLRDSPAGIVTQRPSIMDLVKCNGAAFLYQGKYYSLGVTPTDSQINDIVEWLLANHSDSTGLSTDSLGDAGYPRAAALGDAVCGMAVACITKRDFLFWFRSHTEKEIKWGGAKHHPEDKDDGQRMNPRSSFQAFLEVVKSRCQPWETAEMDAIHSLQLILRDSFKESEAMDSKAAAAGAVQPHGDDMVQQGMQEIGAVAREMVRLIETATVPIFAVDIDGCINGWNAKIAELTGLSVEDALGKSLVRELISKEYKETVDRLLSSALKGDEGKNVEVKLKTFGSELQGKAMFVVVNACSSKDYLNNIVGVCFVGQDVTGHKIVMDKFINIQGDYKAIIHSPNPLILPIFAADENTCCLEWNTAMEKLTGWPRSEVIGKLLVREVFGSYCRLKGPDALTKFMIVLHNAIGGQDTDKFPFPFFDRKGEFIQALLTLNKRVSVDGKIIGAFCFLQIPSPELQQALEVQRRQESEYFSRRKELAYIFQVIKNPLSGLRFTNSLLEDTDLNEDQKQLLETSVSCEKQISKIVGDMDVKSIDDGSFLLERTEFFIGNVTNAVVSQVMLVVRERNLQLIRNIPTEVKSMAVYGDQIRLQQVLAEFLLSIVRYAPMEGSVELHLCPTLNQMADGFSAVRLEFRMACAGEGVPPEKVQDMFHSSRWTXPEGLGLSVCRKILKLMNGGVQYIREFERSYFLIVIELPVPLMMMMPSS

SEQ ID NO: 9814 - protein, 1164 aa, Arabidopsis thaliana
MVSGGGSKTSGGEAASSGHRRSRHTSAAEQAQSSANKALRSQNQQPQNHGGGTESTNKAIQQYTVDARLHAVFEQSGESGKSFDYSQSLKTAPYDSSVPEQQITAYLSRIQRGGYTQPFGCLIAVEESTFTIIGYSENAREMLGLMSQSVPSIEDKSEVLTIGTDLRSLFKSSSYLLLERAFVAREITLLNPIWIHSNNTGKPFYAILHRVDVGILIDLEPARTEDPALSIAGAVQSQKLAVRAISHLQSLPSGDIKLLCDTVVESVRDLTGYDRVMVYKFHEDEHGEVVAESKRNDLEPYIGLHYPATDIPQASRFLFKQNRVRMIVDCYASPVRVVQDDRLTQSICLVGSTLRAPHGCHAQYMTNMGSIASLAMAVIINGNEEDGNGVNTGGRNSMRLWGLVVCHHTSARCIPFPLRYACEFLMQAFGLQLNMELQLALQVSEKRVLRMQTLLCDMLLRDSPAGIVTQRPSIMDLVKCNGAAFLYQGKYYSLGVTPTDSQINDIVEWLLANHSDSTGLSTDSLGDAGYPRAAALGDAVCGMAVACITKRDFLFWFRSHTEKEIKWGGAKHHPEDKDDGQRMNPRSSFQAFLEVVKSRCQPWETAEMDAIHSLQLILRDSFKESEAMDSKAAAAGAVQPHGDDMVQQGMQEIGAVAREMVRLIKTATVPIFAVDIDGCINGWNAKIAELTGLSVEDAMGKSLVRELIYKEYKETVDRLLSSALKGDEGKNVEVKLKTFGSELQGKAMFVVVNACSSKDYLNNIVGVCFVGQDVTGHKIVMDKFINIQGDYKAIIHSPNPLIPPIFAADENTCCLEWNTAMEKLTGWPRSEVIGKLLVREVFGSYCRLKGPDALTKFMIVLHNAIGGQDTDKFPFPFFDRKGEFIQALLTLNKRVSVDGKIIGAFCFLQIPSPELQQALEVQRRQESEYFSRRKELAYIFQVIKNPLSGLRFTNSLLEDTDLNEDQKQLLETSVSCEKQISKIVGDMDVKSIDDGSFLLERTEFFIGNVTNAVVSQVMLVVRERNLQLIRNIPTEVKSMAVYGDQIRLQQVLAEFLLSIVRYAPMEGSVELHLCPTLNQMADGFSAVRLEFRMACAGEGVPPEKVQDMFHSSRWTSPEGLGLSVCRKILKLMNGGVQYIREFERSYFLIVIELPVPLMMMMPSS

SEQ ID NO: 9815 - protein, 328 aa, Aspergillus nidulans FGSC A4
MDSLLQPPFSPKQRVQKYLENTLTTVLTQLNISKPGEGEGDATITLKRRITSPTTTVFRIDSSTGALQAVRAETTVTYSFPGKDGYEAWRFTAKGLVAGYYRVTTVRDEVIDARESTEDCLIPRVQDIADLDISDVKWILIIEKEAVFRRLVRNNFHNHTIVGKGILITGKGYPDLATRSFVRRIFQSTFPRSTLTQAPPFYILADGDPDGIAIMSTYKYGSMAHTRENERLNLPCLQWLGLRISEIIGGLESDADETLMSLTRRDRRKIGTMLKRSPIWAVDGPEAEWRVELQRMLILNVKAEIEILYDRAGGLEGWIDRHMKTQGQ

SEQ ID NO: 9816 - protein, 1146 aa, Populus tremula
MASQSQRQSNQPAHNQVQSSGTSNMRQHHHPTESVSKAIAQYTVDAQLHAVFEQSGGTGKSFDYSKSVRTPNQSVPEEQITAYLSKIQRGGHIQPFGCMIAADEQSFRVIAYSENAKDMLGLTPQSVPSLEKQEILFVGADVRILFRPSSAVLLEKAFGAREITLLNPIWIHSKNSGKPFYAILHRIDVGIVIDLEPARTEDPALSIAGAVQSQKLAVRAISQLQSLPGGDIKLLCDTVVDSVRELTGYDRVMVYKFHEDEHGEVVAENKRVDLEPYIGLHYPSTDIPQASRFLFKQNRVRMIVDCHAIPVSVIQDEGLMQPLCLVGSTLRAPHGCHAQYMENMGSIASLAMAVIIYGNDEEAIGGRNSMRLWGLVVCHHTSARCIPFPLRYACEFLMQAFGLQLNMELQLASQLLEKHVLRTQTLLCDMLLRDSPTGIVTQSPSIMDLVKCDGAALYYQGQYYPLGVTPTEAQIKDIVEWLLTLHGDPTGLSTDSLADAGYPGAAFLGDAVCGMAVAYIAERDFLFWFRSHTAKEVKWGGAKHHPEDKDDGQRMHPRSSFKAFLEVVKSRSLPWENAEMDAIHSLQLILRDSFRDAEATNSKAVVHTQLKDMELQGMDELSSVAREMVRLIETATAPIFAVDVEGRINGWNAKVAELTGLSVEEAMGKSLVHDLVYKEYEEIVDKLIHRAVKGEEDKNVEIKLRTFCSEHQKKAVFVVVNACSSKDYMDNIVGVCFVGQDVTGQKVVMDKYVLIQGDYKAIVHSPNPSIPPIFASDENTCCLEWNTAMEKLTGWSRGEVVGKMLVGEVFGSCCRLKGPDALTKFMIALHNAIGGIDTDKLPFSFFDRNEKNVQTLLTANKRVNMKGDIIGAFCFLQIASPELQPSLKVQKQQEKKSFARMKELAYICQEIKNPLSGIHFTNSLLENTDLTEDQQQFLETSAACEKQILKIIRDIDLESIENGSLELEKAEFLLGSVINAVVSQAMLLLRERNLQLLRDIPEEIKTLAVYGDQARIQQVLADFLLNMVSYTQSSAGWVEIHVCPTLKQISDGHTLVHTEFRYLERVLQTRMLGLQHPPRSFLNCKLTLVKLHREGMVPKIQFQGLSVCQGRLIWLSFPENTTVALYPLTIWFLLLHRHQSRSITHT

SEQ ID NO: 9817 - protein, 396 aa, Oryza sativa Indica Group
MARAAASRLAAAATSSSTLEMFSRHLAAASSAWGIASSRAPYPGRERRSASWWCPTRSFHATRGMNARDYYDVLGVNKDASASDIKKAYYLLAKKFHPDTNKEDADAEKKFQEVQRAYEVLKDDDKRETYDQLGAEAYERQASGGGPDDFSGSHPFGDIFGDMFDNPFAMRGGRDVKVPIELSFMEAVQGCRKTIAYEADVFCDTCNGSGVPPGTVPQTCKACRGAGVIFMQRGIMSIETTCSRCGGSGKIVKNFCKTCKGEQLVKGKKSVKLDIMAGIDDNDTMKVFGKGGADVERNKPGDLYVTIKIREDPVFRREGNHVHVDAIISIAQAVLGGTVTVPTLTGNVSVKVRQGTQPGEKVVLRGKGIKARNSPAYGNQYIHFNVRVPTYDTFSN

SEQ ID NO: 9818 - protein, 1146 aa, Populus tremula
MASQSQRQSNQPAHNQAQSSGTSNMRQHHHPTESVSKAIAQYTVDAQLHAVFEQSGGTGKSFDYSKSVRTPNQSVPEEQITAYLSKIQRGGHIQPFGCMIAADEQSFRVIAYSENAKDMLGLTPQSVPSLEKQEILFVGADVRILFRPSSAVLLEKAFGAREITLLNPIWIHSKNSGKPFYAILHRIDVGIVIDLEPARTEDPALSIAGAVQSQKLAVRAISQLQSLPGGDIKLLCDTVVDSVRELTGYDRVMVYKFHEDEHGEVVAENKRVDLEPYIGLHYPSTDIPQASRFLFKQNRVRMIVDCHAIPVSVIQDEGLMQPLCLVGSTLRAPHGCHAQYMENMGSIASLAMAVIIYGNDEEAIGGRNSMRLWGLVVCHHTSTTCIPFPLRYACEFLMQAFGLQLNMELQLASQLLEKHVLRTQTLLCDMLLRDSPTGIVTQSPSIMDLVKCDGAALYYQGQYYPLGVTPTEAQIKDIVEWLLTLHGDPTGLSTDSLADAGYPGAAFLGDAVCGMAVAYIAERDFLFWFRSHTAKEVKWGGAKHHPEDKDDGQRMHPRSSFKAFLEVVKSRSLPWENAEMDAIHSLQLILRDSFRDAEATNSKAVVHTQLKDMELQGMDELSSVAREMVRLIETATAPIFAVDVEGRINGWNAKVAELTGLSVEEAMGKSLVHDLVYKEYEEIVDKLIHRAVKGEEDKNVEIKLRTFCSEHQKKAVFVVVNACSSKDYMDNIVGVCFVGQDVTGQKVVMDKYVLIQGDYKAIVHSPNPSIPPIFASDENTCCLEWNTALEKLTGWSRGEVVGKMLVGEVFGSCCRLKGPNALTKFMIALHNAIGGIDTDKLTFSFFDRNEKNVQTLLTANKRVNIKGDIIGAFCFLQIASLELQPSLKVQKQQEKKSFARMKELAYICQEIKNPLSGIHFTNSLLENTDLTEDQQQFLETSAACEKQILKIIRDIDLESIENGSLELEKAEFLLGSVINAVVSQAMLLLRERNLQLLRDIPEEIKTLAVYGDQARIQQVLADFLLNMVRYAPSSAGWVEIHVCPTLKQISDGHTLVHTEFRYLERVLQTRMLGLQHPLRSFLNCKLTLVMLHREGMVPKIQFQGLSVCQGRLIWLSFPENTTVALYPLTIWFLLLHRHQSRSITHT

SEQ ID NO: 9819 - protein, 1146 aa, Populus tremula
MASQSQRQSNQPAHNQAQSSGTSNMRQHHHPTESVSKAIAQYTVDAQLHAVFEQSGGTGKSFDYSKSVRTPNQSVPEEQITAYLSKIQRGGHIQPFGCMIAADEQSFRVIAYSENAKDMLGLTPQSVPSLEKQEILFVGADVRILFRPSSAVLLEKAFGAREITLLNPIWIHSKNSGKPFYAILHRIDVGIVIDLEPARTEDPALSIAGAVQSQKLAVRAISQLQSLPGGDIKLLCDTVVDSVRELTGYDRVMVYKFHEDEHGEVVAENKRVDLEPYIGLHYPSTDIPQASRFLFKQNRVRMIVDCHAIPVSVIQDEGLMQPLCLVGSTLRAPHGCHAQYMENMGSIASLAMAVIIYGNDEEAIGGRNSMRLWGLVVCHHTSARCIPFPLRYACEFLMQAFGLQLNMELQLASQLLEKHVLRTQTLLCDMLLRDSPTGIVTQSPSIMDLVKCDGAALYYQGQYYPLGVTPTEAQIKDIVEWLLTLHGDPTGLSTDSLADAGYPGAAFLGDAVCGMAVAYIAERDFLFWFRSHTAKEVKWGGAKHHPEDKDDGQRMHPRSSFKAFLEVVKSRSLPWENAEMDAIHSLQLILRDSFRDAEATNSKAVVHTQLKDMELQGMDELSSVAREMVRLIETATAPIFAVDVDGRINGWNAKVAELTGLSVEEAMGKSLVHDLVYKEYEEIVDKLIHRAVKGEEDKNVEIKLRTFCSEHQKKAVFVVVNACSSKDYMDNIVGVCFVGQDVTGQKVVMDKYVLIQGDYKAIVHSPNPSIPPIFASDENTCCLEWNTAMEKLTGWSRGEVVGKMLVGEVFGNCCRLKGPDALTKFMIALHNAIGGIDTDKLPFSFFDRNEKNVQTLLTANKRVNMKGDIIGAFCFLQIASPELQPSLKVQKQQEKKSFARMKELAYICQEIKNPLSGIHFTNSLLENTDLTEDQQQFLETSAACEKQILKIIRDIDLESIENGSLELEKAEFLLGSVINAVVSQAMLLLRERNLQLLRDIPEEIKTLAVYGDQARIQQVLADFLLNMVRYAPSSAGWVEIHVCPTLKQISDGHTLVHTEFRYLERVLQTRMLGLQHPLRSFLNCKLTLVMLHREGMVPKIQFQGLSVCQGRLIWLSFPENTTVALYPLTIWFLLLHRHQSRSITHT

SEQ ID NO: 9820 - protein, 531 aa, Oryza sativa Japonica Group; identical to SEQ ID NO: 3576

SEQ ID NO: 9821 - protein, 1146 aa, Populus tremula
MASQSQRQSNQPAHNQAQSSGTSNMRQHHHPTESVSKAIAQYTVDAQLHAVFEQSGGTGKSFDYSKSVRTPNQSVPEEQITAYLSKIQRGGHIQPFGCMIAADEQSFRVIAYSENAKDMLGLTPQSVPSLEKQEILFVGADVRILFRPSSAVLLEKAFGAREITLLNPIWIHSKNSGKPFYAILHRIDVGIVIDLEPARTEDPALSIAGAVQSQKLAVRAISQLQSLPGGDIKLLCDTVVDSVRELTGYDRVMVYKFHEDEHGEVVAENKRVDLEPYIGLHYPSTDIPQASRFLFKQNRVRMIVDCHAIPVSVIQDEGLMQPLCLVGSTLRAPHGCHAQYMENMGSIASLAMAVIIYGNDEEAIGGRNSMRLWGLVVCHHTSTRCIPFPLRYACEFLMQAFGLQLNMELQLASQLLEKHVLRTQTLLCDMLLRDSPTGIVTQSPSIMDLVKCDGAALYYQGQYYPLGVTPTEAQIKDIVEWLLTLHGDPTGLSTDSLADAGYPGAAFLGDAVCGMAVAYIAERDFLFWFRSHTAKEVKWGGAKHHPEDKDDGQRMHPRSSFKAFLEVVKSRSLPWENAEMDAIHSLQLILRDSFRDAEATNSKAVVHNQLKDMELQGMDELSSVAREMVRLIETATAPIFAVDVDGRINGWNAKVAELTGLSVEEAMGKSLVHDLVYKEYEEIVDKLIHRAVKGEEDKNVEIKLRTFCSEHQKKAVFVVVNACSSKDYMDNIVGVCFVGQDVTGQKVVMDKYVLIQGDYKAIVHSPNPSIPPIFASDENTCCLEWNTAMEKLTGWSRGEVVGKMLVGEVFGSCCRLKGPDALTKFMIALHNAIGGIDTDKLPFSFFDRNEKNVQTLLTANKRVNIKGDIIGPFCFLQIASPELQPSLKVQKQQEKKSFARMKELAYICQEIKNPLSGIHFTNSLLENTDLTEDQQQFLETSAACEKQILKIIRDIDLESIENGSLELEKAEFLLGSVINAVVSQAMLLLRERNLQLLRDIPEEIKTLAVYGDQARIQQVLADFLLNMVRYAPSSAGWVEIHVCPTLKQISDGHTLVHTEFRYLERVLQTRMLGLQHPLRSFLNCKLTLVMLHREGMVPKIQFQGLSVCQGRLIWLSFPENTTVALYPLTIWFLLLHRHQSRSITHT

SEQ ID NO: 9822 - protein, 184 aa, Triticum monococcum
APINLSDRLNQVLRWALGSVEILFSRHCPIWYNYGGRLKLLERVAYINTIVYPITSLPLIAYCVLPAICLLTNKFIIPEISNYAGMFFILMFASIFATGILELRWSGVGIEDWWRNEQFWVIGGTSAHLFAVFQGLLKVLAGIDTNFTVTSKANDEDGDFAELYVFKWTSLLIPPTTVLVINLV

SEQ ID NO: 9823 - protein, 516 aa, Aspergillus nidulans FGSC A4
MTVLPDFDPYEALGVSKDATLAEIKSSHRKLVLKCHPDKIKDESLRSEAQTQFQKVQQAYECLSDETTRAKYDNKVKLAELKREMAARGASYTRPNTREYRDGRIYEERVPADARSSSENFFEEEGRYTESPRPTSRKHAEYGARPRSRATTDEKRRSSKAAPSSSAAHAAKKEARDSRKASRADRDKVRTKERKRESHDKYIHIIDVDSDDSSASSEVYFIPVKKPSDKRYRDAKTRPTESVPRSSKARYRDEDDYDSDDYKHDKVDVLSSRATDYIRRSKETIPEPDRRHRSSRSPHGYESGEHSGRSRRSTRPPTSHHSSYEHLDHAPRTVPSMPTASTFPGPQTSHHSRSSGHVRSDSRTRRTEHVYLAEIRTSKLRGERSDSGYASSSPTPEIPEISPKASRYKTGPEPVLIEPRSQGPPPPPLLRHSRTYSPPRQDRPNIVRSTTYTYPVDSSQSSRRPLYRELDPVDARIKERELRRARDVQYIPSAHAARSSDYTRPVGSGRRTSAYA

SEQ ID NO: 9824 - protein, 1146 aa, Populus tremula
MASQSQRQSNQPAHNQAQSSGTSNMRQHHHPTESVSKAIAQYTVDAQLHAVFEQSGGTGKSFDYSKSVRTPNQSLPEEQITAYLSKIQRGGHIQPFGCMSAADEQSFRVIAYSENAKDMLGLTPQSVPSLEKQEILFVGADVRILFRPSSAVLLEKAFGAREITLLNPIWIHSKNSGKPFYAILHRIDVGIVIDLEPARTEDPALSIAGAVQSQKLAVRAISQLQSLPGGDIKLLCDTVVDSVRELTGYDRVMVYKFHEDEHGEVVAENKRVDLEPYIGLHYPSTDIPQASRFLFKQNRVRMIVDCHAIPVSVIQDEGLMQPLCLVGSTLRAPHGCHAQYMENMGSIASLAMAVIIYGNDEEAIGGRNSMRLWGLVVCHHTSARCIPFPLRYACEFLMQAFGLQLNMELQLASQLLEKHVLRTQTLLCDMLLRDSPTGIVTQSPSIMDLVKCDGAALYYQGQYYPLGVTPTEAQIKDIVEWLLTLHGDPTGLSTDSLADAGYPGAAFLGDAVCGMAVAYIAERDFLFWFRSHTAKEVKWGGAKHHPEDKDDGQRMHPRSSFKAFLEVVKSRSLPWENAEMDAIHSLQLILRDSFRDAEATNSKAVVHTQLKDMELQGMDELSSVAREMVRLIETATAPIFAVDVDGRINGWNAKVAELTGLSVEEAMGKSLVHDLVYKEYEEIVDKLIHRAVKGEEDKNVEIKLRTFCSEHQKKAVFVVVNACSSKDYMDNIVGVCFVGQDVTGQKVVMDKYVLIQGDYKAIVHSPNPSIPPIFASDENTCCLEWNTAMEKLTGWSRGEVVGKMLVGEVFGSCCRLKGPDALTKFMIGLHNAIGGIDTDKLPFSFFDRNEKNVQTLLTANKRVNMKGDIIGAFCFLQIASLELQPSLKVQKQQEKKSFARMKELAYICQEIKNPLSGIHFTNSLLENTDLTEDQQQFLETSAACEKQILKIIRDIDLESIENGSLELEKAEFLLGSVINAVVSQAMLLLRERNLQLLRDIPEEIKTLAVYGDQARIQQVLADFLLNMVRYAPSSAGWVEIHVCPTLKQISDGHTLVHTEFRYLERVLQTRMLGLQHPLRSFLNCKLTLVMLHREGMVPKIQFQGLSVCQGRLIWLSFPENTTVALYPLTIWFLLLHRHQSRSITHT

SEQ ID NO: 9825 - protein, 199 aa, Oryza sativa Indica Group
MVKLTMIARVTDNLPLVEGLDDGRDLKDADFYKQQAKLLFKNLSKGQHEASRMSIETGPYLFHYIIEGRVCYLTMCDCSYPKKLAFQYLEDLKNEFERVNGNQIETAARPYAFIKFDTFIQKTKKLYLDTRTQRNLAKLNDELYEVHQIMTRNFQEVLGVGEKLDHEFAFAPYLCYAASFIIVFSTMDLSMISVHMRLT

SEQ ID NO: 9826 - protein, 270 aa, Zea mays
  misc_feature (220)..(220): Xaa can be any naturally occurring amino acid
MGRNRKGRKARVSHDADADADADGSEDERATTAGRSLYEILGVEKTASQQEIKKAYHKLALRLHPDKNPGDEEAKEKFQQLQKVISILGDVEKRALYDETGITDDDALVGEAANNLQEYFRTMYKKVTEADIEEFEAKYRGSDSEKTDLKELYTKYKGNMNRLFCAMICSEPKLDSHRFKDIIDEAIGEGELKSTKVYEKWAKKISGMEPPTNPLERRVXRRAERKKQFNSILSNIMSKCDSKASSSEPTEEEFEQAQQRLESRRAKRRK

SEQ ID NO: 9827 - protein, 470 aa, Oryza sativa Japonica Group
MAVTGPPRCGAGEATFAGSGRSGPAAIRSSPMTAAVDAIGQKGYYTFGVMVEKWSTARMIFSFNGGNANENGCCRGLFGVAAAPRRGFMAGSKFGSFKSEKGSSAGAAAGAGAAAQRRDPYEVLGVGRNATEQEIKSAFRRMALKYHPDKNADDPVASDKFQEATFSYNILSDPDKRRQYDSSGFEAIEADSQELELDLSSLNTVNTVFAALFSKLGVPIKTTVSATVLEEALNGSVGISQLELGQSVFRKVEKQSAHFYSVDITDKEAKMGLVCRVQSTAKSKFKLLYFEPEENGGLSLALQEDSVKTGKVTSAGMFFLGFPVYRFEQNNSEKLRCVEAKILAKRSELSKFESEYREVLAKFTEMTSRYAQEMQTIDELLKERNAIHASYTNNTTLQRSSSSNKGKTSSKESKSDDDQTVKKEKKSKSKSMEGSRSDDDGPRKEKKPKERLRRKKWFNIHLKVDKRRPC

SEQ ID NO: 9828 - protein, 290 aa, Arabidopsis thaliana
MGVDYYKVLQVDRSANDDDLKKAYRKLAMKWHPDKNPNNKKDAEAKFKQISEAYDVLSDPQKRAVYDQYGEEGLKGNVPPPNAATSGASYFSTGDGSSSFRFNPRSADDIFAEFFGFSTPFGGGGGGTGGQRFASRMFGDDMYASFGEGAVEEILTIGVKPGWKKGTKITFPEKGNEHPGVIPADLVFIIDEKPHPVFTREGNDLIVTQKVSLADALTGYTANIATLDGRTLTIPITNVIHPEYEEVVPKEGMPLQKDQTKKGNLRIKFNIKFPARLTAEQKAGFKKLIG

SEQ ID NO: 9829 - protein, 195 aa, Araucaria heterophylla
DEHGEVLAEIRRSDLEPYLGLHYPATDIPQASRFLFMQNRVRMICDCRAAPVEVIQAEELKQPLCLVGSTLRAPHGCHAQYMANMGSIASLVMAVVINGNEDEGGGGGGSGSGSGRGSMKLWGLVVCHHTSPRAVPFPLRYACEFLMQAFGLQLNMELQLAAQLTEKHILRTQTLLCDMLLRDAPIGIVTHSPSI

SEQ ID NO: 9830 - protein, 203 aa, Echinacea purpurea
DARRDDLNAAIFNLKEIESYDDYERSLLISQMSFEKTFGMSSVFIESTLIENGGLAESANPATMINEAIHVISCGYEEKTAWGKEIGWIYGSVTEDILTGFKMHCRGWRSIYCMPVRPAFKGSAPINLSDRLHQVLRWALGSVEIFLSRHCPLWYGWGGGRLKLLQRFAYINTIVYPFTSLPLVAYCTLPAICLLTGKFIIPT

SEQ ID NO: 9831 - protein, 346 aa, Methanopyrus kandleri AV19
MSEALQRLREFAKQVLKCVEKDEPVRIPKRTTSNIRYDPEREIFTLGPDKLERRPRTLKGSKKLAQMLSVAAFAKELVEKGRSATLREIYYTSEGWEVDFKDQRESDAIVEDLEATLGLKREEFGVWPEEDGAAVYGDLLVREDGVEIHAERAGISGYNIPPNVDAVEILDCGAERVIAVETMGMYRRLVQERAHEKLNALIVGLKGQAARATRRLLRRLNEELGLPVYVFTDGDPYGWHIYMVIRSGSAKAAHLNEELACPDAKFIGVTATDIVEYDLPTEPLKKTDYKRIEELRRDPRYYDPFWKKELDLLEKLGKKAEQQAFAKYSLDYVVKEYLPAKLDELE

SEQ ID NO: 9832 - protein, 344 aa, Bradyrhizobium japonicum USDA 110
MTKYKLEYIWLDGYTPTPNLRGKTQIKEFASFPTLEQLPLWGFDGSSTQQAEGHSSDCVLKPVAVFPDAARTNGVLVMCEVMMPDGKTPHASNKRATILDDAGAWFGFEQEYFFYKDGRPLGFPTSGYPAPQGPYYTGVGFSNVGDVARKIVEEHLDLCLAAGINHEGINAEVAKGQWEFQIFGKGSKKAADEMWMARYLMLRLTEKYGIDIEFHCKPLGDTDWNGSGMHANFSTEYMRTVGGKEYFEALMAAFDKNLMDHIAVYGPDNDKRLTGKHETAPWNKFSYGVADRGASIRVPHSFVNNGYKGYLEDRRPNSQGDPYQIASQILKTISSVPTEKKAVA

SEQ ID NO: 9833 - protein, 911 aa, Zea mays; identical to SEQ ID NO: 9528

SEQ ID NO: 9834 - protein, 308 aa, Francisella tularensis subsp. holarctica
MADYYSLLGVSRDASEADIKKAYRRLAKKYHPDVNKEKGAEDKFKEIQTAYDVLGDKEKKKLYDTYGENWDKVQQGGFGGAGGGFGGFSQSGRSQSFNFEDLGDIFGDLFGGGAGARGFGGGQPRARKGEDINISLRLNVEDAIKGGSRTVSYNYQEVGANGMPTMQHQSVDVKIPSAMGNGKKLRVKGKGGAGIGANAPAGDLYIKIEVVDHKNYKVDGNDIYEHINIAPWEAALGTSLEIDTPYGKKKMKVPEGSQSGRKMRIKGKGLGDGDFYIVYDVKLPLADTDEKKEFYKQMQEKMNFNPRA

SEQ ID NO: 9835 - protein, 467 aa, Oryza sativa Indica Group
MADEKLAKLREAVAGLSQISDNEKSGFISLVARYLSGEEEHVEWAKIHTPTDEVVVPYDTLEAPPEDLEETKKLLNKLAVLKLNGGLGTTMGCTGPKSVIEVRNGFTFLDLIVIQIESLNKKYGSNVPLLLMNSFNTHEDTLKIVEKYTNSNIEVHTFNQSQYPRVVADEFLPWPSKGKTCKDGWYPPGHGDIFPSLMNSGKLDLLLSQGKEYVFIANSDNLGAIVDMKILNHLIHKQNEYCMEVTPKTLADVKGGTLISYEDKVQLLEIAQVPDAHVNEFKSIEKFKIFNTNNLWVNLKAIKRLVEADALKMEIIPNPKEVDGVKVLQLETAAGAAIRFFDHAIGINVPRSRFLPVKATSDLQLVQSDLYTLVDGFVTRNPARTNPSNPSIELGPEFKKVGCFLGRFKSIPSIVELDTLKVSGDVWFGSSITLKGKVTITAQPGVKLEIPDGAVIENKDINGPEDL

SEQ ID NO: 9836 - protein, 60 aa, Glycine max
GQVVDEKYRRPQGLYNHKDVDHKKLRKLILESKLAPCYPGYEETTYDREECPICFLARLN

SEQ ID NO: 9837 - protein, 1164 aa, Arabidopsis thaliana
MVSGGGSKTSGGEAASSGHRRSRHTSAAEQAQSSANKALRSQNQQPQNHGGGTESTNKAIQQYTVDARLHAVFEQSGESGKSFDYSQSLKTAPYDSSVPEQQITAYLSRIQRGGYTQPFGCLIAIEESTFTIIGYSENAREMLGLMSQSVPSIEDKSEVLTIGTDLRSLFKSSSYLLLERAFVAREITLLNPIWIHSNNTGKPFYAILHRVDVGILIDLEPARTEDPALSIAGAVQSQKLAVRAISHLQSLPSGDIKLLCDTVVESVRDLTGYDRVMVYKFHEDEHGEVLAESKRNDLEPYIGLHYPATDIPQASRFLFKQNRVRMIVDCYASPVRVVQDDRLTQSICLVGSTLRAPHGCHAQYMTNMGSIASLAMAVIINGNEEDGNGVNTGGRNSMRLWGLVVCHHTSARCIPFPLRYACEFLMQAFGLQLNMELQLALQVSEKRVLRMQTLLCDMLLRDSPAGIVTQRPSIMDLVKCNGAAFLYQGKYYSLGVTPTDSQINDIVEWLLANHSDSTGLSTDSLGDAGYPRAAALGDAVCGMAVACITKRDFLFWFRSHTEKEIKWGGAKHHPEDKDDGQRMNPRSSFQAFLEVVKSRCQPWETAEMDAIHSLQLILRDSFKESEAMDSKAAAAGAVQPHGDDMVQQGMQEIGAVAREMVRLIKTATVPIFAVDIDGCINGWNAKIAELTGLSVEDAMGKSLVRELIYKEYKETVDRLLSSALKGDEGKNVEVKLKTFGSELQGKAMFVVVNACSSKDYLNNIVGVCFVGQDVTGHKIVMDKFINIQGDYKAIIHSPNPLIPPIFAADENTCCLEWNTAMEKLTGWPRSEVIGKLLVREVFGSYCRLKGPDALTKFMIVLHNAIGGQDTDKFPFPFFDRKGEFIQALLTLNKRVSVDGKIIGAFCFLQIPSPELQQALEVQRRQESEYFSRRKELAYIFQVIKNPLSGLRFTNSLLEDTDLNEDQKQLLETSVSCEKQISKIVGDMDVKSIDDGSFLLERTEFFIGNVTNAVVSQVMLVVRERNLQLIRNIPTEVKSMAVYGDQIRLQQVLAEFLLSIVRYAPMEGSVELHLCPTLNQMADGFSAVRLEFRMACAGEGVPPEKVQDMFHSSRWTSPEGLGLSVCRKILKLMNGGVQYIREFERSYFLIVIELPVPLMMMMPSS

SEQ ID NO: 9838 - protein, 1113 aa, Vitis vinifera
MVKKASSPSSSPVTITVSSGGKGGAIRSMGLTSPVPRSSVLNNPNSPLSGRGNRGSSGGRRTSTGGRYDEEVVNSEYVTYTVHMPPTPDHNPISASQTSLNEDDKNLGKPERSFISGTIFTGGFNSVTRGHVLECSMERKETMKSGILCGMKGCDEKAMQGKVLRGGPCECGFKICRECYLDCVGSGGGHCPGCKEPYKDVNDDDGSSYDDDEPRSEAEDQALPLPSMADFKPDKRLSLVKSFKAPNHDFDHTRWLYETKGTYGYGNAVWPKDGYGFGSGVNGFEHPPDFGEKTRRPLTRKVNVSAAIISPYRLLVLLRLVALGFFLTWRIRHPNRDAMWLWGMSITCELWFALSWILDQLPKLCPINRVTDLSVLKDRFESPNLRNPKGRSDLPGIDVFVSTADPEKEPPLVTANTILSILAVDYPVEKLACYLSDDGGSLLTFEALAETASFARTWVPFCRKHGIEPRNPEAYFGQKRDFLKNKVRLDFVRERRRVKREYDEFKVRINSLPESIRRRSDAYNAHEELRAKKKQMEMGGNLSEPIKVPKATWMADGSHWPGTWSSAETDHSRGDHAGIIQAMLAPPNAEPVFGAEADGENLIDTTEVDIRLPMLVYVSREKRPGYDHNKKAGAMNALVRTSAIMSNGPFILNLDCDHYIYNSLALREGMCFMLDRGGDRICYVQFPQRFEGIDPNDRYANHNTVFFDVSMRALDGLQGPMYVGTGCVFRRIALYGFSPPRATEHHGWFGRRKIKPLQDLQGKGSHGRPAGSLAVPREPLDAATVAEAISVISCFYEDKTEWGKRVGWIYGSVTEDVVTGYRMHNRGWRSVYCVTKRDAFRGTAPINLTDRLHQVLRWATGSVEIFFSRNNALFASRRMKFLQRVAYFNVGMYPFTSLFLIVYCFLPAVSLFTGQFIVQTLSVTFLVFLLMITLTLCFLAILEIKWSGITLHDWWRNEQFWLIGGTSAHPAAVMQGLLKVIAGVDISFTLTSKSATPEDGDDEFAELYVVKWSFLMVPPITIMMINMIAIAVGVARTLYSTFPQWSKLVGGVFFSFWVLCHLYPFAKGLMGRRRRVPTIVFVWSGLLSIIISLLWVYISPPSGRQDYMKFQFP

SEQ ID NO: 9839 - protein, 382 aa, Moorella thermoacetica ATCC 39073
MAKRDYYEVLGVSRDASEAEIKKAYRQLARKYHPDMNPGDKEAEEKFKEVQEAYEVLSNAEKRARYDQFGHAGTEAGGGPGFGGFDFGGAGADFGFGDIFDMFFGGGFGGAARRQGPQRGDDLRLDLEISFEEAAFGVEKEVGIPRQEKCPECGGSGAAPGTHPKTCPTCHGTGQIRIAQRTPLGQFQTIRTCHQCHGQGTIIETPCPRCRGRGVVQRTRKIRVKIPPGVDTGARLRMAGEGESGLRGGPPGDLYIYINVRPHKLFRRDGYDVFCEVPVSMVQAALGDSIKVPTLDGKEELHIPPGTQSGTSFRLKGKGIPRLNGVGRGDQHVRIHVETPTNLNEKQKELLREFARLYGSEPRGAREQDKGFFRKVKDAFMG

SEQ ID NO: 9840 - protein, 353 aa, Oryza sativa Japonica Group
MAPRCLAALAPLAVLLLLSSCLAAAPATAQQSSSIGDTVVFWGRNKAEGSLREACDTGLYNTVIISFLSAFGRGSYKLDLSGHPVVPVGGDIKYCQSKGKTVLLAIGGQGGEYYLPSSQAAADLDDYLWNAFLGGGRSGVARPFGDAVVNGIDFFIDQGATEHYDELARLLHGHSNGGVMLTATARCVFPDQRQQAALATGLFSRIHVKLFNDGRCTWGRRESLEKWAAAYPDSRIYVSIVASPEADRDAYMSHKDLYFDVLQFINKLPNYGGIMVWNRYWDKKTGYINDPVAVPLSRLLLRDVDDDDETSGGDSYDNDELRRQPAPPTTTRRRRRPGAAPPDLGFHLGFSFF

SEQ ID NO: 9841 - protein, 1164 aa, Arabidopsis thaliana
  misc_feature (470)..(470): Xaa can be any naturally occurring amino acid
MVSGGGSKTSGGEAASSGHRRSRHTSAAEQAQSSANKALRSQNQQPQNHGGGTESTNKAIQQYTVDARLHAVFEQSGESGKSFDYSQSLKTAPYDSSVPEQQITAYLSRIQRGGYTQPFGCLIAVEESTFTIIGYSENAREMLGLMSQSVPSIEDKSEVLTIGTDLRSLFKSSSYLLLERAFVAREITLLNPIWIHSNNTGKPFYAILHRVDVEILIDLEPARTEDPALSIAGAVQSQKLAVRAISHLQSLPSGDIKLLCDTVVESVRDLTGYDRVMVYKFHEDEHGEVVAESKRNDLEPYIGLHYPATDIPQASRFLFKQNRVRMIVDCYASPVRVVQDDRLTQSICLVGSTLRAPHGCHAQYMTNMGSIASLAMAVIINGNEEDGNGVNTGGRNSMRLWGLVVCHHTSARCIPFPLRYACEFLMQAFGLQLNMELQLALQVSEKRVLRMQTLLCDMLLRDSPAGIVTXRPSIMDLVKCNGAAFLYQGKYYSLGVTPTDSQINDIVEWLLANHSDSTGLSTDSLGDAGYPRAAALGDAVCGMAVACITKRDFLFWFRSHTEKEIKWGGAKHHPEDKDDGQRMNPRSSFQAFLEVVKSRCQPWETAEMDAIHSLQLILRDSFKESEAMDSKAAAAGAVQPHGDDMVQQGMQEIGAVAREMVRLIETATVPIFAVDIDGCINGWNAKIAELTGLSVEDAMGKSLVRELIYKEYKETVDRLLSSALKGDEGKNVEVKLKTFGSELQGKAMFVVVNACSSKDYLNNIVGVCFVGQDVTGHKIVMDKFINIQGDYKAIIHSPNPLIPPIFAADENTCCLEWNTAMEKLTGWPRSEVIGKLLVREVFGSYCRLKGPDALTKFMIVLHNAIGGQDTDKFPFPFFDRKGEFIQALLTLNKRVSVDGKIIGAFCFLQIPSPELQQALEVQRRQESEYFSRRKELAYIFQVIKNPLSGLRFTNSLLEDTDLNEDQKQLLETSVSCEKQISKIVGDMDVKSIDDGSFLLERTEFFIGNVTNAVVSQVMLVVRERNLQLIRNIPTEVKSMAVYGDQIRLQQVLAEFLLSIVRYAPMEGSVELHLCPTLNQMADGFSAVRLEFRMACAGEGVPPEKVQDMFHSSRWTSPEGLGLSVCRKILKLMNGGVQYIREFERSYFLIVIELPVPLMMMMPSS

SEQ ID NO: 9842 - protein, 286 aa, Triticum aestivum
MVRAACSARWSGVEWLVQSAIPKGHKTLTKFVNNGSSNVFYAHDYNATVEFYWAPFLVESNSDNPKVHSVPDRVIQWHSIAKHAKNWVGVDYLVFNTYIWWLSALDMKVLKKGSFDEGATEYEEVDRPVAYSEVLKTWAKWVDRNIDPNSTTVFFMGMSPNHITPEAWGNEGGIKCAMETQPIANRSATLDVGTDWRLYAGAQDVLKTFRRVPVHFVDITALSELRKDAHTSVHTLRQGKLLTPEQQANPKTYADCIHWCLPGLPDTWNQFLYARIVSSASTQRQE

SEQ ID NO: 9843 - protein, 499 aa, Thalassiosira pseudonana CCMP1335; identical to SEQ ID NO: 6319

SEQ ID NO: 9844 - protein, 388 aa, Methanosarcina barkeri str. Fusaro
MATTRDYYDILGLSKDASSEDIKKTYRKLALKYHPDRNKEPGAEEKFKEISEAYAVLSDDEKRAQYDRFGHAGINGQYSAEDIFRGADFGGFGDIFEMFFGGGGRRGPMGPRRGSDLQYDLYITFEEAAFGVRKDIDIPRTERCSNCSGTGAKPGTSPKRCPTCGGTGQIRTTRSGLGMQFVSTTTCNTCHGRGQVIESPCPVCSGTGRVRNTRKITVNVPAGADSGMNLRLSGEGDSGEPGAPSGDLYVVLHVMEHPYFKRVDYDVISELPISFAQAALGTDIMVDTLHGKVKMNIPAGTQTHSVFRLKDKGIQRLHGSRKGDQLVRVVIKTPKKLTHEQKELLRQFEALSNGKNPNEDEKDRNEKSTEKSRKSKGFFEKVKDAFEG

SEQ ID NO: 9845 - protein, 1165 aa, Arabidopsis halleri
  misc_feature (585)..(585): Xaa can be any naturally occurring amino acid
MVSGGGSKTSGAEAASSGHRVNRSRHTSAEQAQSSASKAQRSQNQQPQNHGAGTESTSKAIQQYTVDARLHAVFEQSGESGKSFDYSQSLKTAPYDPSVPEQQITAYLSRIQRGGYTQPFGCLIAVEESTFTIIGYSENAREMLGLMSQSVPSIEEISEVLTIGTDLRSLFKSSSIVLLERAFVAREITLLNPIWIHSKNTGKPFYAILHRVDVGILIDLEPARTEDPALSIAGAVQSQKLAVRAISHLQSLPGGDIKLLCDTVVDSVRDLTGYDRVMVYKFHEDEHGEVVAESKRDDLEPYIGLHYPATDIPQASRFLFKQNRVRMIVDCYASPVRVVQDDRLTQSICLVGSTLRAPHGCHAQYMTNMGSIASLAMAIIINGNEEDGNGVNTGGRNSMRLWGLVVCHHTSARCIPFPLRCACEFLMQAFGLQLNMELQLALQVSEKRVLRMQTLLCDMLLRDSPTGIVTQRPSIMDLVKCNGAAFLYQGKYYSLGVAPTEAQINDIVEWLLANHSDSTGLSTDSLGDAGYPRAAALGDAVCGMAVACITKRDFLFWFRSHTEKEIKWGGAKHHPEDKDDGQRMXPRASFQAFLEVVKSRCQPWETAEMDAIHSLQLILRDSFKESEAMDSKASAPGGVQPHGDDMAEQGLQEIGTVAREMIRLIETATVPIFAVDIDGCINGWNAKIAELTGLSVEEAMGKSLVRDLIYKEYEETADRLLSCALKGDEGKNVEVKLKTFAPELQGKAVFVVVNACSSKDYLNNIVGVCFVGQDVTGHKIVMDKFINIQGDYKAIIHSPNPLIPPIFAADENTCCIEWNTAMEKLTGWPRSEVIGKLLVREVFGSCCRLKGPDALTKFMIVLHNAIGGQETDKFPFPFFDREGKFIQALLTLNKRVSVDGKIIGAFCFLQIPSPELQQALEVQRRQESEYFSRRKELAYIFQFIKNPLSGLRFTNSLLEATDLNEDQKQLLETSVSCEKQISKIVGEMDVISIGDGSFLLERTEFFIGSVINAVVSQVIFVVRERNIQLIRNIPAEIKSMAVYGDQIRLQQVLAEFLLSIVRYAPLEGSVELHLCPVLKQMADGFSAIRLEFRMACAGEGVPPEKVQDMFHSSRWTSPEGLGLSVCRKILKLMNGGVQYIREFERSYFLIVIELPVPLMMMMPSS

SEQ ID NO: 9846 - protein, 1045 aa, Cleome hassleriana
GESGKSFDYSRSLKTTTYGSSVPEKQITAYLSKIQRGGYIQPFGCMIAVDESTFKIISYSENAREMLGLMPQSVPSIEKPEILAIGTDVRSLFTPSSTVLLERAFVAREITLLNPVWIHSKNTGKPFYAILHRIDVGIVIDLEPARTEDPALSIAGAVQSQKLAVRAISQLQSLPGGDIKLLCDTVVESVRDLTGYDRVMVYKFHEDEHGEVVAESKRADLEPYIGLHYPATDIPQASRFLFKQNRVRMIVDCHATPVCVIQDERLTQPLCLVGSTLRAPHGCHAQYMANMGSLASLAMAVIINGNEEEAGSVAGGRNSMRLWGLVVCHHTSARCIPFPLRYACEFLMQAFGLQLNMELQLALQMSEKRVLRTQTLLCDMLLRDSPTGIVTQKPSIMDLVKCDGAAFLYQGRYYPLGVAPSEAQIKDIVEWLLANHGDSTGLSTDSLADAGYPGAATLGDAVCGMAVAYITRKDFLFWFRSHTAKEIKWGGAKHHPEDKDDSQRMHPRSSFKAFLEVVKSRSLPWENAEMDAIHSLQLILRDSFKESETVNTRVAVRADQPGGDMAVQGLDELSAVAREMVRLIETATVPILAVDVEGRINGWNGKIAELTGLSVEEAMGKSLVRDLIYKEYEETVEKLLSHALRGEEDKNVEIKMKTFSRELEGQAVFVVVNACSSKDYLNNIVGVCFVGQDVTGQKIVMDKFIHIQGDYKAIVHSPNPLIPPIFAADENTCCLEWNTAMEKLTGWSRAEVIGKMLVGEVFGSCCRLKGPDTLTKFMIVLHNAIGGEETDKFSFPFFDRNGKFVQALLTANKRVSIDGKITGAFCFMQIPSPELQQALAVQRQQETECISRAKELAYICQVIKNPLSGLRFTNLLLEATGLSEDQKQLLETSVSCEKQISRIIGDMNLETIEDGLVEVEKEEFIMGSVINAVVSQVMMLVRERGLQLIRDIPEEIKTMAVYGDQMRIQQVLAEFLLSIIKYAPSQGWVEIHLNPILKHLPDGSSSLRSEFRMACGGEGLPPELVRDMFHGSRWTTPEGLGLSVC

SEQ ID NO: 9847 - protein, 1146 aa, Populus tremula
MASQSQRQSNQPAHNQVQSSGTSNMRQHHHPTESVSKAIAQYTVDAQLHAVFEQSGGTGKSFDYSKSVRTPNQSVPEEQITAYLSKIQRGGHIQPFGCMIAADEQSFRVIAYSENAKDMLGLTPQSVPSLEKQEILFVGADVRILFRPSSAVLLEKAFGAREITLLNPIWIHSKNSGKPFYAILHRIDVGIVIDLEPARTEDPALSIAGAVQSQKLAVRAISQLQSLPGGDIKLLCDTVVDSVRELTGYDRVMVYKFHEDEHGEVVAENKRVDLEPYIGLHYPSTDIPQASRFLFKQNRVRMIVDCHAIPVSVIQDEGLMQPLCLVGSTLRAPHGCHAQYMENMGSIASLAMAVIIYGNDEEAIGGRNSMRLWGLVVCHHTSARCIPFPLRYACEFLMQAFGLQLNMELQLASQLLEKHVLRTQTLLCDMLLRDSPTGIVTQSPSIMDLVKCDGAALYYQGQYYPLGVTPTEAQIKDIVEWLLTLHGDPTGLSTDSLADAGYPGAAFLGDAVCGMAVAYIAERDFLFWFRSHTAKEVKWGGAKHHPEDKDDGQRMHPRSSFKAFLEVVKSRSLPWENAEMDAIHSLQLILRDSFRDAEATNSKAVVHNQLKDMELQGMDELSSVAREMVRLIETATAPIFAVDVDGRINGWNAKVAELTGLSVEEAMGKSLVHDLVYKEYEEIVDKLIHRAVKGEEDKNVEIKLRTFCSEHQKKAVFVVVNACSSKDYMDNIVGVCFVGQDVTGQKVVMDKYVLIQGDYKAIVHSPNPSIPPIFASDENTCCLEWNTALEKLTGWSRGEVVGKMLVGEVFGSCCKLKGPDALTKFMIALHNAIGGIDTDKLPFSFFDRNEKNVQTLLTANKRVNMKGDIIGAFCFLQIASPELQPSLKVQKQQEKKSFARMKELAYICQEIKNPLSGIHFTNSLLENTDLTEDQQQFLETSAACEKQILKIIRDIDLESIENGSLELEKAEFLLGSVINAVVSQAMLLLRERNLQLLRDIPEEIKTLAVYGDQARIQQVLADFLLNMVRYAPSSAGWVEIHVCPTLKQISDGHTLVHTEFRYLERVLQTRMLGLQHPLRSFLNCKLTLVMLHREGMVPKIQFQGLSVCQGRLIWLSFPENTTVALYPLTIWFLLLHRHQSRSITHT

SEQ ID NO: 9848 - protein, 209 aa, Schizosaccharomyces pombe
MLKLFRLPLAASVDDESTERNLESHKKQAKLILKRLSPTSEKRASIESGDYTFHYLIDNGICYLCICEQSYPRKLAFSYLEELAGEFWNSFGEEALQPGLRPYAFVQFDTFMQKSKRVYNTPRANDNLDKLNTELKDVTRVMTKNIEDLLYRGDSLEKMADLSSDLRYSSAKYKKAARRVNLEALWRQYGPVSIIALLFLIFVYWRFFA

SEQ ID NO: 9849 - protein, 1146 aa, Populus tremula
MASQSQRQSNQPAHNQAQSSGTSNMRQHHHPTESVSKAIAQYTVDAQLHAVFEQSGGTGKSFDYSKSVRTPNQSVPEEQITAYLSKIQRGGHIQPFGCMIAADEQSFRVIAYSENAKDMLGLTPQSVPSLEKQEILFVGADVRILFRPSSAVLLEKAFGAREITLLNPIWIHSKNSGKPFYAILHRIDVGIVIDLEPARTEDSALSIAGAVQSQKLAVRAISQLQSLPGGDIKLLCDTVVDSVRELTGYDRVMVYKFHEDEHGEVVAENKRVDLEPYIGLHYPSTDIPQASRFLFKQNRVRMIVDCHAIPVSVIQDEGLMQPLCLVGSTLRAPHGCHAQYMENMGSIASLAMAVIIYGNDEEAIGGRNSMRLWGLVVCHHTSARCIPFPLRYACEFLMQAFGLQLNMELQLASQLLEKHVLRTQTLLCDMLLRDSPTGIVTQSPSIMDLVKCDGAALYYQGQYYPLGVTPTEAQIKDIVEWLLTLHGDPTGLSTDSLADAGYPGAAFLGDAVCGMAVAYIAERDFLFWFRSHTAKEVKWGGAKHHPEDKDDGQRMHPRSSFKAFLEVVKSRSLPWENAEMDAIHSLQLILRDSFRDAEATNSKAVVHNQLKDMELQGMDELSSVAREMVRLIETATAPIFAVDVEGRINGWNAKVAELTGLSVEEAMGKSLVHDLVYKEYEEIVDKLIHRAVKGEEDKNVEIKLRTFCSEHQKKAVFVVVNACSSKDYMDNIVGVCFVGQDVTGQKVVMDKYVLIQGDYKAIVHSPNPSIPPIFASDENTCCLEWNTAMEKLTGWSRGEVVGKMLVGEVFGSCCRLKGPDALTKFMIALHNAIGGIDTDKLPFSFFDRNEKNVQTLLTANKRVNMKGDIIGAFCFLQIASPELQPSLKVQKQQEKKSFARMKELAYICQEIKNPLSGIHFTNSLLENTDLTEDQQQFLETSAACEKQILKIIRDIDLESIENGSLELEKAEFLLGSVINAVVSQAMLLLRERNLQLLRDIPEEIKTLAVYGDQARIQQVLADFLLNMVRYAPSSAGWVEIHVCPTLKQISDGHTLVHTEFRYLERVLQTRMLGLQHPLRSFLNCKLTLVMLHREGMVPKIQFQGLSVCQGRLIWLSFPENTTVALYPLTIWFLLLHRHQSRSITHT

SEQ ID NO: 9850 - protein, 465 aa, Oryza sativa; identical to SEQ ID NO: 6326

SEQ ID NO: 9851 - protein, 1146 aa, Populus tremula
MASQSQRQSNQPAHNQAQSSGTSNMRQHHHPTESVSKAIAQYTVDAQLHAVFEQSGGTGKSFDYSKSVRTPNQSVPEEQITAYLSKIQRGGHIQPFGCMIAADEQSFRVIAYSENAKDMLGLTPQSVPSLEKQEILFVGADVRILFRPSSAVLLEKAFGAREITLLNPIWIHSKNSGKPFYAILHRIDVGIVIDLEPARTEDPALSIAGAVQSQKLAVRAISQLQSLPGGDIKLLCDTVVDSVRELTGYDRVMVYKFHEDEHGEVVAENKRVDLEPYIGLHYPSTDIPQASRFLFKQNRVRMIVDCHAIPVSVIQDEGLMQPLCLVGSTLRAPHGCHAQYMENMGSIASLAMAVIIYGNDEEAIGGRNSMRLWGLVVCHHTSARCIPFPLRYACEFLMQAFGLQLNMELQLASQLLEKHVLRTQTLLCDMLLRDSPTGIVTQSPSIMDLVKCDGAALYYQGQYYPLGVTPTEAQIKDIVEWLLTLHGDPTGLSTDSLADAGYPGAAFLGDAVCGMAVAYIAERDFLFWFRSHTAKEVKWGGAKHHPEDKDDGQRMHPRSSFKAFLEVVKSRSLPWENAEMDAIHSLQLILRDSFRDAEATNSKAVVHTQLKDMELQGMDELSSVAREMVRLIETATAPIFAVDVEGRINGWNAKVAELTGLSVEEAMGKSLVHDLVYKEYEEIVDKLIHRAVKGEEDKNVEIKLRTFCSEHQKKAVFVVVNACSSKDYMDNIVGVCFVGQDVTGQKVVMDKYVLIQGDYKAIVHSPNPSIPPIFASDENTCCLEWNTAMEKLTGWSRGEVVGKMLVGEVFGSCCRLKGPDALTKFMIALHNAIGGIDTDKLPFSFFDRNEKNVQTLLTANKRVNMKGDIIGAFCFLQIASPELQPSLKVQKQQEKKSFARMKELAYICQEIKNPLSGIHFTNSLLENTDLTEDQQQFLETSAACEKQILKIIRDIDLESIENGSLELEKAEFLLGSVINAVVSQAMLLLRERNLQLLRDIPEEIKTLAVYGDQARIQQVLADFLLNMVRYAPSSAGWVEIHVCPTLKQISDGHTLVHTEFRYLERVLQTRMLGLQHPLRSFLNCKLTLVMLHREGMVPKIQFQGLSVCQGRLIWLSFPENTTVALYPLTIWFLLLHRHQSRSITHT

SEQ ID NO: 9852 - protein, 113 aa, Zea mays
  misc_feature (66)..(66): Xaa can be any naturally occurring amino acid
  misc_feature (75)..(75): Xaa can be any naturally occurring amino acid
MDGCGEKSDAGVGLYAVLGVASDCSDEELRTAYRRLSMKWHPDKCGSASSGVSEAAKVSLQKIQAXYAVLSDTNXRILYDAGAYDSDGDDDGAGDILRDILNAMNHTPSHVDG

SEQ ID NO: 9853 - protein, 1146 aa, Populus tremula
MASQSQRQSNQPAHNQAQSSGTSNMRQHHHPTESVSKAIAQYTVDAQLHAVFEQSGGTGKSFDYSKSVRTPNQSVPEEQITAYLSKIQRGGHIQPFGCMIAADEQSFRVIAYSENAKDMLGLTPQSVPSLEKQEILFVGADVRILFRPSSAVLLEKAFGAREITLLNPIWIHSKNSGKPFYAILHRIDVGIVIDLEPARTEDPALSIAGAVQSQKLAVRAISQLQSLPGGDIKLLCDTVVDSVRELTGYDRVMVYKFHEDEHGEVVAENKRVDLEPYIGLHYPSTDIPQASRFLFKQNRVRMIVDCHAIPVSVIQDEGLMQPLCLVGSTLRAPHGCHAQYMENMGSIASLAMAVIIYGNDEEAIGGRNSMRLWGLVVCHHTSARCIPFPLRYACEFLMQAFGLQLNMELQLASQLLEKHVLRTQTLLCDMLLRDSPTGIVTQSPSIMDLVKCDGAALYYQGQYYPLGVTPTEAQIKDIVEWLLTLHGDPTGLSTDSLADAGYPGAAFLGDAVCGMAVAYIAERDFLFWFRSHPAKEVKWGGAKHHPEDKDDGQRMHPRSSFKAFLEVVKSRSLPWENAEMDAIHSLQLILRDSFRDAEATNSKAVVHTQLKDMELQGMDELSSVAREMVRLIETATAPIFAVDVDGRINGWNAKVAELTGLSVEEAMGKSLVHDLVYKEYEEIVDKLIHRAVKGEEDKNVEIKLRTFCSEHQKKAVFVVVNACSSKDYMDNIVGVCFVGQDVTGQKVVMDKYVLIQGDYKAIVHSPNPSIPPIFASDENTCCLEWNTAMEKLTGWSRGEVVGKMLVGEVFGSCCRLKGPDALTKFMIALHNAIGGIDTDKLPFSFFDRNEKNVQTLLTANKRVNIKGDIIGAFCFLQIASPELQPSLKVQKQQEKKSFARMKELAYICQEIKNPLSGIHFTNSLLENTGLTEDQQQFLETSAACEKQILKIIRDIDLESIENGSLELEKAEFLLGSVINAVVSQAMLLLRERNLQLLRDIPEEIKTLAVYGDQARIQQVLADFLLNMVRYAPSSAGWVEIHVCPTLKQISDGHTLVHTEFRYLERVLQTRMLGLQHPLRSFLNCKLTLVMLHREGMVPKIQFQGLSVCQGRLIWLSFPENTTVALYPLTIWFLLLHRHQSRSITHT

SEQ ID NO: 9854 - protein, 1146 aa, Populus tremula
MASQSQRQSNQPAHNQAQSSGTSNMRQHHHPTESVSKAIAQYTVDAQLHAVFEQSGGTGKSFDYSKSVRTPNQSVPEEQITAYLSKIQRGGHIQPFGCMIAADEQSFRVIAYSENAKDMLGLTPQSVPSLEKQEILFVGADVRILFRPSSAVLLEKAFGAREITLLNPIWIHSKNSGKPFYAILHRIDVGIVIDLEPARTEDPALSIAGAVQSQKLAVRAISQLQSLPGGDIKLLCDTVVDSVRELTGYDRVMVYKFHEDEHGEVVAENKRVDLEPYIGLHYPSTDIPQASRFLFKQNRVRMIVDCHAIPVSVIQDEGLMQPLCLVGSTLRAPHGCHAQYMENMGSIASLAMAVIIYGNDEEAIGGRNSMRLWGLVVCHHTSARCIPFPLRYACEFLMQAFGLQLNMELQLASQLLEKHVLRTQTLLCDMLLRDSPTGIVTQSPSIMDLVKCDGAALYYQGQYYPLGVTPTEAQIKDIVEWLLTLHGDPTGLSTDSLADAGYPGAAFLGDAVCGMAVAYIAERDFLFWFRSHTAKEVKWGGAKHHPEDKDDGQRMHPRSSFKAFLEVVKSRSLPWENAEMDAIHSLQLILRDSFRDAEATNSKAVVHTQLKDMELQGMDELSSVAREMVRLIETATAPIFAVDVDGRINGWNAKVAELTGLSVEEAMGKSLVHDLVYKEYEEIVDKLIHRAVKGEEDKNVEIKLRTFCSEHQKKAVFVVVNACSSKDYMDNIVGVCFVGQDVTGQKVVMDKYVLIQGDYKAIVHSPNPSIPPIFASDENTCCLEWNTAMEKLTGWSRGEVVGKMLVGEVFGSCCRLKGPDALTKFMIALHNAIGGIDTDKLPFSFFDRNEKNVQTLLTANKRVNIKGDIIGAFCFLQIASPELQPSLKVQKQQEKKSFARMKELAYICQEIKNPLSGIHFTNSLLENTDLTEDQQQFLETSAACEKQILKIIRDIDLESIENGSLELEKAEFLLGSVINAVVSQAMLLLRERNLQLLRDIPEEIKTLAVYGDQARIQQVLADFLLNMVRYAPSSAGWVEIHVCPTLKQISDGHTLVHTEFRYLERVLQTRMLGLQHPLRSFLNCKLTLVMLHREGMVPKIQFQGLSVCQGRLIWLSFPENTTVALYPLTIWFLLLHRHQSRSITHT

SEQ ID NO: 9855 - protein, 330 aa, Cryptococcus curvatus
MVNNTEYYKTLGLSKDASEADIKKAYRKESLKWHPDKNPGDKRATAEEKFKKVGEAYEVLSDPEKRKIYDQFGEEGLKGGMPAGGGGGGPGFSSFGAGGAAPASPSTPTDPNDIFNAFFSQMGSGGGGGGDEYASFGGGGFPGGGTRRRAGRGGMGGMGGMGGMGGMPGMGGMGGMGGMPGGYARPEPPTPVAEIERPLPLSLEELYKGGTKRLKITRHMRNGRTNEKILEVAYKPGWKAGTKVTFAGAGNEDEYGRGQNIKFVIQEKEHPRFNAQGDDLVVQVNLTLSQALLGPEGGGPITKQIEQLDGRRIDVSIPADTSSSPERRPS

SEQ ID NO: 9856 - protein, 471 aa, Debaryomyces hansenii CBS767
MRNALNNLADTVQDSEKQSRFENEMDSFFALFRRYLTDKAAGSTLDWEKVKSPSPDEVVQYKSLSENGANNLDKLAVLKLNGGLGTSMGCVGPKSVIEVRDGNTFLDLSVRQIEHLNRKYDADVPLLLMNSFNTDADTEKIIKKYQGHRIRVKTFNQSRFPRIFKDSLLPVPQSFDDDLDSWYPPGHGDLFESLISSGELDSLLEQGREVLFVSNGDNLGATVDSKILDHMIDTGAEYIMELTDKTRADVKGGTLINYEGQVRLLEIAQVAKEHVEDFKSIKKFKYFNTNNLWINLRAIKKLVEADGIQAEIIPNQKTISKGSSDINVLQLETAVGAAIKHFNKAHGVVVPRSRFLPVKTCSDLLLVKSDLFFLEHGALKLDPVRDGFANPLIKLGSHFKKVSGFQSRIGHMPRILELDHLTITGNVTLGKNVTLKGTVIIVCNDGDKIDIPNGSILENVVVTGNLTILEH

SEQ ID NO: 9857 - protein, 169 aa, Pyrus pyrifolia
KVLLSIGGAAGSYSLTSADDARQVADYIWNNFLGGQSASRPLGDAVLDGVDFDIEAGGAQFYDELARALNGHNGQAKTVYLAAAPQCPIPDAHLDGAIQTGLFDYVWVQFYSNPPCQYADGNANALLNSWSQWASVPATQVFMGLPASTDAAGSGFIPADALKSQVLPT

SEQ ID NO: 9858 - protein, 408 aa, Vitis vinifera
  misc_feature (15)..(15): Xaa can be any naturally occurring amino acid
MPGHRSKSEKTDAGXQLRRDPYEVLGVLRNSTDQEIKSAYRKMALKYHPDKNANDPKAADMFKEVTFSYNILSDPDKRRQYDTAGFEAVESEGQELELDLSNLGAVNTMFAALFSKLGVPIKTTVSATVLEDALNGVVTVRPLTLGQPVVKKVEKQCAHFYSVTLTEEEAQTGFVCRVQSSDKSKFKLLYFDQEEGGGLNLSLQEDSARTGKVTSAGMYFLGFPVYRLDQTVNSMAAAKDPDSAFFKRLDGFQPCEMTELKAGTHVFAVYGDNFFKSVSYTIEALCTAPFAEEKENLRAVEAQILTKRVELSKFETEYREVLTQFTEMTSRYAQEMQAIDDLLKQRNEIHASYSSAPPIKRSRSKNRGLSKDSKDDGQVKDKKPAFRERPKKKKWYNIHLKVDKSKPC

SEQ ID NO: 9859 - protein, 169 aa, Pyrus pyrifolia
KVLLSIGGASGSYSLTSADDARQVADYIWNNFLGGQSASRPLGDAVLDGVDFDIEAGGGQFYDELARSLNGHNGQAKTVYLAAAPQCPIPDAHLDGAIQAGLFDYVWVQFYNNPPCQYADGNANALLNSWSQWASVPATQVFMGLPASTDAAGSGFIPADALKSQVLPT

SEQ ID NO: 9860 - protein, 473 aa, Hordeum vulgare
MAAAAVAADSKIDGLRDAVAKLGEISENEKAGFISLVSRYLSGEAEQIEWSKIQTPTDEVVVPYDTLAPPPEDLDAMKALLDKLVVLKLNGGLGTTMGCTGPKSVIEVRNGFTFLDLIVIQIESLNKKYGCSVPLLLMNSFNTHDDTQKIVEKYSNSNIEIHTFNQSQYPRIVTEDFLPLPSKGQTGKDGWYPPGHGDVFPSLNNSGKLDTLLSQGKEYVFVANSDNLGAIVDIKILNHLIHNQNEYCMEVTPKTLADVKGGTLISYEGRVQLLEIAQVPDEHVDEFKSIEKFKIFNTNNLWVNLKAIKRLVDAEALKMEIIPNPKEVDGVKVLQLETAAGAAIRFFEKAIGINVPRSRFLPVKATSDLLLVQSDLYTLVDGYVIRNPARVKPSNPSIELGPEFKKVANFLARFKSIPSIVELDSLKVSGDVSFGSGVVLKGNVTIAAKAGVKLEIPDGAVLENKDINGPEDI

SEQ ID NO: 9861 - protein, 471 aa, Pyrus pyrifolia
MAAVATGNVDKLKSDVASLSQISENEKNGFINLVSRYVSGEEAQHVEWSKIQTPTDEVVVPYDGLAPTPEDPEEIKKLLDKLVVLKLNGGLGTTMGCTGPKSVIEVRNGLTFLDLIVIQIENLNNKYGSCVPLLLMNSFNTHDDTQKIVEKYSKSNVQIHTFNQSQYPRLVVEDFSPLPSKGQTGKDGWYPPGHGDVFPSLKNSGKLDLLLSQGKEYVFIANSDNLGAVVDLKILHHLIQKKNEYCMEVTPKTLADVKGGTLISYEGRVQLLEIAQVPDQHVNEFKSIEKFKIFNTNNLWVNLNAIKRLVEADALKMEIIPNPKEVDGVKVLQLETAAGAAIRFFNHAIGINVPRSRFLPVKATSDLLLVQSDLYTLQDGFVTRNSARKNPENPTIELGPEFKKVGSYLSRFKSIPSILELESLKVSGDVWFGAGVVLKGKVTITAKSGVKLEIPDNAVIANKDINGPEDL

SEQ ID NO: 9862 - protein, 394 aa, Ammophila arenaria
EPASTEDPAVSIAGAVQSQKLAVRAISRLQALPGGDVNLLCDTVVEHVRELTGYDRVMVYKFHDDEHGEVLAESRRADLEPYLGLHYPATDIPQASRFLFRQNRVRMIADCHAAPVRVIQDPAMPQPLCLVGSTLRSPHGCHAQYMANMGSIASLVMAVIISSGGEDEHSMGRGAVPSAMKLWGLVVCHHTSPRCIPFPLRYACEFLMQAFGLQLNMELQLAHQLSEKHILRTQTLLCDMLLRDSPTGIVTQSPSIMDLVKCDGAALYYHGKYYPLGITPTEAQIKDIIEWLTVCHGETTGLSTDSLADAGYPGATALGDAVCGVAVAYITPSDYLFWFRSHTAKEIKWGGAKHHPEDKDDGQRMHPRSSFKAFLEVVKSRSLPWENAEMDAIH

SEQ ID NO: 9863 - protein, 293 aa, Oryza sativa Japonica Group; identical to SEQ ID NO: 8456

SEQ ID NO: 9864 - protein, 328 aa, Triticum aestivum
  misc_feature (64)..(64): Xaa can be any naturally occurring amino acid
  misc_feature (192)..(192): Xaa can be any naturally occurring amino acid
AAVTRKRLFFQAKLLKAKALLALKDYSNVISETGFILKEDEDNLDALLLRGRAYYYLADHDVAXQKGLRLDPEHSELKKAYFGLKKLLKKTKSAEDNAAKSKFRVAVEDYKAALAMDPDHTMYNVQLYLGLCKTLVKLGRGKEAINSCTEALSIDEELVDALAQRGEAKLLTEDWEGAVEDLKEGCPEIPTXDMAIREALMKAERQLKLSKRKDWYKILGISKTASAADIKRAYKRLALQWHPDKNVENREEAENMFREIASAYEVLSDEDKRVRYDRGEDLEEMGMGGGGGGGFDPFGGGGGQQYTFHHGGGFPGGGFPGGFQFNFG

SEQ ID NO: 9865 - protein, 394 aa, Anisopogon avenaceus
EPARTEDPALSIAGAVQSQKLAVRAISRLQALPGGDVKLLCDTVVEHVRELTGYDRVMVYKFHDDEHGEVLAESRRADLEPYLGLHYPATDIPRASRFLFRQNRVRMIADCHAAPVRVIQDPAMPQPLCLVGSTLRSPHGCHAQYMTNMGSIASLVMAVIISSGGDQDHNIARGAIPSAMKLWGLVVCHHTAPRCIPFPLRYACEFLMQAFGLQLNMELQLAQHLSQNLILTTQTLLCDMLLRDSPTGIVPQSRSIMDLVKCDGAALYYHGKYYPLGVTPTEAQILDIIEWLTVCHGDSTGLSTDSLADAGYPGAASLGDAVCGMAVAYITPSDHLFWFQSHTAKEIKWGGAKHHPEDKDDGQRMHPRSSFKAFLEVVKSRSLPWENAEMDAIH

SEQ ID NO: 9866 - protein, 156 aa, Physcomitrella patens subsp. patens
GRKPRGRPPGSKNKPKPPIIIMRENGQAMRPHILEVAGGCDVSDSVASFSRRRQRGVCVMGASGTVSNVTLRQPTTAGATITFHGRFEIISLSGAFLPHPSSQPTTGLTVSLAGAAGQVLGGSVVGTLMAAGPVVVIAASFMGPTFVRLPLDADDE

SEQ ID NO: 9867 - protein, 329 aa, Bradyrhizobium japonicum
MTKYKLEYIWLDGYTPTPNLRGKTQIKEFASFPTLEHVPLWGFDGSSTQQAEGHSSDCVLKPVAVFPDAARTNGVLVMCEVMMPDGKTPHASNKRATILDDAGAWFGFEQEYFFYKDGRPLGFPTSGYPAPQGPYYTGVGFSNVGDVARKIVEEHLDLCLAAGINHEGINAEVAKGQWEFQIFGKGSKKAADEMWMARYLMLRLTEKYGIDIEFHCKPLGDTDWNGSGMHANFSTEYMRTVGGKEYFEALMAAFDKNLMDHIAVYGPDNDKRLTGKHETAPWNKFSYGVADRGASIRVPHSFVNNGYKGYLEDRRPNSQGDPYQIVRRS

SEQ ID NO: 9868 - protein, 394 aa, Anomochloa marantoidea
EPARTEDPALSIAGAVQSQKLAVRAISRLQALPGGDVKLLCDTVVEHVRELTGYDRVMVYKFHDDEHGEVVAESRRADLEPYLGLHYPATDIPQASRFLFRQNRVRMIADCHAAPVRVIQNPSLTQPLCLVGSTLRAPHECHAQYMANMGSIASLAMAVIISSSGDDENNVGRCGISSTMKLWGLVVCHHTSPRCIPFPLRYACEFLMQAFGLQLNMELQLAHQLSEKHILRTQTLLCDMLLRDSPTGIATQSPSIMDLVKCDGAALYYHGKYYPLGVTPTESQIKDIIEWLGMCHGDSTGLSTDSLADAGYPGAASLGDAVSGMAVAYITPNDYLFWFRSHTAKEIKWGGAKHHPDDKDDGQRMHPRSSFKAFLEVVKSRSLPWENAEMDAIH

SEQ ID NO: 9869 - protein, 337 aa, Arabidopsis thaliana; identical to SEQ ID NO: 8602

SEQ ID NO: 9870 - protein, 304 aa, Aristida purpurea var. longiseta
QYMANMGSIASLVMAVIISSGGDDEQLGRGGISSAMKLWGLVVCHHTSPRFIPFPLRYACEFLMQAFGLQLNMELQLAHQLSEKHILRTQTLLCDMLLRDSPTGIVAQSPSIMDLVKCDGAALYYHGKYYPLGVTPTESQIKDIIEWLMLCHGDSTGLSTDSLADAGYHGAAALGDAVCGMAVAYITPSDYLFWFRSHTAKEIKWGGAKHHPEDKDDGQRMHPRSSFKAFLEVVKSRSLPWENAEMDAIHSLQLILRDSFRDAAEGTSNSKAMVNGQVQLGELELRGINELSSVAREMVRLIET

SEQ ID NO: 9871 - protein, 473 aa, Oryza sativa
MAHAVESMEKLRAAVDEDKDSFMHLVSRYLIREEKEMIDWNKVERPTPEMVVPYDSLVQAPRDIPEIRNLLNKLAVLKLNGGLGTTMECVAPKCTIEVRSGLTFLDLAIMQTEFLNKKYGCSVPILLMNSFNTSLVNKIVEKYTNIEIHTFNQNKYPRIITEKFLPLSSEGSTGSHCWYPPGHGDVFFSLCKSGILDTMLSQYNILINVSWLASEIESLTSTEILNHLIHNKNEYCMEVTPKTSADVKGGSLICYEGLSCNVKFVANHHVDEFQSIENFNMLNTNNLRVNLKAIKRLVKAEALKMEIIPNLKEVDGVKVLQLEKEAGSAIQCFEKAIGVTVPRSRFLAVKNTSDLFLILSDLYIVMDGTVTRNPARDNSTNPLIDLGPEFRKVDSFLDRFKSIPSIVALDSLKISGDVWFGSRITLKGEVTIAAQLGLKLDILDGSVFDNKVKVHLWIIICFVVILETVLLFQ

SEQ ID NO: 9872 - protein, 393 aa, Arundinella hirta
EPARTEDPALSIAGAVQSQKLAVRAISRLQALPGGDVKLLCDTVVEHVRELTGYDRVMVYRFHEDEHGEVVAENRRDNLEPYLGLHYPATDIPQASRFLFRQNRVRMIADCHATPVRVIQDPGLSQQLCLVGSTLRAPHGCHAQYMANMGSIASLVMAVIISSGGDDEQTGRGGISSAMKLWGLVVCHHTSPRCIPFPLRYACEFLMQAFGLQLNMELQLAHQLSEKHILRTQTLLCDMLLRDSPTGIVTQSPSIMDLVKCDGAALYYHGKYYPLGVTPTESQIKDIIEWLTVCHGDSTGLSTDSLADAGYLGAVALGDAVCGMTVAYITPSDYLFWFRSHTAKEIKWGGAKHHPEDKDDGQRMHPRSSFKAFLEVVKSRSLPWENAEMDAIH

SEQ ID NO: 9873 - protein, 297 aa, Oryza sativa Japonica Group; identical to SEQ ID NO: 9334

SEQ ID NO: 9874 - protein, 213 aa, Zea mays
MPHLAAAAAVPAARPTEAGRVAFRRHWSTPLPEPPRLRLRLRTRARGVRREDGGGVRTEEQEQSQTQTAPRTFYELLGISSRGSPDDVRAAYRRMALMYHPDVSPPGAAAENTRRFIEVQEAYETLSDPSRRASYDRALARGVCRIGFSGRRSQSHRAYCHHQEQEDKSCWRRSWEDQVAELQRRSMAEDSEENLSWGARMRRRRAEASSAAE

SEQ ID NO: 9875 - protein, 488 aa, Saccharomyces cerevisiae
TYAFESNTNSVAASQMRNALNKLADSSKLDDAARAKFENELDSFFTLFRRYLVEKSSRTTLEWDKIKSPNPDEVVKYEIISQQPENVSNLSKLAVLKLNGGLGTSMGCVGPKSVIEVREGNTFLDLSVRQIEYLNRQYDSDVPLLLMNSFNTDKDTEHLIKKYSANRIRIRSFNQSRFPRVYKDSLLPVPTEYDSPLDAWYPPGHGDLFESLHVSGELDALIAQGREILFVSNGDNLGATVDLKILNHMIETGAEYIMELTDKTRADVKGGTLISYDGQVRLLEVAQVPKEHIDEFKNIRKFTNFNTNNLWINLKAVKRLIESSNLEMEIIPNQKTITRDGHEINVLQLETACGAAIRHFDGAHGVVVPRSRFLPVKTCSDLLLVKSDLFRLEHGSLKLDPSRFGPNPLIKLGSHFKKVSGFNARIPHIPKIVELDHLTITGNVFLGKDVTLRGTVIIVCSDGHKIDIPNGSILENVVVTGNLQILEH

SEQ ID NO: 9876 - protein, 123 aa, Zea mays
SPSIVAFTHRFYIATSLIVEEDTEDLFFDHAIGINVPRSRFLPVKATSDLKLVQSDLYTLVDGFVTRNSARTNPSNPSIELGPEFKKVGSFLGRFKSIPSIVELDILKVSGDVWFGSGIVLKG

SEQ ID NO: 9877 - protein, 466 aa, Coprinopsis cinerea okayama7#130
MPQRLVAHKFSSFVAFYSCSRQLGVRNFITLHSRRPYERHVPAIGRVKSLGSKRRFHASNPISAPKNPYEVLGVKKDATAADIKKAYFSLARKWHPDTNPDKDAREKFVEIQEAYDTLKDDKKRAAYDQYGSTSQQPGFDPDAFARAGFGGFGGGQFRGGFRAGGFQDFSDIFGAGMGRGGQGNIFEELFTQFGQGGRGPRASANVRGSDIETTIGIDFLDACKGTKKSVTVQPVVNCHTCSGSGLRKGAKRTTCGECGGSGQRTFVIDNGFHMATTCGACDGVGSTVGRGDQCSPCGGAGKVRVKKQVQVDIPAGVEDGMTIRVPNAGDAPITGSGPVGDLLVRIHVKPSSVFRRQGNNLYYKANIPFYSALLGGRVRVPTLNGDVDVRVPGGTQPDEEMVLKGRGVPSVYGSGSGDLFVRFSVSIPRKNVIIHIHLLQFLVFDLIFEFDLTIFILPKQIYFAKV

SEQ ID NO: 9878 - protein, 375 aa, Clostridium tetani E88
MPKKDFYEVLGVEKGANDAEIKKAFRKLALKYHPDKNAGNKEAEERFKEINEAYQVLSDPQKRAQYDQFGTADFNGGGAGFSGFEDFDLGDIFESFFGGGFGGFGGSSRRRNGPQKGPDVQYSINLTFNEAVFGVEKEVSITKSETCETCTGTGAKPGTNSKTCPKCNGSGQIKVQRNTALGSFVSVNTCDMCGGKGTIISDPCSDCKGKGTVRKQKKIKVNIPAGVDTGNVIPIRGQGEAGVNGGPPGDLYISVRVMPDPFFKRRGDDIYIDQHISFAKASLGTELKVKTIDGEVKYDIPSGTQPGTVFRLKGKGVPHVNGRGRGDQYVNIIVDIPKSLNQKQKEALFAYMEASGEIQSSEKEGFFDKIKKNFK

SEQ ID NO: 9879 - protein, 312 aa, Zea mays
  misc_feature (252)..(252): Xaa can be any naturally occurring amino acid
MAFRRPSCVILGALLAVSFLAATAAACDHGLTVFWGRNKDEGSLGEACDTGIYNTVIISFYSVFGHGKYWGDLSGHPLYGIGADIKQCRGKGIVVLLSIGGGGTQYSLPSSQSAADVADNLWNAHLGGGRRGVFRPFGDAVLDGIDFFIDQGAPDHYDELARRLSGYNRYYRGAPGVRLTATARCVYPDWHVQRALDTGLFERIHVRFYGEDRCSYNHVYKDGVMAQWSKWTARYPRSKVYIGLPAANVPGXNDKVGLPSMNYDLMPSVKQAANYGGVIIFRFVCLDSTPTMSLFPEKTMGRFLFSYDEFPF

SEQ ID NO: 9880 - protein, 252 aa, Oryza sativa Japonica Group; identical to SEQ ID NO: 1484

SEQ ID NO: 9881 - protein, 224 aa, Zea mays
  misc_feature (45)..(46): Xaa can be any naturally occurring amino acid
  misc_feature (134)..(136): Xaa can be any naturally occurring amino acid
  misc_feature (142)..(143): Xaa can be any naturally occurring amino acid
MLPFKVLVTFSPRGSSRGSSERNRKEGRLIRVKEAMEHKEAGCQXXEGPILCINNCGFFGSAATMNMCSKCHKEMITKQDQAKLAASSIDSIVNGSDAVMEPVVAGSNTVVAVAQVELQTMNVQQPADVAGPSXXXAAISKXXKVGPNRCSACRKRVGLTGFNCRCGNLYCALHRYSDKHDCKFDYRTAARDAIAKANPVVKADKLDKISYFPTVGCQEDCKPR

SEQ ID NO: 9882 - protein, 134 aa, Oryza sativa Japonica Group; identical to SEQ ID NO: 2655

SEQ ID NO: 9883 - protein, 663 aa, Clavibacter michiganensis subsp. sepedonicus
MSRNAHRAPTTGRSPLRFAFIRLLAVVTAILGLNYIIWRLLFSVNTEALWIAIPLVLAETYSLIDSLLFGLTMWRARDRPKPPAPQPGLTVDVFIATYNEPLDLVMETARAAQRITYPHKTWVLDDGNRTELRDLAEAERIGWITRSADWSGRARHAKAGNLNNALLTTEGEFMLILDADQVPVPEILDKTLGYFDDRRMAIVQTPQVFVNVPDSDPLGSQAPLFYGPIQQGKDGWNAAFFCGSNAILRREALMLLGVSRYVTDIEITVFRALRTAGDVIDKAREELEPDQLELRKALDDVAYDVRRARAGLRRGQRLADVTYRFQKRVDSIAARMVQDDMAALNADLAEIAALAGRHSAARDAVSLVDDTAMARLSERNWSPLGALDAVRAIVRDIDVHRDDDAQSIMPLATISVTEDMATCMRLHGLGWKSAYHDEVLAYGLAPEDLPTMLTQRLRWAQGTIQVFFRENPLLQKALSIPQRLMYFATMWSYFSGFTAVVYVAAPIIYLTFGVLPVQAISTDFFIRLIPFLLVNQLLFAVVGRGKRTWRGQQYSLALFPVWISSVTTAVANVFFRKPLDFAVTPKVRAASGKPRWDLVKPQLYVMGALIVASAIGLLRLGVGQATPLGTFTNLAWVVFDLAIFSIIIRAARYRGFTPAKEDA

SEQ ID NO: 9884 - protein, 55 aa, Adenia gummifera
WEYQVGPSVGIEAGDHIWCSRYILERITEQAGVVLTLDPKPIEGDWNGAGCHTNY

SEQ ID NO: 9885 - protein, 392 aa, Rhynchophora phillipsonii
DLEPVNPADVPVTAAGALKSYKLAAKAISRLQSLPSGNISLLCDVLVKEVRDLTGYDRVMVYKFHEDEHGEVVSECRRSDLESYLGLHYPATDIPQASRFLFMKNKVRMICDCVAPPVKVIQDERLPQPLSLCASTLRSPHGCHAQYMTNMGIVASLVMSVTVNEEDDMVDSDQPQMARKLWGLVVCHHTSTRFVPFPLRYACEFLIQVFGVQINKEVELAAQVREKHILQIQTMLCDMLLRDAPVAIITQSPNVMDLVKCDGAALYFKNKTWLLGVSPTEEQIRDIAEWLLEYHSGNTGLSTDSLMEAGYPGAAALGDAVCGMAAVSITSRDFLLWFRSHTAKEIKWGGAKHDPDDKDDGRKMHPRSSFKAFLEVVKWRSMPWEDMEMDAI

SEQ ID NO: 9886 - protein, 155 aa, Glycine max
MAGCGEKSDAGVGLYAVLGVASDCSDAELRSAYRKLAMKWHPDKCGSGSSGGSEAAKARFQKIQAAYAVLSDPNKRILYDVGAYDSDGDDEGAGEILGDILKAMNHTPPHEDGESESLEDLHRQFEELFLKPDAYAYARSSKSPSSSSKISAGKK

SEQ ID NO: 9887 - protein, 106 aa, Triticum aestivum
  misc_feature (63)..(63): Xaa can be any naturally occurring amino acid
  misc_feature (77)..(77): Xaa can be any naturally occurring amino acid
  misc_feature (87)..(87): Xaa can be any naturally occurring amino acid
MAAAAVAADSKIDGLRDAVAKLGEISENEKAGFISLVSRYLKRRGGADSSGSKSKTPTDEVVXVPYDTLAPPPDDLXDAMKALLDKXVVLKLNGGSQHGLHGPICQ

SEQ ID NO: 9888 - protein, 392 aa, Rhynchophora phillipsonii
DLEPVNPADVPVTAAGALKSYKLAAKAISRLQSLPSGNISLLCDVLVKEVRDLTGYDRVMVCKFHEDEHGEVVSECRRSDLESYLGLHYPATDIPQASRFLFMKNKVRMICDCVAPPVKVVQDERLPQPLSLCASTLRSPHGCHAQYMTNMGIVASLVMSVTVNEEDDMVDSDQPQMARKLWGLVVCHHTSTRFVPFPLRYACEFLIQVFGVQINKEVELAAQVREKHILQIQTMLCDMLLRDAPVAIITQSPNVMDLVKCDGAALYFKNKTWLLGVSPTEEQIRDIAEWLLEYHSGNTGLSTDSLMDAGYPGASALGDAVCGMAAVSITSRDFLLWFRSHTAKEIKWGGAKHDPDDKDDGRKMHPRSSFKAFLEVVKWRSMPWEDVEMDAI

SEQ ID NO: 9889 - protein, 342 aa, Vitis vinifera
MGVDYYKILQVDKSSKDEDLKKAYRKLAMKWHPDKNPNNKKEAEAKFKQISEAYEVLSDPQKRAVYDQYGEEGLKGQVPPPDAGVPGGATYFQTGDGPTMFRFNPRNANDIFAEFFGYSSPFGGMGGTGGGGMRGSRFSSGMFGDDIFSSFGDSRPMSQGPRKAPPIENTLPCSLEDLYKGTTKKMKISREIMDASGKTIPVEEILTIEIKPGWKKGTKITFPEKGNEQPNVIPADLVFIIDEKPHSKFTREGNDLVVTQKITLAEALTGYTVHLTTLDGRSLSIPINNAIHPNYEEVVPKEGMPIPKEPSKRGNLRIKFNIKFPTRLTAEQKSGIKKLLGS

SEQ ID NO: 9890 - protein, 298 aa, Trifolium repens
MASLKQVSILLFPLFLISLFKSSSAAGIAVYWGQNGGEGSLEDACNTNNYQFVNIAFLSTFGNGQTPPLNLAGHCNPAANGCAIFSSQIQACQAKGVKILLSLGGGAGSYSLSSSDDATQVANYLWDNFLGGTSSSRPLGDAVLDGIDFDIEAGGEHFDELAKALNGFSSQSQKQIYLSAAPQCPYPDAHLDSAIPTGLFDYVGVQFYNNPQRQYSNGNTANLVNAWNQWTSSQATQVFLGVPANEGAAPSGGFIPSDVLINQVLPAIKSSAKYGGVMIWDRFNDGQSGYSDAIKGSV

SEQ ID NO: 9891 - protein, 392 aa, Microsteira sp. Davis et al. 38-01
DLEPVNPADVPVTAAGALKSYKLAAKAISRLQSLPSGNISLLCDVLVKEVRDLTGYDRVMVYKFHEDEHGEVVSECRRSDLESYLGLHYPATDIPQASRFLFMKNKVRMICDCVAPPVKVIQDERLPQPLSLCASTLRSPHGCHAQYMTNMGIIASLVMSVTVNEEDDMVDGDQLQMARKLWGLVVCHHTSTRFVPFPLRYACEFLIQVFGVQINKEVELAAQVREKHILQIQTMLCDMLLRDAPVAIITQSPNAMDLVKCDGAALYFKNKTWLLGVTPTEEQIRDIAEWLLEYHSGNTGLSTDSLMEAGYPGASALGDTVCGMAAVSITSRDFLLWFRAHTAKEIKWGGAKHDPDDKDDGRKMHPRSSFKAFLEVVKWRSMPWEDVEMDAI

SEQ ID NO: 9892 - protein, 392 aa, Mascagnia sepium
DLEPVNPADVPVTAAGALKSYKLAAKAISRLQSLPSGNISLLCDVLVKEVRDLTGYDRVMVYKFHEDEHGEVVSECRGSDLESYLGLHYPATDIPQASRFLFMKNKVRMICDCLAPPVKVIQDERLPQPLSLCGSTLRSPHGCHAQYMTNMGTIASLVMSVTVNEDDDMVDGDQPQMTRKLWGLVVCHHTSPRFVPFPLRYACEFLIQVFGVQINKEVELAAQVGEKHILQIQTMLCDMLLRDAPVAIITQSPNVMDLVKCDGAALYFKNKTWLLGVTPTEEQIRDIAEWLLEYHSGNTGLSTDSLMEAGYPGASALGDAVCGMAAVSITSGDFLFWFRSHTAKEIKWGGAKHDPDDKDDGRKMHPRSSFKAFLEVVKWRSMSWEDIEMDAI

SEQ ID NO: 9893 - protein, 395 aa, Staphylococcus aureus subsp. aureus MRSA252
MLDKNQLAKYKQDHLCEYEKIMSNNEKEALEEKVASLDLDFIAKLYNDLYINKKTIDDVSAVSEVKYDIKSQMSDDEIKRLEEQGLQAIKEGQFAVLLMAGGQGTRLGYKGPKGSFEIEGVSLFELQAKQLKELHRQTGHKIQWYIMTSDINHEETLAYFESHNYFGYDQESIHFFKQDNIVALSEAGQLILNQQGRIMETPNGNGGVFKSLDKAGYLEEMSNNGVKYIFLNNIDNVLVKVLDPLFAGFTVEHDYDITSKTIQPKPGESVGRLVNVDCKDTVLEYSELDPEVANQFNNANIGIHAFKLGFILNAVNRELPYHLAIKNLKQLDENFGVIEQPTLKFELFYFDIFTYGTSFVTLQVPREEEFSPLKNKEGKDSVATATEDLRRMGLI

SEQ ID NO: 9894 - protein, 351 aa, Coccidioides immitis RS
MYCLRTALLPVIGLFNAAYARLDTDSASNLAVYWAFEGHLLRQYRVGQNSYNQGSGNLTQQPLGYYCEMINGIGGAPQVNFANQGDNCTTFPGTDLLNCPQIGADITKCQGKGKTIILSIGGATYSEGGFGSEEEAIAGANLIWETFGPQKNSSRPRPFGDATVDGFDLDFEATVRNMVPFANRLRSLMAADASKKYFLTVAPQCPYPDLYNKEMLEGKVDFDAVFVQFYNNFCGLNTFEPGQEEQKSFNLGEWNEWAKTVSKNKKVKVIVGAPANQRAAGSGYVDASKLAEIVKYSRKFSSFGGVMLWDASQAYANGNFIETVKGALNSGFAGCRFGWRRTQMPMARPVV

SEQ ID NO: 9895 - protein, 192 aa, Pichia guilliermondii
MVYWGQNSYGGQQRLSTYCESDAVDIVLLSFLYSFPSNLQVDFSNACSDSYPDGLKHCSTIAQDIKTCQSLGKKVLLSLGGASGAYGFTSDSQATTFATTLWNKFGGGSDDERPFDDAVVDGFDLDLENNSQTGTVALGKALRTNFAKDTSKTYYLSAAPQCPYPDASVGNFLSGVDVDFAFIQFYNNYYCS

SEQ ID NO: 9896 - protein, 394 aa, Brachypodium pinnatum
EPARTEDPALSIAGAVQSQKLAVRAISRLQALPGGDVKLLCDTVVEHVRELTGYDRVMVYKFHDDEHGEVLAESRRTDLEPYLGLHYPATDIPQASRFLFRQNRVRMIADCHAAPVRVIQDPAMPQPLCLVGSTLRSPHGCHAQYMANMGSIASLVMAVIISSGGEDEHNMGRGAIPSAMKLWGLVVCHHTSPRCIPFPLRYACEFLMQAFGLQLNMELQLAYQLSEKHILRTQTLLCDMLLRDSPTGIVTQSPSIMDLVKCDGAALYYHGKYYPLGVTPTEVQIKDIIEWLTVSHGDSTGLSTDSLADAGYSGATALGDAVCGMAVAYITPSDYLFWFRSHTAKEIKWGGAKHHPEDKDDGQRMHPRSSFKAFLEVVKSRSLPWENAEMDAIH

SEQ ID NO: 9897 - protein, 302 aa, Medicago truncatula
MSNKYSYPSLLLLSISLTLFFQSTNAGDLVIYWGQDNGDGALRDTCNTGLFNIVNIAFLSTFGSGRQPQLNLAGHCNPPNCKNLRDSINICQSRGIKVMLSIGGEDRNTYSFSSPEDANQLADYIWNNFLGGNSPSRPFGDAILDGVDFDIEGGSKLHYETLALKLNDHYKSSRKKFYLTAAPLCIFQDNILQKAINTGLFDYVWVQFYNSPGACNFVSNNPTSFKNSWSQWINSMSTKKVFVGLPASSSNAAPSGGFVEAQDLINQLLPIVKPSPKYGGVMLWNRRFDVTSGYSSKIKASV

SEQ ID NO: 9898 - protein, 394 aa, Buergersiochloa bambusoides
EPARTEDPALSIAGAVQSQKLAVRAISRLQALPGGDVKLLCDTVVEHVRELTGYDRVMVYRFHDDEHGEVVAESRRADLEPYLGLHYPATDIPQASRFLFRQNRVRMIADCHAAPVRVIQDSALPQPLCLVGSTLRGPHGCHAQYMANMGSIASLVMAVIISSGGDDEHNSAQGGIPSAMKLWGLVVCHHTSPRCIPFPLRYACEFLMQAFGLQLNMELQLAHQLSEKHILRTQTLLCDMLLRDSPTGIVTQSPSIMDLVKCDGAALYYHGKYYLLDVTPTEAQIKDIIEWLTLCHGDSTGLSTDSLADAGYPGAAALGDAVCGMAVAYITPSDYLFWFRSHTAKEIKWGGAKHHPEDKDDGQRMHPRSSFKAFLEVVKSRSLPWENAEMDAIH

SEQ ID NO: 9899 - protein, 393 aa, Capillipedium parviflorum
EPARTEDPALSIAGAVQSQKLAVRAISRLQALPGGDVKLLCDTVVEHVRELTGYDRVMVYRFHEGEHGEVVAESRRDNLEPYLGLHYPATDIPQASRFLFRQNRVRMIADCHATPVRVIQDPGLSQPLCLVGSTLRAPHGCHAQYMANMGSIASLVMAVIISSGGDDEQTGRGGISSAMKLWGLVVCHHTSPRCIPFPLRYACEFLMQAFGLQLNMELQLAHQLSEKHILRTQTLLCDMLLRDSPTGIVTQSPSIMDLVKCDGAALYYHGKYYPLGVTPTESQIKDIIEWLTVCHGDSTGLSTDSLADAGYLGAAALGDAVCGMAVAYITPSDYLFWFRSHTAKEIKWGGAKHHPEDKDDGQRMHPRSSFKAFLEVVKSRSLPWENAEMDAIH

SEQ ID NO: 9900 - protein, 386 aa, Chasmanthium latifolium
PALSIAGAVQSQKLAVRAISRLQALPGGDVKLLCDTVVEHVRELTGYDRVMVYRFHEEEHGEVVAESRRDGLEPYLGLHYPATDIPQASRFLFRQNRVRMIADCHATAVRVIQDPGLSQPLCLVGSTLRAPHGCHAQYMANMGSIASLVMAVIISSGGDDEQTSRGGMSSAMKLWGLVVCHHTSPRFIPFPLRYACEFLMQAFGLQLNMELQLAHQLSEKHILRTQTLLCDMLLRDSPTGIVTQSPSIMDLVKCEGAALYYHGKYYPLGVTPTESQIKDIIEWLMLCHRDSTGLSTDSLADAGYVSAAALGDAVCGMAVAYITPSDYLFWFRSHTAKEIKWGGAKHHPEDKDDGQRMHPRSSFKASLEVVKSRSLPWENAEMDAIH

SEQ ID NO: 9901 - protein, 393 aa, Chusquea oxylepis
EPARTEDPALPIAGAVQSQKLAVRAISRLQALPGGDVKLLCDTVVEHVRELTGYDRVMVYRFHDDEHGEVVAESRRADLEPYLGLHYPATDIPQAPRFLFKQNRVRMIADCHAASVRVIQGPALPQPLCLVGSTLRAPHGCHAQYMANMGSIASLVMAVIISSGGDDEHNMTRGGIPSAMKLWGLVVRHHTSARCIPFPLRYACEFLMQAFGLQLNMELQLAHQLSEKHILRTQTLLCDMLLRDSPAGIITQSPSIMDLVKCDGAALYYHGKYYPLGVTPTEAQIKDIIEWLTLCHGDSTGLSTDSLADAGYPGAALGDAVCGMAVAYITPSDYLFWFRSHTAKEIKWGGAKHHPEDKDDGQRMHPRSSFKAFLEVAKSRSLPWENAEMDAIH

SEQ ID NO: 9902 - protein, 509 aa, Bifidobacterium longum DJO10A
MTEINDKAQLDIAAADDTDAVTSDTPEETVNTPEVDETFELSAAKMREHGMSETAINQFHHLYDVWRHEEASSWIREDDIEPLGHVPSFHDVYETINHDKAVDAFAKTAFLKLNGGLGTSMGLDKAKSLLPVRRHKAKQMRFIDIIIGQVLTARTRLNVELPLTFMNSFHTSADTMKALKHHRKFSQHDVPMEIIQHQEPKLVAATGEPVSYPMNPELEWCPPGHGDLFSTIWESGLLDVLEERGFKYLFISNSDNLGARPSRTLAQHFENTGAPFMAEVAIRTKADRKGGHIVRDKATGRLILREMSQVHPDDKEAAQDIAKHPYFNTNSIWIRIDALKDKLAECDGVLPLPVIRNKKTVNPTDPNSEQVIQLETAMGAAIGLFNGSICVQVDRMRFLPVKTTNDLFIMRSDRFHLTDTYEMEDGNYIFPNVELDPRYYKNIRDFDERFPYAVPSLAAANSVSIQGDWTFGRDVMMFADAKLEDKGEPSYVPNGEYVGPQGIEPDDWV

SEQ ID NO: 9903 - protein, 393 aa, Danthoniopsis dinteri
EPASTEDPALSIAGAVQSQKLAVRAISRLQALPGGDVKLLCDTVVEHVRELTGYDRVMVYRFHEDEHGEVVAESRRDDLEPYIGLHYPATDIPQASRFLFRQNRVRMIADCHATPVKVIQDTGLSQPLCLVGSTLRAPHGCHAQYMANMGSIASLVMAVIISSGGDDEQTARGGISSAMKLLGLVVCHHTSPRFIPFPLRYACEFLMQAFGLQLNMELQLAHQLSEKHILRTQTLLCDMLLRDSPTGIVTQSPSIMDLVKCDGAALYYHGKYYPLGVTPTESQIKDIIEWLTLCHGDSTGLSTDSLADAGYLGAAALGDAVCGMAVAYITPSDYLFWFRSHTAKEIKWGGAKHHPEDKDDGQRMHPRSSFKAFLEVVKSRSLPWENAEMDAIH

SEQ ID NO: 9904 - protein, 394 aa, Diarrhena obovata
EPARTEDPALSIAGAVQSQKLAVRAISRLQALPGGDVKLLCDTVVEHVRELTGYDRVMVYKFHDDEHGEVLAESRRADLEPYLGLHYPATDIPQASRFLFWQNRVRVIADCHAAPVRVIQDPAMPQPLCLVGSTLRSPHGCHAQYMANMGSIASLVMAVIISSGGEDEHNMARGAIPSAMKLWGLVVCHHTSPRCIPFPLRYACEFLMQAFGLQLNMELQLAHQLSEKHILRTQTLLCDMLLRDSPAGIVMQSPSIMDLVKCDGAALYYHGKYYPLGVTPTEAQIKDIIEWLTVCHGDSTGLSTDSLADAGYSGATALGDEVCGMAVAYITPSDYLFWFRSHTAKEIKWGGAKHHPEDKDDGQRMHPRSSFKAFLEVVKSRSLPWENAEMDAIH

SEQ ID NO: 9905 - protein, 394 aa, Ehrharta erecta
EPARTEDPALSIAGAVQSQKLAVRAISRLQALPGGDVKLLCDTVVEHVRELTGYDRVMVYRFHEDEHGEVVAESRRNDLEPYLGLHYPATDIPQASRFLFRQNRVRMIADCHAAPVRVIQDPGLPQQLCLVGSTLRSPHGCHAQYMANMGSIASLVMAVIISSAGDDENNMARGGIPSAMKLWGLVVCHHTSPRCIPFPLRYACEFLMQAFGLQLNMELQLAHQLSEKHILRTQTLLCDMLLRDSPTGIVTQSPSIMDLVKCDGAALYYHGKYYPLGVTPTESQIKDIIEWLTVCHGDSTGLSTDSLADAGYPGSAALGDAVSGMAVAYITPSDYLFWFRSHTAKEIKWGGAKHHPEDKDDGQRMHPRSSFKAFLEVVKSRSLPWENAEMDAIH

SEQ ID NO: 9906 - protein, 394 aa, Elymus sp. Kellogg s.n.
EPARTEDPALSIAGAVQSQKLAVRAISRLQALPGGDVKLLCDTVVEHVRELTGYDRVMVYKFHDDEHGEVLSESRRGDLEPYLGLHYPATDIPQASRFLFLQNRVRMIADCHAAAVRVIQDPAMPQPLCLVGSTLRSPHGCHAQYMANMGSIASLVMAVIISSGGEDEHNMTRGVIPSAMKLWGLVVCHHTSPRCIPFPLRYACEFLMQAFGLQLNMELQLAHQLSEKHILRTQTLLCDMLLRDSPTGIVTQTPSIMDLVKCDGAALFYHGKYYPLGVTPTESQIKDIIEWLTVCHGDSTGLSTDSLADAGYPGATALGDAVCGMAVAYITPSDYLFWFRSHTAKEIKWGGAKHHPEDKDDGQRMHPRSSFKAFLEVVKSRSLPWENAEMDAIT

SEQ ID NO: 9907 - protein, 430 aa, Coprinopsis cinerea okayama7#130
MLVFCTGLVLLLAVLVKGFDNNRFDNVAVYWGQNSYGAGHSDLANHQKRLSFYCNDNAIDVFPVAFLHVFFGPGGVPSINLANICNAVDNSTFPGTQLPDCSALASDIASCQSKGKIVTLSLGGATGAVGFESDSQAVSFAQTVWDMFLGGRSDMRPFGNAVLDGVDLDIEGGTSGHYGAFVNKIRALAAPTGKKYYVTAAPQCVYPDAALGEVLNQVAFDAVYVQFYNNYCGLQNFDQASNWNFGLWYSPFTMSHNYFELTLRDRDYWARNVSVSKNTKIYIGAPAAPSAAGSGYVDIGTLSRIATQMRRSFPSFGGVMLWDASQAYANNRFDKAIKDALAAAGGSGFAYPPCSAPAYVSGTGYQSGAQVSYGGYIWQAKWFASQTPGSIVNGLPFVISERLFRGWKSCSAAATASLKLNHDHDHDHAV

SEQ ID NO: 9908 - protein, 415 aa, Vitis vinifera
MGSKLEGPSAPAVRRDPYEVLSVSRDSTDQEIKTAYRKLALKYHPDKNASNPEASELFKEVAYSYNILSDPEKRRQYDSAGFEALDSDSMDMEIDLSNLGTVNTMFAALFSKLGVPIKTTVSANVLEEALNGTVTVRPLPVGTSVSGKVDKQCAHFFGVTINEEQAQAGIVVRVTSSSQSKFKLLYFEQDANGGYGLALQEDSEKTGKVTSAGMYFLHFQVYRMDSTLNALAMAKDPEAAFFKRLEGLQPCEVSELKAGTHIFAVYGDNFFKTASYTIEALCAKSYEDTTEKLKDIEAQILRKRTELRQFETEYRKALARFQEVTNRYGQEKQCVDELLKQRDSIHCSFTVTKTANNSIISGSGSNMSNGSSSKIPNDDLKVESPGEDVSSEGKDKSSKKKWFNLNLKGSDKKSG

SEQ ID NO: 9909 - protein, 310 aa, Zea mays
MGSRSSQFPSMALAMATVLMALAGVAATARAGGGIAIYWGQNGNEGTLAQTCATGNYRFVNVAFLPTFGRGQTPALNLAGHCDPASGGCTGVGADVKACQRMGVKVLLSIGGGVGSYGLSSRADARSVAAYLWDNYLGGGGGSESRPLGDAVLDGVDFDIESGGGMYWDDLARFLKSYSRRGRARRPVYLSAAPQCPFPDASLGTALATGLFDYVWVQFYNNPPCQYSASAGVGSLAKAWAQWTSIRAGRVFLGLPAAPQAAGSGFVPASDLVAQVLPVVKNSTKYGGIMLWSRYYDGLTGYSDAVKSYV

SEQ ID NO: 9910 - protein, 845 aa, Chlamydomonas reinhardtii
MHGLLHYQVLGVSKDADADAIKRAYKKLALKYHPDKNPKGQGKFIEIQHAYEILSDGDKKRDYDEGGGSGGGGHYHHQQHHQQYQQYQRYQEQQQRQYEYYQQQQQQRERHFHSLLPSNTSFITSSNARNLIFHSSRPWILMDFAADKLLRLPRVSQLEPHTAPAFLGRASPYKVVVVAFGRAGGSGSFALRSLAARQKDMLTVTRGHVQEGNAQQAAAWQQALGLSSPPAASSLVFLRGPGTAPRVVPVPAGKSRVEDMQQLIDETGVLWQEVPPLRPSTGASLGCLWGRAAAASGRSMIDTCVLAVGPGGGPGSALEEGRRRMALLGRLLASATSQRDPTVSAAATAYMAGKLRLTWFDSTRQHELCTWFLSAGGGSALRPTTTTAQPGSNAAGRAAAVTAANAAAAAKAPELLRSMCGAGRWDVLGRVKKAAQTAAAAAAATAGRPDLAARLAPARGSVHLIVLRPSIDQSSWFRGGGAQHTRNGKRVFLHAVNADFDLAAPQAPHSDAVGSKSGSGPAYGDSDLDKLAMWINAMHADPDRQLHASSTFPPALQTDDEPGALEYVTGRLYEAARTALEFVMQAGGLSDDGSAPLSNEMQYANLAIAVVALLFAHYAIFGGGAGGAGAGRQAGAARRPSPALRRAAAATAAAGGATVSRPPAEHQPHEARGGSGDTAGGKEGSAEGRQQERRAGGEGEVPSDQAAEQRRGRPVEPVVVNRRALSPSWRTGRRGDDDVDVDGAAAAAASSGKAEEEGVMAPRRRGSGADGEAGLGAAGQDEGAETGAEMEAGAGSTAGVDGDSEDVEVVDVVGCSDTEGVRGTDTGPDSSGLAPEDSWEHVDKR

SEQ ID NO: 9911 - protein, 304 aa, Triticum aestivum
MAPLAARRPACLLALLSVAAALFLTPTALAAGGKTGQVTVFWGRNKAEGSLREACDSGMYTMVTMSFLDVFGANGKYHLDLSGHDLSSVGADIKHCQSKGVPVSLSIGGYGTGYSLPSNRSALDLFDHLWNSYFGGSKPSVPRPFGDAWLDGVDLFLEHGTPADRYDVLALELAKHNIRGGPGKPLHLTATVRCGYPPAAHVGRALATGIFERVHVRTYESDKWCNQNLGWEGSWDKWTAAYPATRFYVGLTADDKSHQWVHPKNVYYGVAPVAQKKDNYGGIMLWDRYFDKQTNYSSLIKYYA

SEQ ID NO: 9912 - protein, 557 aa, Oryza sativa Indica Group
MAAAAAAAANGAGGGGGVPRPTNPMVTPLLTDLYQFTMAYAYWKAGKHLDRAVFDLYFRKNPFGGEFTIFGGLEECIRFIANFKLTDTEITFLRSAMPTCEDGFFEYLSSIDCSDVEVYAIPEGSVVFPKVPLMIIEGPVAVIQLLETPFLSLVNYASLVTTNAARHRLVAGKSKNLLEFGLRRAQQCCSRMVIWDTNTWDSFSCIRELFHDGHPFSLIFKCPSVRGSQGLDDIIDRTLASSDGSNKCEDFVSLVQNWLARIKDAGSLRGTFRETNLSELAAFTSYALAFPNSFLALVDTYDVMRSGVPNFCAVALALNDMGYKAAGIRLDSGDLAYLSVETRKFFRAIEEEFGFIGFGKMNITASNDLNEETIDALNKQGHEVDAFGIGTYLVTCYAQAALGCVFKLVEINKQPRIKLSEDVTKVSIPCKKRCYRLFGKEGYPLVDIMTGEDEPAPKVGERLLCRHPFNESKRAYVVPQHVEELLKCYWPGTTSEPREELPSINEIRSRCMGYLDRMRPDHMRRLNPTPYKVSVSAKLYDFIHFLWLNEAPVGELQ

SEQ ID NO: 9913 - protein, 55 aa, Adenia sp. Gilbert 9135
WEYQVGPSVGIEAGDHIWCSRYLLERITEQAGVVLTLDPKPIEGDWNGAGCHTNY

SEQ ID NO: 9914 - protein, 60 aa, Dilkea sp. Gilbert 9246
SPMGGVMPGQWEYQVGPSVGIDAGDHIWCSRYILERITEQAGVVLSLDPKPIEGDWNGAG

SEQ ID NO: 9915 - protein, 298 aa, Trifolium repens
MAKNSNTFLSLIFLLFLTFVATSHAGGIAIYWGQNGNEGTLSEACATGKYTHVIIAFLNKFGNGQTPEMNLAGHCNPSVPNSCTKFSSEIKDCQSKGIIVLVSIGGGIGSYSLSSIEDARNVSTFLWNTFLGGKSSSRPLGDAVLDGIDFDIELGSTQNWQHLAKFLKEYSRYGKKVYLGAAPQCPIPDKFLGTALQTGLFDFVWVQFYNNPPCQYNGNITNLVNSWNTWTRSVPTRKIFLGLPAATAAAGSGFTPADVLTSQILPVIKKSRKYGGVMLWSRFFDGQTGYSTSIIGSV

SEQ ID NO: 9916 - protein, 545 aa, Zea mays
MAAFGGVGCGCGCDDGLIGVCAAAIADGGLIGRKPLRASQRGRQASQRGVSATQANNGTETPAVTAPELETEIMVRAWGRRTALPPLLILGLLRLHYSSLVVAQEGQEKDPATLFAQASGMMDLRKYDGALGLLNAVLEIDPNHSEAYRQRASVLRHKCRYEEAERDYNKHLELSPGSASVVKELSQLLQAQNSLQSAYGQFDSGDFSKVVEYINKIVLVFSPGCLKAKLLKAKALLALKDYSSVISETGFILKEDEDNLDALLLRGRAYYYLADHDVASRHYQKGLRLDPEHSELKKAYFGLKNLLKKTKSAEDNAAKGKLRVSVEDYKAALAMDPDHTAYNVHLYLGLCKTLVRLGRSKEAISTCTEALIIDSELVDALTQRGEAKLLSEDWEGAVQDLKEAAQKSPQDMGIREALMRAEKQLKLSKRKDWYKILGVSKTASAAEIKRAYKKLALQWHPDKNVDNREKAENMFREIAAAYEVLGDEDKRVRYDRGEDVEEMNMGGGGGFNPFGGGGQQYTFQYDGGFPGGGFPGGGGFQFNFG

SEQ ID NO: 9917 - protein, 58 aa, Passiflora adenopoda
WEYQVGPSVGIDAGDHIWCSRYILERITEQAGVVLTLDPKPIEGDWNGAGCHTNYSTK

SEQ ID NO: 9918 - protein, 338 aa, Brassica napus
MGVDYYNVLQVDRNASEDDLKKAYRKLAMKWHPDKNPNNKKDAEAKFKQISEAYEVLSDPQKKAVYDQYGEEGLKGNVPPPDAGGATYFATGDGPTSFRFNPRSADDIFAEFFGFSRPFGGGGGGGTRFSSSMFGDNIFASFGEAGGGGGAMHHGGGARKAAPIENRLPCSLEDLYKGTTKKMKISREIADVSGKTMPVEEILTIDVKPGWKKGTRITFPEKGNEQPGVTPADLVFIIDEKPHPVFTREGNDLIVTQRISLAEALTGYTVNLTTLDGRRLTIPVTNVIHPEYEEVVPKEGMPLQKDQTKRGNLRIKFNIKFPTRLTSEQKAGVKKLLG

SEQ ID NO: 9919 - protein, 55 aa, Passiflora aimae
REYQDGPSVGIDVGDNIWCSRYILERITDQAGVVFILDPNPMEGDGTGAGCPPNS

SEQ ID NO: 9920 - protein, 75 aa, Passiflora alata
GTNGEVMPGQWEYQVGPSVGIDAGDHIWCSRYILERITEQAGVVLSLDPKPIEGDWNGAGCHTNYSTKSMREDGG

SEQ ID NO: 9921 - protein, 79 aa, Glycine max
MDREGGSNGGSCYYSVLGIRRDASFSDIRTAYRKLAMRWHPDKWAQNPATAGEAKRRFQQIQEAYSAVLSDQSKMSMYD

SEQ ID NO: 9922 - protein, 179 aa, Triticum aestivum
FKNSLKGQHEPSRMMIETGPYYFHYIIEGRVCYLTMCDRSYPKHVAFQYLEDLRNEFERVNGSQIETAARPYAFIKFDTFIQKTKKLYLDTRTQRNLAKLNDELYEVHQIMTRNVQEVLGVGEKLDQVTEMSTRLTSDTRIYADKAKDLNRQALIRKYAPVAIVIGVVLMLFWLKNKIW

SEQ ID NO: 9923 - protein, 64 aa, Protea revoluta
MPGQWEYQVGPSVGIEAGDHIWCSRYLLERITEQAGVVLTLDPKPIEGDWNGAGCHTNYSTKSM

SEQ ID NO: 9924 - protein, 328 aa, Sesbania rostrata
MAPKRQALILIVLSLLTINTSEAATGGIAIYWGQNNGDGTLTSTCDTGNYEIVVLSFLTTFGCSRTPQWNFAGHCGDWSPCTKLQPEIQHCQQKGVKVFLSLGGASGSYSLCSPQDAKEVADYLFSNFLTGRYGPLGSVTLDGIDFDIEGGSNLYWDDLAKELDALRQTNNYFYLSAAPQCPIPDYYLDKAIKTGLFDYVFVQFYNNPPCQYSNGNTGPLLGSWDAWTSLVLPNNTVFMGLPASREAAPSGGYIPPNVLISEVLPYIKQASNYGGIMLWSRFQDVTNHYSDQIKYYVTKYMLRFVKAVSNAISDCVSAALHRFLPKPY

SEQ ID NO: 9925 - protein, 396 aa, Bacteroides thetaiotaomicron VPI-5482
MAEKRDYYEVLEVTKTATVEEIKKAYRKKAIQYHPDKNPGDKEAEEKFKEAAEAYDVLSNPDKRSRYDQFGHAGVSGAAGNGGPFGGFGGEGMSMDDIFSMFGDIFGGRGGGFSGGFGGFSGFGGGGGGSQQRRYRGSDLRVKVKMTLKEISTGVEKKFKLKKYVPCNHCHGTGAEGDGGSETCPTCKGSGSVIRNQQTILGTMQTRTTCPTCNGEGKIIKNKCKECGGDGIVYGEEVVTVKIPAGVAEGMQLSMGGKGNAGKHNGVPGDLLILVEEEPHPDLIRDENDLIYNLLLSFPTAALGGAVEIPTIDGKVKVKIDSGTQPGKVLRLRGKGLPNVNGYGTGDLLVNISIYVPEALNKEEKSTLEKMEASDNFKPSTSVKEKIFKKFKSFFD

SEQ ID NO: 9926 - protein, 188 aa, Podocarpus neriifolius
DEHGEVVAEIRRADLEPYLGLHYPSTDIPQASRFLFMQNRVRMICDCSATPVKVIQSEELRQPLCLVGSTLRAPHGCHAQYMANMGSIASLVMAVVINGNDEEGEEQVPKSMKLWGLVVCHHTSSRAVSFPLRYACEFLMQAFGLQLNMELQLAAQLTEKHILRTQTLLCDMLLRDAPIGIVTQSPSI

SEQ ID NO: 9927 - protein, 162 aa, Arabidopsis thaliana
MPVASNRPATTLLPLAALVPVAGSFFLAGPAAATGKTGQVTVFWGRNKAEGTLRKACDTGTYTIVVISFLNVSAGPGNSPPSLDLSGHPVAGIGADIKHCQSKSIMVFLSLGGGQHSLPSAEAAADLADYLWYAYFPAPAPRAGVRRPFGDAYVDGLDFFLD

SEQ ID NO: 9928 - protein, 423 aa, Mesorhizobium sp. HN8A1
WGFDGSSTMQAEGRSSDCVLKPVALYPDPARTNGILVMCEVMMPDGVTPHESNSRATILDDEDAWFGFEQEYFFYKDGRPLGFPESGYPAPQGPYYTGVGYKNVGDVARKIVEEHLDQCLAAGINHEGINAEVAKGQWEFQIFGKGSKKAADQIWMARYLLLRLTETYGIDIEFHCKPLGDTDWNGSGMHCNFSTKFMREVGGKAYFEALMAQFDKNLMDHIAVYGPDNDKRLTGKHETAPWNKFSYGVADRGASIRVPHSFVKNDYKGYLEDRRPLGANEQVVEIETVPTGSLGLDIALGVGGLPRGRIIEIYGPESSGKTTLALHTVAEAQKKGGICAFVDAEHALDPVYARKLGVDLENLLISQPDTGEQALEICDTLVRSGAIDVLVVDSVAALTPRAEIEGEMGDSLPGLQARLMSQA

SEQ ID NO: 9929 - protein, 394 aa, Eremitis sp. Clark and Zhang 1343
EPARTEDPALSIAGSVQSQKLAVRAISRLQALPGGDVKLLCDTVVENIRELTGYDRVMGYRFHDDEHGEVVAESRRADLEPYLGLHYPATDIPQASRFLFRQNRVRMIADCHTAPVRVIQDPVLPQPLCLVGSTLRAPHGCHAQYMANMGSIASLVMAVIISSGGDDSHNSSRGGIPSAMKLWGLVVCHHTSPRCIPFPLRYACEFLMQAFGLQLNMELQLAHQLSEKHILRTQTLLCDMLLRDSPTGIVTQSPSIMDLVKCDGAALYYHGKYYPLGVTPTEAQIKDIIEWLTLCHGDSTGLSTDSLADAGYPGAAALGDAVCGMAVAYITPSDYLFWFRSHTAKEIKWGGAKHHPEDKDDGQRMHPRSSFKAFLEVVKSRSLPWESAEMDAIH

SEQ ID NO: 9930 - protein, 394 aa, Glyceria grandis
EPARTEDPALSIAGAVQSQKLAVRAISRLQALPGGDVKLLCETVVEHVRELTGYDRVMVYKFHDDEHGEVLAESRRPDLEPYLGLHYPATDIPQASRFLFRQNRVRMIADCHAAPVRVIQDPAMPQPLCLVGSTLRSPHGCHAQYMANMGSIASLVMAVIISSGGDDEHHMARGNIPSAMKLWGLVVCHHTSPRCIPFPLRYACEFLMQAFGLQLNMELQLAHQLSEKHILRTQTLLCDMLLRDSPTGIVTQSPSIMDLVKCDGAALYYHGKYYPLGVTPTEAQIKDIIEWLTACHGDSTGLSTDSLADAGYSGATVLGDAVCGMAVACITPSDYLFWFRSHTAKEIKWGGAKHHPEDKDDGQRMHPRSSFKAFLEVVKSRSLPWENAEMDAIH

SEQ ID NO: 9931 - protein, 393 aa, Hakonechloa macra
EPARTEDPALSIAGAVQSQKLAVRAISRLQALPGGDVKLLCDTVVEHVRELTGYDRVMVYRFHEDEHGEVVAESRRADLETYLGLHYPATDIPQASRFLFRQNRVRMIADCHATPVRVIQDPGLPQPLCLVGSTLRAPHGCHAQYMANMGSIASLVMAVIISSGGDDEQTARGGISSTMKLWGLVVCHHTSPRFIPFPLRYACEFLMQAFGLQLNMELQLAHQLSEKHILRTQTLLCDMLLRESPTGIVTQSPSIMDLVKCDGAALYYHGKYYPLCVTPTESQIKDIIEWLTVCHGDSTGLSTDSLADAGYLGAAALGDAVCGMAVAYITPSDYLFWFRSHTAKEIKWGGAKHHPEDKDDGQRMHPRSSFKAFLEVVKSRSLPWENAEMDAIH

SEQ ID NO: 9932 - protein, 392 aa, Lithachne pauciflora
EPARTEDPALSIAGAVHSQKLAVRAISRLQALPGGDVKLLCDTVVEHVRELTGYDRVMVYRFHEDEHGEVVAESRRADLEPYLGLHYPATDIPQASRFLFRQNRVRMIADCHAAPVRVIQDPALQQPLCLVGSTLRAPHGCHAQYMANMGSIASLVMAVIISSGGDDEHNITRGGIPSAMKLWGLVVCHHTSPRCIPFPLRYACEFLMQAFGLQLSMELQLAHQLSEKHILRTQTLLCDMLLRDSPTGIVTQSPSIMDLVKCDGAALYYHGKYYPLGVTPTEAQIKDIIEWLTLCHGDSTGLSTDNFADAGYPGAAALGDAVCGMAVAYITPSDYLFWFRSHTAKEIKWGGAKHHPEDKDDGQRMHPRSSFKAFLEVVKSRSLPWENAEMDA

SEQ ID NO: 9933 - protein, 376 aa, Desulfovibrio vulgaris subsp. vulgaris str. Hildenborough
MSQRDYYEVLGVARDASEDDIKRAYRKLALQYHPDRNPDDPEAEQKFKEAAEAYDVLRDGEKRARYDRFGHAGVGNGGGFGQGFSSNEDIFAHFSDIFGDLFGFAGAAGGRSRGPRPQAGSDLRYNLTISFRQAAKGDEVTLRLPKSVPCDECGGSGAAPGTRPETCRHCGGAGQIRQSQGFFQIAMPCPVCRGEGTVITSPCPKCKGSGQTQQVKELSVRIPAGVDTGNRLRLRGEGEPGIHGGPAGDLYVVISVEDDKTFRRQGQDLVVTREISFVQASLGDRIDVPTLDDDITLDIPAGTQSGEVFRLVDKGLPYLGHGHTGDLLVEIRVVTPTRLTKKQEELLREFALLDEEKPLEKVKKMARKIGKAMGMD

SEQ ID NO: 9934 - protein, 392 aa, Lolium perenne
TGYDRVMVYKFHDDEHGEVLAESRRADLEPYLGLHYPATDIPQASRFLFRQNRVRMIADCHAAPVRVIQDPAMPQPLCLVGSTLRSPHGCHAQYMANMGSIASLVMAVIISSGGEDEHNMGRGAVPSAMKLWGLVVCHHTSPRCIPFPLRYACEFLMQAFGLQLNMELQLAHQMSEKHILRTQTLLCDMLLRDSPTGIVTQSPSTMDLVKCDGAALYYHGKYYPLGITPTEAQIKDIIKWLTVCHGDSTGLSTDSLADAGYPGATELGDAVCGMAVAYITPSDYLFWFRSHTAKEIKWGGAKHHPEDKDDGQRMHPRSSFKAFLEVVKSRSLPWENAEMDAIHSLQLILRDSFRDAGEGTSNSKAIVNGHVQLGELELRGIDELSSVAREMV

SEQ ID NO: 9935 - protein, 394 aa, Lygeum spartum
EPARTEDPALSIAGAVQSQKLAVRAISRLQALPGGDVKLLCDTVVEHVRELTGYDRVMVYKFHDDEHGEVLAESRRTDLEPYLGLHYPATDIPQASRFLFRQNRVRMIADCHAAPVKVFQDPAMPQPLCLVGSTLRSPHGCHAQYMANMGSIASLVMAVIISSGGDDEHNMSRGVIPSAMKLWGLVVCHHTSPRCIPFPLRYACEFFMQAFGLQLNMELQLAHQLSEKHILRTQTILCDMLLRDSPTGIVTQSPSIMDLVKCDGAALYYHGKYYPLGVTPTESQIKDIIDWLTVCHGDSTGLSTDSLADAGYPGAAALGDAVCGMAVAYITPSDYLFWFRSHTAKEIKWGGAKHHPEDKDDGQRMHPRSSFKAFLEVVRSRSLPWENAEMDAIH

SEQ ID NO: 9936 - protein, 394 aa, Melica cupanii
EPARTEDPALSIAGAVQSQKLAVRAISRLQALPGGDVKLLCDTVVEHVRELTGYDRVMVYKFHDDEHGEVLAESRRADLEPYLGLHYPATDIPQASRFLFRQNRVRMIADCGAAPVTVIQDPAMPQPLCLVGSTLRSPHGCHAQYMANMGSIASLVMAVIISSGGDDDHNMVRGSIPSAMKLWGLVVCHHTSPRCIPFPLRYACEFLMQAFGLELNMELQLAHQMSEKHILRTQTLLCDMLLRDSPTGIVTQSPSIMDLVKCDGAALFYHGKYYPLGVTPTEAQIKDIIEWLTVCHGDSTGLSTDSLADAGYSGATALGDAVCGMAVAYITPSDYLFWFRSHTAKEIKWGGAKHHPEDKDDGQRMHPRPSFKAFLEVVKSRSIPWENAEMDAIH

SEQ ID NO: 9937 - protein, 525 aa, Arabidopsis thaliana
MEKKENGLDGKQSGRVINGPTNPMVTPLLNDLYQFTMAYAYWKAGKQSERSVFDLYFRKNPFGGEYTIFAGLEECIKFLANFNLTDEEINFVRDSLPGCEEAFCDYLRGLDCSDIEVYAISEGSVVFPKVPLLRIEGPVAVVQLLETPFLNLINYASLVATNAARHRFVAGKSKLLLEFGARRAQGPDGAISASKYCYLGGFDATSNVAAGKLFGIPLRGTHSHAFVSSFMNSSSLQGIFSETNQSELAAFISYALAFPNSFLALVDTYDVMKSGIPNFCAVALALNELGYKAVGIRLDSGDLAYLSTEVRKFFCAIERDLKVPDFGKMIVTASNDLNEETVDALNKQGHEVDAFGIGTNLVTCYAQAALGCVFKLVEINNQPRIKLSEDVTKVSIPCKKRTYRLFGKEGYPLVDIMTGENEPPPKVGERLLCRHPFNESKRAYVVPQRVEELLKCYWRGNADEAREELEPLKELRNRCIKQLENMRPDHMRRLNPTPYKVSVSAKLYDFIHFLWLNEAPVGELH

SEQ ID NO: 9938 - protein, 469 aa, Arabidopsis thaliana
MAATTENLPQLKSAVDGLTEMSESEKSGFISLVSRYLSGEAQHIEWSKIQTPTDEIVVPYEKMTPVSQDVAETKNLLDKLVVLKLNGGLGTTMGCTGPKSVIEVRDGLTFLDLIVIQIENLNNKYGCKVPLVLMNSFNTHDDTHKIVEKYTNSNVDIHTFNQSKYPRVVADEFVPWPSKGKTDKEGRYPPGHGDVFPALMNSGKLDTFLSQGKEYVFVANSDNLGAIVDLTILKHLIQNKNEYCMEVTPKTLADVKGGTLISYEGKVQLLEIAQVPDEHVNEFKSIEKFKIFNTNNLWVNLKAIKKLVEADALKMEIIPNPKEVDGVKVLQLETAAGAAIRFFDNAIGVNVPRSRFLPVKASSDLLLVQSDLYTLVDGFVTRNKARTNPSNPSIELGPEFKKVATFLSRFKSIPSIVELDSLKVSGDVWFGSSIVLKGKVTVAAKSGVKLEIPDRAVVENKNINGPEDL

SEQ ID NO: 9939 - protein, 393 aa, Miscanthus sinensis
EPARTEDPALSMAGAVQSQKLAVRAISCLQALPGGDVKLLCDTVVEHVRELTGYDRVMVYRFHEDEHGEVVAESRRDNLEPYLGLHYPATDIPQASRFLFRQNRVRMIADCHATPVRVIQDPGLSQPLCLVGSTLRASHGCHAQYMANMGSIASLVMAVIISSGGDDEQTGRGGISSAMKLWGLVVCHHTSPRCIPLPLRYACEFLMQAFGLQLNMELQLAHQVSEKHILRTQTLLCDMLLRDSPTGIVTQSPSIMDLVKCDGAALYYHGKYYPLGVTPTESQIKDIIEWLTVCHGDSTGLSTDSLADAGYLGAAALWDAVCGMAVAYITPSDYLFWFRSHTAKEIKWGGAKHHPKDKDDGQRMHPRSSFKAFLEVVKSRSLPWENAEMDAIH

SEQ ID NO: 9940 - protein, 388 aa, Molinia caerulea
EDPALSIAGAVQSQKLAVRAISRLQALPGGDVKLLCDTVVENVRELTGYDRVMVYRFHEDEHGEVVAESRRADLEPYLGLHYPATDIPQASRFLFRQNRVRMIADCHATPVRVIQDPGLSQPLCLVGSTLRAPHGCHAQYMANMGSIASLVMAVIIIIGGDDEQTARGSISSAMKLWGLVVCHHTSPRFIHFPLRYACEFLMQAFGLQLNMELQLAHQLSEKHILRTQTLLCDMLLRDSPSGIVMQSPSIMDLVKCDGAALYYHGKYYPLGVTPTESQIMDIIEWLTMCHGGSTGLSTDSLADAGYLGAAALGDAVCGMAVAYITSSDYLFWFRSHTAKEIKWGGAKHHPEDKDDGQRMHPRSSFKAFLEVIKSRSLPWENAEMDAIH

SEQ ID NO: 9941 - protein, 387 aa, Nardus stricta
PALSIAGAVQSQKLAVRAISRLQALPGGDVKLLCDTVVEHVRELTGYDRVIVYKFHDDEHGEVLAESRRTDLEPYLGLHYPATDIPQASRFLFRQNFVRMIADCHAAPVRVIQDPAMPQPLCLVGSTLRSPHGCHAQYMANMGSIASLVMAVIISSGGDDEHNMARGVVPSAMKLWGLVVCHHTSPRCIPFPLRYACEFLMQAFGLQPNMELQLAHQMSEKHILRTQTLLCDMLLRDSPTGIVTQSPSIMDLVKCDGAALYYHGKYYPLGVTPTESQIKDIIEWLTVCHGDSTGLSTDSLADAGYPGAAALGDAVCGMAVAYITQSDYLFRFRSHTAKEIKWGGAKHHPEDKDDGQRMHPRSSFKAFLAVVKSRSLPWENAEMDAIH

SEQ ID NO: 9942 - protein, 328 aa, Medicago sativa
TRLLLLLVLTIFPFTIKASSSGGIAIYWGQNLGDGTLTSTCDTGNYEIVLLAFLNVFGGGRVPNWNFAGHCGDWSPCTKLEPEIKHCQQKGVKVLLSIGGAVGSYSLSSPEDAKNVADYLHTNFLSGQFGPLGSVTLDGVDFDIEGGTNLYWDDLARDLDNLRQQNRYFYLSAAPQCFMPDYYLDKAIKTGLFDYVLVQFYNNPPCQYDIKNSDPKLLLQSWNAWTSLVLPNNTVFMGLPAAPNAAPSGGYIPPDDLISKVPPSIKPTSNYGGIMLWDRFHDVTGNNDYIYSDQIKEHVKRSVLRFKTQVSEAISRCISAALNPMLPN

SEQ ID NO: 9943 - protein, 469 aa, Candida glabrata CBS 138; identical to SEQ ID NO: 672

SEQ ID NO: 9944 - protein, 58 aa, Passiflora allantophylla
WEYQVGPSVGIDAGDHIWCSRYILERITEQVGVVLTLDPKPIEGDWNGAGCHTNYSTK

SEQ ID NO: 9945 - protein, 427 aa, Physcomitrella patens subsp. patens; identical to SEQ ID NO: 6413

SEQ ID NO: 9946 - protein, 369 aa, Populus trichocarpa
MEPNDSHQQQQHFTSYFSTTTTTTTTTTPSPTNGLLPPHQPTDSTTPTGPHMLYPHSMGPSTTATVTGGGGAPVEAAAAAAAAKRKRGRPRKYGTPEQALAAKKTASSNSAAAYREKKEHQAGSSSTISSFSAYSSKKSQHASLGNAGHGFTPHVITVAEGEDVTQKIMHFLQQSMREMCILSASGSILSASLSQPATSGGNISYEGRYEIISLCGSYVRTEMGGRAGGLSVCLSDTNGQIIGGGVGGPLKAAGPVQVIVGTFMLDNKKGGSGKGDASGSKLPSPVGASVPSFGFRSPVESSLMNPARANDDHPTIGGNPFTMQPTSMHLTPTRPIDWMSGPDVRTSGYDFTGRTGHGGPQSPENGDYE

SEQ ID NO: 9947 - protein, 172 aa, Glycine max
FIISFQRLANDQFCNANHCIVITGRGYPDIPTRRFLRLLVENLCLPAYCLVDCDPYGFDILTTYRFGSMQMAYDTKHLRVPEIQWLGAFPSDSERYFVPNQCLLPLTAEDKRKVEAMLLRCYLEREVPQWRLELQLILQRGVKFEIEALSVHALSFLSESYIPSKIEGKLIM

SEQ ID NO: 9948 - protein, 59 aa, Passiflora alnifolia
WEYQVGPSVGIDAGDHIWCSRYILERITEQAGVVLTLDPKPIEGDWNGAGCHTNYSTKS

SEQ ID NO: 9949 - protein, 750 aa, Ustilago maydis 521
MPSLVSSPGTSTMQTDNVHEPSSAFATPPTQSTSSFASGSNTPSHQIRLNGQSSGIGESPAPHSSRPYHSSSHASQSNGAGTGKDKKWKQMFKFGSIGRKASGNASNDRSWHTDSAESSMHKNGDYFEHVQYTGSQPGSTSFQPISGSTVVNDPASFSNDSYSSEDRNASGSIGDAMTTSASSKLQPPADISDTDSSHPRFTSRLMRRVSSAPDTNKLFKNGQNATQKPNEAASSTKNGYLSPDGAGGQHAQFVSEGGAPFTPSKELANAAFFSNSPVRMDSNATSFSYKDFEKGRSVSAKGSSTPKSGRIVFPGTGRSKSSNGKDKKSQLPPPSSSANLAALAGTASVNRGPGSFRRTYSSNSIKVKEVEVGPNSFSKVKMLGKGDVGKVYLVREKKTDKLYAMKVLSKKEMIKRNKIKRVMAEQEILAASNHPFIVTLYHSFQSEDYLYLCMEYCMGGEFFRALQTRPGKCLPEEDAKFYAAEVIAALEYLHLMGFIYRDLKPENILLHQSGHVMLSDFDLSARATQRGGAPAMIRQATPNSAPLVDTRSCIADLRTNSFVGTEEYIAPEVIKGCGHTSAVDWWTLGILIYEMIFATTPFKGSTRNETFSNVLRNEVQFPDSIPISSFGKSLIRKLLIKDELKRMGSQSGASEVKQHKWFSNISWGLLRNSTPPIVPAYSNGVDAVNFRNVRESRSLNLDDQGNDTRAKPAVIKAVAGQKNVGDEEGDAVVSNPFSGFSSVTLKHDDY

SEQ ID NO: 9950 - protein, 60 aa, Passiflora ambigua
VMPGQWEYQVGPSVGIDAGDHIWCSRYILERITEQAGVVLTLDPKPIEGDWNGAGCHTNY

SEQ ID NO: 9951 - protein, 503 aa, Cryptococcus neoformans var. neoformans B-3501A
MPPRITSRALSTLSTAQSSAGSSSTLPPSTFSLRQHKRSPSSHSFTFRHFGPLLAHPRNPSTASLGWRRSFHSSTVHPASAKDPYNVLGVNKDASSSDIKKAYYSLAKKWHPDSSKEKDAKEKFHEIQAAYDILSDDKKRQAYDRYGSASTQEGFDPNFAHGAGGFGGFQGFGPGFGDGASDLFESLFGGAFGGGSSAFGGRQRPVRGDDLEVGVNLSFLEACNGVTRKVTVTPVIDCKTCTGSGLKPGEKKSQCPACRGSGQRTFQVQGMVMASTCQTCGGTGSTIPKNARCGECDGVGKVKEKKVLDVEIPAGVEDGMMIRVPGAGDKPLSASGPAGDLLVRVLVKPSSVFRRQGVNLYHDAKVPLHIALLGGVIRIPTLEGDVDVKVKNGTQNGEEAVLKGRGVKSVYGGRRNDRGDLIVGWKVQIPRSLTPFQRKILQAYADDIEGRNPQVHFGPLPSDPPVTSPSSPPKEPTNGETKKEIGEEGRQTKSEEDEVGGKI

SEQ ID NO: 9952 - protein, 547 aa, Cryptococcus neoformans var. neoformans B-3501A
MPPRITSRALSTLSTAQSSAGSSSTLPPSTFSLRQHKRSPSSHSFTFRHFGPLLAHPRNPSTASLGWRRSFHSSTVHPASAKDPYNVLGVNKDASSSDIKKAYYSLAKKWHPDSSKEKDAKEKFHEIQAAYDILSDDKKRQAYDRYGSASTQEGFDPNFAHGAGGFGGFQGFGPGFGDGASDLFESLFGGAFGGGSSAFGGRQRPVRGDDLEVGVNLSFLEACNGVTRKVTVTPVIDCKTCTGSGLKPGEKKSQCPACRGSGQRTFQVQGMVMASTCQTCGGTGSTIPKNARCGECDGVGKVKEKKVLDVEIPAGVEDGMMIRVPGAGDKPLSASGPAGDLLVRVLVKPSSVFRRQGVNLYHDAKVPLHIALLGGVIRIPTLEGDVDVKVKNGTQNGEEAVLKGRGVKSVYGGRRNDRGDLIVGWKVQIPRSLTPFQRKILQAYADDIEGRNPQVHFGPLPSDPPVTSPSSPPKEPTNGEGSYPSYRSQNQPQAEHAPHRPSRPPAEPYKPYNPLSSSEEPISLANKLASAIGGAIGWVERFMRGRR

SEQ ID NO: 9953 - protein, 65 aa, Passiflora amethystina
GTNGEVMPGQWEYQVGPSVGIDAGDHIWCSRYILERITEQAGVVLTLDPKPIEGDWNGAGCHTNY

SEQ ID NO: 9954 - protein, 272 aa, Scadoxus multiflorus
ANLDIAVYWGQNFDERSLEATCDTGNYAYVIIGFLNTFGGGQTPALDISGHSPSGLEPQIKHCQSKNVKVLLSIGGPKGPYSLDSRSDANDLAVYLFNNFLLPPGHSENRPFGNAVLDGIDFHIEHGGPSQYQLLANILSSFRLAGTEFALTAAPQCVYPDPNLGTVINSATFDAIWVQFYNNPQCSYSSGNAEALMNAWREWSMKARTKKVFLGFPAHPDAAGSGYMPPEKVKFHVFPAAKKSYKFGGIMLWDSYWDTVSNFSSKILGEGW

SEQ ID NO: 9955 - protein, 367 aa, Borrelia hermsii DAH
MKRDYYEILGLSKGASRDEIKKAYRKIAIKYHPDKNKDNKEAESIFKEATEAYEVLGDDNKRAQYDRFGHTAFEGGGTSGFNGFSSGFSGFSDIFEDFGDIFDSFFTGKRGQDKNRQHEKGQDITYQIEISLEDAYLGYNNNINIARNMLCESCLGKKSEKGTSPSICNVCNGSGRVMQGGGFFRVTTTCPKCYGNGKIISNPCKSCKGTGSLKYKETIELKIPAGIDDSQQIKIRGKGSVNPDNQQYGDLYIRVSIKPHKIFKRNGKDLYATLPISFTQAALGKEIKIQTIAAKKIAIKIPKGTENDEQIIIKNEGMPILHTEKFGNLILIIKIKTPKNLSHNATCLLEDLSKEIKDIDEITLNKV

SEQ ID NO: 9956 - protein, 423 aa, Mesorhizobium sp. HB5A4
WGFDGSSTQQAEGHSSDCVLKPVAVYPDPARTNGVLVMCEVMMPDGVTPHASNKRATILDDEGAWFGFEQEYFFYKDGRPLGFPESGYPAPQGPYYTGVGYSNVGSVARQIVEEHLDLCLAAGINHEGINAEVAKGQWEFQIFGKGSKKAADQMWMARYLMQRLTEKYGIDIEYHCKPLGDTDWNGSGMHANFSTAYMREVGGKAYFEALMAAFDKNLMDHIAVYGPDNDKRLTGKHETAPWNRFSYGIADRGASIRVPHSFVKNDYKGYLEDRRPLGANEQVVEIETVPTGSLGLDIALGVGGLPRGRIIEIYGPESSGKTTLALHTVAEAQKKGGICAFVDAEHALDPVYARKLGVDLENLLISQPDTGEQALEICDTLVRSGAIDVLVVDSVAALTPRAEIEGEMGDSLPGLQARLMSQA

SEQ ID NO: 9957 - protein, 273 aa, Hevea brasiliensis
GGIAIYWGQNGNEGTLTQTCSTRKYSYVNIAFLNKFGNGQTPQINLAGHCNPAAGGCTIVSNGIRSCQIQGIKVMLSLGGGIGSYTLASQADAKNVADYLWNNFLGGKSSSRPLGDAVLDGIDFAIAHGSTLYWDDLARYLSAYSKQGKKVYLTAAPQCPFPDRYLGTALNTGLFDYVWVQFFNNPPCQYSSGNINNIINSWNRWTTSINAGKIFLGLPAAPEAAGSGYVPPDVLISRILPEIKKSPKYGGVMLWSKFYDDKNGYSSSILDSV

SEQ ID NO: 9958 - protein, 407 aa, Zea mays; identical to SEQ ID NO: 9532

SEQ ID NO: 9959 - protein, 153 aa, Oryza sativa
MAGKNGSLYAVLGVASDCSDADLRTAYRKLAMKWHPDKCGAAGSSAGGGAEAAKVRFQKIQGAYAVLSDPNKRILYDVGAYDSDGDDDGAGEILGDILEAMNKTGPTENGKNESFEDLQRQFEELFLRPPTSSSFRSAQEDAGKSSKRGAGRT

SEQ ID NO: 9960 - protein, 96 aa, Zea mays
  misc_feature (86)..(86): Xaa can be any naturally occurring amino acid
PLGEGFVIRPPSRGNPGNPSIELGPEFKKGANFLGRVKAPPPKVELSSLKGFGEVWFGSGIPPKGKGAIFPQPGGKLGIPKGEGLXNKEVNGPEGF

SEQ ID NO: 9961 - protein, 192 aa, Ralstonia eutropha JMP134
MTLYATLGVESDATLDEIKRAYRRAAMKWHPDRNPGREAEAHLAFQEIRDAYAILSDETQRRVYDDVFAQEMRRWQAEHAAQEEQEQAAQREAQRLAQEHYEKMVVIAMRFADDGHNRDVLFGVLLGHDCEAELAGRIADSVWALQESRKAQPEAEEEAAPEIGPEEDAAKRTSRHPGAFESFWQGLFGIRT

SEQ ID NO: 9962 - protein, 417 aa, Physcomitrella patens subsp. patens
KRSAVYLQQRKYREALVDLDRALSVDSTFFQGYLNRGRLLRQMCRFKEAEKDFDKVLELKPGHSHGTKDLKQSVHAAALLEKATALFDAEDFDQAAEALENVLDISSECAQARLLRAKLALKKKDFSDAVAEAGRVLKLDDGDLDALLVRGNAYFYLADHDVALRHYQSGLRLDPEHGELKKQYFKLKLLLRKTKAAEEALEKNKLRTAVEAYYAALEVVPDHDLHNIKLNMGLCKALVKLGRGKDAVTRCSLVVGMDSASVEALQQRAEARLLVEDWEGAVADFKAAIEQNPQDHDLREGLHRAEHALKLSKRKDWYKILGLTNTASAAEIKRAYKKLALQWHPDKNQDNKEEAENKFREVAEAYEVLGNEEKRERYDRGEDMEEQQMGGGHGYNPFNGGGQTFSFQFEGGFPGGG

SEQ ID NO: 9963 - protein, 1171 aa, Oryza sativa Indica Group
MASGSRATPTRSPSSARPAAPRHQHHHSQSSGGSTSRAGGGGGGGGGGGGGAAAAESVSKAVAQYTLDARLHAVFEQSGASGRSFDYTQSLRASPTPSSEQQIAAYLSRIQRGGHIQPFGCTLAVADDSSFRLLAYSENTADLLDLSPHHSVPSLDSSAVPPPVSLGADARLLFAPSSAVLLERAFAAREISLLNPLWIHSRVSSKPFYAILHRIDVGVVIDLEPARTEDPALSIAGAVQSQKLAVRAISRLQALPGGDVKLLCDTVVEHVRELTGYDRVMVYRFHEDEHGEVVAESRRNNLEPYIGLHYPATDIPQASRFLFRQNRVRMIADCHAAPVRVIQDPALTQPLCLVGSTLRSPHGCHAQYMANMGSIASLVMAVIISSGGDDDHNISRGSIPSAMKLWGLVVCHHTSPRCIPFPLRYACEFLMQAFGLQLNMELQLAHQLSEKHILRTQTLLCDMLLRDSPTGIVTQSPSIMDLVKCDGAALYYHGKYYPLGVTPTEVQIKDIIEWLTMCHGDSTGLSTDSLADAGYPGAAALGDAVSGMAVAYITPSDYLFWFRSHTAKEIKWGGAKHHPEDKDDGQRMHPRSSFKAFLEVVKSRSLPWENAEMDAIHSLQLILRDSFRDSAEGTSNSKAIVNGQVQLGELELRGIDELSSVAREMVRLIETATVPIFAVDTDGCINGWNAKVAELTGLSVEEAMGKSLVNDLIFKESEETVNKLLSRALRGDEDKNVEIKLKTFGPEQSKGPIFVIVNACSSRDYTKNIVGVCFVGQDVTGQKVVMDKFINIQGDYKAIVHNPNPLIPPIFASDENTCCSEWNTAMEKLTGWSRGEVVGKLLVGEVFGNCCRLKGPDALTKFMIVLHNAIGGQDCEKFPFSFFDKNGKYVQALLTANTRSRMDGEAIGAFCFLQIASPELQQAFEIQRHHEKKCYARMKELAYIYQEIKNPLNGIRFTNSLLEMTDLKDDQRQFLETSTACEKQMSKIVKDASLQSIEDGSLVLEKGEFSLGSVMNAVVSQVMIQLRERDLQLIRDIPDEIKEASAYGDQYRIQQVLCDFLLSMVRFAPAENGWVEIQVRPNIKQNSDGTDTMLFPFRFACPGEGLPPEIVQDMFSNSRWTTQEGIGLSICRKILKLMGGEVQYIRESERSFFHIVLELPQPQQAASRGTS

SEQ ID NO: 9964 - protein, 394 aa, Nassella viridula
EPARTEIPALSIAGAVQSQKLAVRAISRLQALPGGDVKLLCDTVVEHVRELTGYDRVMVYKFHDDEHGEVLAESRRADLEPYLGLHYPATDIPQASRFLFRQNRVRMIADCHAAPVRVIQDPAMQQPLCLVGSTLRSPHGCHAQYMANMGSIASLVMAVIISSGGDDEHNMGRGTIPSAMKLWGLVVCHHTSPRCIPFPLRYACEFLMQAFGLQLNMELQLAHQLSEKHILRTQTLLCDMLLRDSPTGIVMQSPSIMDLVKCDGAALYYHGKYYPLGVTPIEAQIKDIIEWLTVCHGDSTGLSTDSLADAGYSGATALGDAVCGMAVAYITPSDYLFWFRSHTAKEIKWGGAKHHPEDKDDGQRMHPRSSFKAFLEVVKSRSLPWENAEMDAIH

SEQ ID NO: 9965 - protein, 273 aa, Hevea brasiliensis
GGIAIYWGQNGNEGTLTQTCSTRKYSYVNIAFLNKFGNGQTPQINLAGHCNPAAGGCTIVSNGIRSCQIQGIKVMLSLGGGIGSYTLASQADAKNVADYLWNNFLGGKSSSRPLGDAVLDGIDFAIEHGSTLYWDDLARYLSAYSKQGKKVYLTAAPQCPFPDRYLGTALNTGLFDYVWVQFFNNPPCQYSSGNINNIINSWNRWTTSINAGKIFLGLPAAPEAAGSGYVPPDVLISRILPEIKKSPKYGGVMLWSKFYDDKNGYSSSILDSV

SEQ ID NO: 9966 - protein, 394 aa, Olyra latifolia
EPARTEDPALSIAGAVQSQKLAVRAISRLQALPGGDVKLLCDTVVEHVRELTGYDRVMVYRFHEDEHGEVVAESRRADLEPYLGLHYPATDIPQASRFLFRQNRVRMIADCHAAPVKVIQDSALQQPLCLVGSMLRAPHGCHAQYMANMGSIASLVMAVIISSGGDDEHNITRGGIPSAMKLWGLVVCHHTSPRCIPFPLRYACEFLMQAFGLRLNMELQLAHQLSEKHILRTQTLLCDMLLRDSPTGIVTQSPSIMDLVKCDGDALYYHGKYYPLGVTPTEVQIKDIIEWLTVCHGDSTGLSTDSLADAGYPGAAALGDAVCGMAVAYITPSDYMFWFRSHTAKEIKWGGAKHHPEDKDDGQRMHPRSSFKAFLEVVKSRSLPWENAEMDAIH

SEQ ID NO: 9967 - protein, 273 aa, Hevea brasiliensis
GGIAIYWGQNGNEGTLTQTCSTRKYSYVNIAFLNKFGNGQTPQINLAGHCNPAAGGCTIVSNGIRSCQIQGIKVMLSLGGGIGSYTLASQADAKNVADYLWNNFLGGKSSSRPLGDAVLDGIDFAIAHGSTLYWDDLARYLSAYSKQGKKVYLTAAPQCPFPDRYLGTALNTGLFDYVWVQFYNNPPCQYSSGNINNIINSWNRWTTSINAGKIFLGLPAAPEAAGSGYVPPDVLISRILPEIKKSPKYGGVMLWSKFYDDKNGYSSSILDSV

SEQ ID NO: 9968 - protein, 430 aa, Arabidopsis thaliana; identical to SEQ ID NO: 7232

SEQ ID NO: 9969 - protein, 393 aa, Panicum capillare
EPARTEAPALSIAGAVQSQKLAVRAISRLQALPGGDVKLLCDTVVEHVRELTGYDRVMVYRFHEDEHGEVVAECRRDNLEPYLGLHYPATDIPQASRFLFRQNRVRMIADCHATPVRVIQDPGLSQPLCLVGSTLRAPHGCHAQYMANMGSIASLVMAVIISSGGDDEQTARGGISSAMKLWGLVVCHHTSPRFIPFSLRYACEFLMQAFGLQLNMELQLAHQLSEKHILRTQSLLCDMLVRDSPTGIVTQSRSIMDLVKCDGAALYYHGKYYPLGVTPTESQIKDIIEWLTVCHGDSTGLSTDSLADAGYHGAAALGDAVCGMAVAYITPSDYLFWFRSHTAKEIKWGGAKHHPEDKDDGQRMHPRSSFKAFLEVVKSRSLPWENAEMDAIH

SEQ ID NO: 9970 - protein, 394 aa, Pariana radiciflora
EPARTEDPAISIAGSVQSQKLAVRAISRLQALPGGDVKLLCDTVVEDIRELTGYDRVMVYRFHEDEHGEVVAESRRADLEPYLGLHYPATDIPQASRFLFRQNRVRMIADCHTAPVRVIQDPALPQPLCLVGSTLRAPHGCHAQYMANMGSIASLVMAVIISSGGDDSHNSSRGGIPSAMKLWGLVVCHHTSPRCIPFPLRYACEFLMQAFGLQLNMELQLAHQLSEKHILRTQTLLCDMLLRDSPTGIVTQSPSIMDLVKCDGAALYYHGKYYPLGVTPTEAQIKDIIEWLTLCHGDSTGLSTDSLADAGYPGAAALGDAVCGMAVAYITPSDYLFWFRSHTGKEIKWGGAKHHPEDKDDGQRMHPRSSFKAFLEVVKSRSLPWENAEMDAIH

SEQ ID NO: 9971 - protein, 179 aa, Triticum aestivum
LRGHEVDAFGIGTYLVTCYSQAALGCVFKLVEINSRPRIKLSEDVAKVSIPCKKRCFRLYGKEGYPLVDIMIRESEPSPKAGERILCRHPFLESKRAYVVPQHVEELLHCYWPGSSDKPRAELPPLLKIRSRCMQQLEKLRPDHIRRLNPTPYKVSVSAKLYEFIHYLWLNEAPVGELQ

SEQ ID NO: 9972 - protein, 357 aa, Lagenidium giganteum
MSKFDRAVYDRYMDIEVDSNIVLAEYIWIGGSGEDLRSKTRTFNFIPKSPWELPIWNFDGSSTGQAPGEDSEVLLRPQAIFKDPFRGGNNILVICDCLKPDMTPIANNTRQDAARVMKAAEAHEPWFGIEQEYTLFEADKVTPYGWPKGGFPGPQGPYYCGAGAHSVFGRPIVDAHYRACLYAGIKVSGVNAEVMPGQWEFQVGPCVGIESGDHLWCARYILLRVCEDFGVNVSWDPKPIPGDWNGAGCHTNYSTKKMREDGGMAHIIEAIEKMKLKHKVHIAAYGSGNERRLTGRHETASIDQFSYGVANRGASIRIPRSAEADGKGYFEDRRPSSNMDPYTVTARIVKTTILDEP

SEQ ID NO: 9973 - protein, 353 aa, Pennisetum alopecuroides
TGYDRVMVYRFHEDQHGEVVAECRRDNLEPYLGLHYPATDIPQASRFLFRQNRVRMIADCHATPVRVIQYPGLSQPLCLVGSTLRAPHECHAQYMANMGSIASLVMAVIISSGGDDEQTTRGGISSAMKLWGLVVCHHTSPRFIPFPLRYACEFLMQAFGLQLNMELQLAHQLSEKHILRTQTLLCDMLLRDSPTGIVTQSPSIMDLVKCDGAALYYHGKYYPLGVTPTESQIKDIIEWLTVCHGDSTGLSTDSLADAGYHGAAALGDAVCGMAVAYITPSDCLFWFRSHTAKEIKWGGAKHHPEDKDDGQRMHPRSSFKAFLEVVKSRSLPWENAEMDAIHSLQLILRDSFR

SEQ ID NO: 9974 - protein, 356 aa, Leptolegnia chapmanii
MSKLDRAVYDKYMELDTGSFIQAEYVWVGGSGEDLRCKTRTLDKYPASVEELPIWNFDGSSTGQAPGADSEVMLKPAAIYKDPFRRGNHILVMCDCYKPDMTPIPSNTRFDAARVMKACEKEVPWFGIEQEYTLFEADKVTPYGWPKGGFPGSQGPYYCGAGAHSAFGRLIADAHYRACLYAGIRCSGINAEVMPGQWEYQVGPCTGIEAGDQMWISRYILLRVCEDFGVIVSFDPKPIPGDWNGAGCHTNVSTKAMREDGGMKHIIEALEKLKLKHKEHIAAYGTGNERRLTGRHETASIDQFSYGVANRGASVRIPRTAEADGKGYFEDRRPASNMDPYVVTGRIMKTISLNEA

SEQ ID NO: 9975 - protein, 395 aa, Peridictyon sanctum
EPARTEDPALSIAGAVQSQKLAVRAISRLQALPGGDVKLLCDTVVEHVRELTGYDRVMVYKFHDDEHGEVLAESRRVDLEPYLGLHYPATDIPQASRFLFRQNRVRMIADCHAAPVRVIQDPAMPQPLCLVGSTLRSPHGCHAQYMANMGSIASLVMAVIISSGGEDEHNMTRGVIPSAMKLWGLVVCHHTSPRCIPFPLRYACEFLMQAFGLQLSMELQLAHQLSEKHILRTQTLLCDMLLRDSPTGIVTQSPSIMDLVKCDGAALFYHGKYYPLGVVTPTEAQIKDIIEWLTVCHGDSTGLSTDSLADAGYPGATALGDAVCGMAVAYITPSDYLFWFRSHTAKEIKWGGAKHHPEDKDDGQRMHPRSSFKAFLEVVKSRSLPWENAEMDAIE

SEQ ID NO: 9976 - protein, 465 aa, Oryza sativa Japonica Group; identical to SEQ ID NO: 6326

SEQ ID NO: 9977 - protein, 394 aa, Phalaris arundinacea
EPASTEDPALSIAGAVHSQKLAVRAISRLQALPGGDVKLLCGTVVEHVRELTSYDRVMVYKFHDDEHGEVLAESRRADLEPYLGLHYPATDIPQASRFLFRQNRVRMIADCHAAPVRVIQDPAMPQPLCLVGSTLRSPHGCHAQYMANMGSIASLVMAVIISSGGEDEHSMGRGAVPSAMKLWGLVVCHHTSPRCIPFPLRYACEFLMQAFGLQLNMELQLAHQLSEKHILRTQTLLCDMLLRDSPTGIVTQSPSIMDLVKCDGAALYYHGKCYPLGITPTEAQIKDIIEWLTVCHGETTGLSTDSLADAGYPGATALGDAVCGMTVAYITPSDYLFWFRSHTAKEIKWGGAKHHPEDRDDGQRMHPRSSFKAFLEVVKSRSLPWENAEMDAIH

SEQ ID NO: 9978 - protein, 369 aa, Oryza sativa Japonica Group; identical to SEQ ID NO: 6445

SEQ ID NO: 9979 - protein, 504 aa, Coprinopsis cinerea okayama7#130
MSASLMPRSDSFNARVRGTSHIDFKTATTGVAAKSMRNEISRLVSTVEDPATKKAFDTEMQSFFYLFTRYLSERAKSVELDWDRIKSPAADQIIPYSDLPSPSDTKNLDKLAVLKVNGGLGTSMGMTGAKSALEVKDDMTFLDLTVRQIEHLNTTNRVDVPLILMTSFNTHEDTLRIIKKYANQQLRITTFNQSRYPRIYKESLLPCPKRADDDKSHWYPPGHGDLYNALLHSGVLDQLLAEGKEYLFVSNSDNLGAVVDEKILQHMIDTKAEFLMEVTDKTKADVKGGTLIDYEGSIRLLEIAQVPSEHVEDFKSVRKFKIFNTNNLWINLKALKRVMENEGLELDIIVNPKITDEGHAVIQLETAAGAAIKHFKNAHGVNVPRSRFLPVKSCSDLLLIKSDIYSLQHGQLVINPQRMFETTPVIKLGDHFKKIQQFQKRFKKIPKILELDHLTVTGDVYFGRNVTLRGTVIVVANEGQRIDIPDGCVLENRLLSGNLNMIEL

SEQ ID NO: 9980 - protein, 394 aa, Pharus lappulaceus
EPARTEDPALSIAGAVQSQKLAVRAISRLQALPGGDVKLLCDTAVEHVRELTGYDRVMVYRFHDDKHGEVVAESRRDDLEPYLGLHYPETDIPQASRFLFRQNRVRMIADCHAAPVRVIQDPALPQPLCLVGSTLRAPHGCHAQYMANMGSIASLVMAVIISSGGDDEHNVARGAISSAMKLWGLVVCHHTSPRCIPFPLRYACEFLMQAFGLQLNMELQLAHQLSEKHILRTQTLLCDMLLRDSPTGIVTQSPSIMDLVKCDGAALYYHGKYYPLGVTPTEAQIKDIIEWLTLCHGDSTGLSTDSLADAGYPGAAALGDAVCGMAVAYITPSDYLFWFRSHTAKEIKWGGAKHHPEDKDDGQRMHPRSSFKAFLEVVKSRSLPWENAEMDAIH

SEQ ID NO: 9981 - protein, 204 aa, Mesorhizobium plurifarium
TLEQLPLWGFDGSSTNQAEGRSSDCVLKPVAVYPDPARTNGVLVMCEVMMPDGVTPHASNSRATILDDEDAWFGFEQEYFFYKDGRPLGFPESGYPAPQGPYYTGVGFKNVGDIARQLVEEHLDLCLAAGINHEGINAEVAKGQWEFQIFGKGSRKAADQMWMARYLLLRLTEKYGIDIEFHCKPLGDTDWNGLGACKNDVEGE

SEQ ID NO: 9982 - protein, 388 aa, Phragmites australis
EDPALSIAGAVQSQKLAVRAISRLQALPGGDVKLLCDTVVEHVRELTGYDRVMVYRFHEDEHGEVVAESRRADLETYLGLHYPATDIPQASRFLFRQNRVRMIADCHATPVRVIQDPGLPQPLCLVGSTLRAPHGCHAQYMANMGSIASLVMAVIISSGGDDEQTARGSISSTMKLWGLVVCHHTSPRFIPFPLRYACEFLMQAFGLQLNMELQLAHQLSEKHILRTQTLLCDMLLRDSPTGIVTQSPSIIDLLKCDGAALYYHGKYYPLGVTPTEFQIKDIIEWWTVCHGDSTGLSTDSVADAGYLGASALGDAVCGMAVAYITSSDYLFWFRSHTAKEIKWGGAKHHPEDKDDGQRMHPRSSFKAFLEVVKSRSLPWENAEMDAIH

SEQ ID NO: 9983 - protein, 394 aa, Pseudosasa japonica
EPARTEDPALSIAGAVQSQKLAVRAISRLQALPGGDVKLLCDTVVEHVRELTGYDRVMVYRFHDDEHGEVVAESRRADLEPYLGLHYPATDIPQASRFLFGQNRVRMIADCRAAPVGVIQDPVLPQPLCLVGSTLRAPHGCHAQYMANMGSIASLVMAVIISSGGDDENNITRGGIPSAMKLWGLVVCHHTSPRCIPFPLRYACEFLMQAFGLQLNMELQLAHQLSEKHILRTQTLLCDMLLRDSPTGMVTQSPSIMDLVKCDGAALYYHGKYFLLDVTPTEAQIKDIIEWLTMCHGDSTGLSTDSLADAGYPGAAALGDAVYGMAVAYITPTDYLFWFRSHTAKEIKWGGAKHHPDDKDDGQRMHPRSSFKAFLEVVKSRSLPWENAEMDAIH

SEQ ID NO: 9984 - protein, 165 aa, Oryza sativa Indica Group
MAGKNGSLYAVLGVASDCSDADLRTAYRKLAMKWHPDKCGAAGSSAGGGAEAAKVRFQKIQGAYAVLSDPNKRILYDVGAYDSDGDDDGAGEILGDILEAMNKTGPTENGKNESFEDLQRQFEELFLRPPTSSSFRSACSRRPSFVLIIKLIDQEENDSDNDMTH

SEQ ID NO: 9985 - protein, 382 aa, Idiomarina baltica OS145
MAQDYYQILGVGKDANERDIKKAYKRMAMKYHPDRTKGDKELEAKFKEIKQAYEVLSDPQKRQMYDQYGHEAFQQARQGGGAGSGGFGGGGADFADIFGDVFGDIFGGGRRQQARPQRGADLRYNLEMSLEDAVKGKEVELQIPTMVECEDCDGSGAKKGTRPETCSHCHGSGQIQMRQGFFAVQQACPHCRGTGSIIKDPCNTCHGQGRVEKTKKLSVKIPAGVDTGDRIRLANEGEAGEKGAPAGDLYVQVHVREHPIFARDGNNLYCEVPVSFTKAALGGEIEVPTLEGKVKLKVPKETQTGKHFRLRGKGVKSVRTGAVGDLICKVVIETPVNLSSRQRELLEELESSMGHGDEAAKFRPKEKGFFDGVKQFFDDLRS

SEQ ID NO: 9986 - protein, 117 aa, Glycine max
KKWHPDRWIKDPKLALEAKNRFLRVQEAYSVLSNKGKRRIYDAGLFGLIGEDDDEGFLDFMQEMALMMQKVRPKDEKGMLEDLQGLLTDKMADNEGMEKSGLSWNSSPCPTKRARIL

SEQ ID NO: 9987 - protein, 73 aa, Sinningia schiffneri
ISGTNGEVMPGQWEFQVGPSVGIEAGDHIWCSRYLLERITEQAGVVLSLDPKPIEGDWNGAGCHTNYSTKSMR

SEQ ID NO: 9988 - protein, 175 aa, Zea mays
MEHKEAGCQAPEGPILCINNCGFFGSAATMNMCSKCHKEMITKQDQAKLAASSIDSIVNGSDAVMEPVVAGSNTVVAVAQVELQTMNVQQPADVAGPSEGVAAAISKGGKVGPNRCSACRKRVGLTGFNCRCGNLYCALHRYSDKHDCKFDYRAAARDAIAKANPVVKADKLDKI

SEQ ID NO: 9989 - protein, 347 aa, Arabidopsis thaliana; identical to SEQ ID NO: 8287

SEQ ID NO: 9990 - protein, 397 aa, Hypocrea virens
MPSLSFTAALGLLSLLPAAQAGWNQNSNNNIVVYWGQNSGSVGQNRLSYYCQNAPDVDVINISFMVGITNLNLNLANVGNNCTSFPQAPNLLNCPQVAADIVECQQTYGKTIMMSLFGSTYSESGFSSSSAAVSAAQEIWAMYGPVQSGNSTPRPFGNAVVDGFDFDLEDPIENNMEPFAAELKTLMNANTSKKFYLSAAPQCPYPDVSDQSFLNGQVAFDWVNVQFYNNGCGVSHYPTDFNWATWDNWAKTVSANKNAKVLIGTPANVGGANAGSFPTDSQLSGAINLAKGSSSFGGVMLWDMAQLFSNTGYLAKIVADLGGSSSPPPPPPPSTTLATVTRTSTASTGPTSSPPSGGNGGSVPQWGQCGGNGYTGPTQCQAPFKCVVESEWWSSCQ

SEQ ID NO: 9991 - protein, 129 aa, Glycine max
  misc_feature (12)..(12): Xaa can be any naturally occurring amino acid
  misc_feature (26)..(26): Xaa can be any naturally occurring amino acid
  misc_feature (73)..(73): Xaa can be any naturally occurring amino acid
VPRSRFLPVKSXSDVLLIKSGLHTMXHGQLTMNKARQFSGTPVIKLGDQFKKVSGFERRVKGGLNSVEPDHLXTVSGDVHIGKNCTFAGTVIIIATGGNKITIPDGSRLENKLVTGSLAIIDHYRVRSL

SEQ ID NO: 9992 - protein, 474 aa, Physcomitrella patens subsp. patens
MASAVLDAPATTKVDQLDRIRLELATLNQISDNEKQGFLKLIGRYLSGKSEAIQWENIKAPTDEVVVPYDKLADFSDDPVKIKSLLDKLAVLKLNGGLGTTMGCTGPKSVIEVRNGLTFLDLIVKQIENLNHTYNANVPLVLMNSFNTHEDTLQIVERYADSKLEVITFNQSQYPRVVAEDMVPWPAKGKTDNAGWYPPGHGDVFPSLANTGKLDELIAQGKEYVFIANSDNLGAIVDLKILNHLVENQNEYCMEVTPKTLADVKGGTLISYEDRVQLLEIAQVPDEHVNEFKSIDKFKIFNTNNMWVNLKAIKRLVEADALQMEIIPNPKEVDGVKVLQLETAAGAAIRFFDRAIGVNVPRSRFLPVKATSDLLLVQSDLYTVQNGAVVRNRARTIPQNPSIELSGEFKKVGDFLKRFKSIPSIIELDSLKVSGDVWFGENIVLKGKVIVEAAKGEKLVLPDDATIEDKVVKE

SEQ ID NO: 9993 - protein, 321 aa, Hypocrea virens
MPSLTALASLLALVPSALAGWNANSKQNIAVYWGQNSANSQSTQQRLSFYCNDANINVIDIAFLNGITPPMTNFANAGDRCTPFSDNPWLLSCPEIEADIKTCQANGKTIILSLGGDSYTQGGWSSASAAQSAANQVWAMFGPVQSGSTVHRPFGSAVVDGFDFDFEATTNNLAAFGTQLKSRTNAAGGKKYYFSAAPQCFFPDAAVGALINAVPMDWIQIQFYNNPCGVSGFTPGTSTQNNYNYQTWENWAKTSPNPNVKLLVGIPAGPTAGRGYVSGSQLTSVFQYSKQFSTFAGAMMWDMSQLFQNTGFEAQVVNALK

SEQ ID NO: 9994 - protein, 126 aa, Mesorhizobium septentrionale
SKKAADQMWMARYLMQRLTEKYGIDIEYHCKPLGDTDWNGSGMHANFSTAYMREVGGKAYFEALMAAFDKNLMDHIAVYGPDNDKRLTGKHETAPWNKFSYGIADRGASIRVPHSFVNNGYKGYLK

SEQ ID NO: 9995 - protein, 73 aa, Sinningia araneosa
ISGTNGEVMPGQWEFQVGPSVGIEAGDHIWCARYLLERITEQAGVVLSLDPKPIEGDWNGAGCHTNYSTKSMK

SEQ ID NO: 9996 - protein, 263 aa, Mesorhizobium temperatum
QAEGHSSDCVLKPVAIYPDPARTNGVLVMCEVMMPDGVTPHASNKRATILDDEGAWFGFEQEYFFYKDGRPLGFPESGYPAPQGPYYTGVGYSNVSSVARQIVEEHLDLCLAAGINHEGINAEVAKGQWEFQIFGKGSKKAADQMWMARYLMQRLTEKYGIDIEYHCKPLGDTDWNGSGMHANFSTAYMREVGGKDYFEALMAAFDKNLMDHIAVYGPDNDKRLTGKHETAPWNRFSYGIADRGASIRVPHSFISNGYKGYLE

SEQ ID NO: 9997 - protein, 425 aa, Triticum aestivum; identical to SEQ ID NO: 714

SEQ ID NO: 9998 - protein, 291 aa, Citrullus lanatus
MASHKITTTLSIIFLLSSIFRSSDAAGIAIYWGQNGNEGSLASTCATGNYKFVNIAFLSSFGNGQTPVLNLAGHCNPDNNGCAFLSDEINSCKSLGIKVLLSIGGGAGSYSLSSAEDARDVANFLWNNFLGGQSSSRPLGDAVLDGIDFDIESGSGQWWDELARQLKGFGQVLLSAAPQCPIPDAHLDAAIKTGLFDFVWVQFYNNPPCMFADNADNLLNSWSQWTTFPAASLFMGLPAAPEAAPSGGFIPADVLISQVLPTIKTSSNYGGVMLWSKAFDSGYSDAIKGSI

SEQ ID NO: 9999 - protein, 349 aa, Physcomitrella patens subsp. patens
MRIWNIFVFLLLFSASTVEVVSAGKSYYDILQVSKQATDDQIKRAYRKLALKFHPDKNPGNEEATKKFAEINNAYEVLSDREKRGVYDQYGEEGLKQQQQGGGRGGGGFGQDIFSQFFGGGFRFGGEEDEEEKTLKGDDVTVEIYATLKDLYVGNSYQIWRDKNVVKPAAGKRKCNCKNKVVHRQIGPGMYQQYTEQVCQECPNVKFERVTQSLTVDIEKGMRDGQEIVFYEDGEPVIDGEPGDLKFIIRTKPDSRFRREGNDLHITVTITLLDALVGFKKDIAHLDGHKVAVGSALVTKPKETRKFPREGMPLFDSDKKGDLFVTFEVVFPSSLTDEQKSVISKTLRA

SEQ ID NO: 10000 - protein, 432 aa, Zea mays
MADEKLAKLREATAGLTQISENEKSGFLSLVGRYLSGDEEHIEWAKIHTPTDEVVVPYDTLESPPEGTEATKKLLDKLAVLKLNGGLGTTMGCTGPKSVIEVRNGFTFLDLIVIQIESLNKKYGSNVPLLLMNSFNTHDDTLKIVEKYTNSSIEIHTFNQSQYPRVVADEFLPWPSKGKTDKDGWYPPGHGDIFPSLMNSGKLDLLLSQVTPKTLADVKGGTLISYEGRVQLLEIAQVPDAHVNEFKSIEKFKIFNTNNLWVNLKAIKRLVEADALKMEIIPNPKEVDGVKVLQLETAAGAAIRFFDHAIGINVPRSRFLPVKATSDLQLVQSDLYTLVDGFVTRNSARTNPSNPSIELGPEFKKVGSFLGRFKSIPSIVELDSLKVSGDVWFGSGIVLKGKVTITAKPGVKLEIPDGAVIGNKDISGPEDL

SEQ ID NO: 10001 - protein, 69 aa, Oryza sativa
EILGVPSDCSFDKLRQNYRKLLLEYHPDKHLSNDIEKQKRFEDIQQAYMILSNSNSRLKYDQEQERIQL

SEQ ID NO: 10002 - protein, 392 aa, Asarum canadense
DLEPVNPSDVPVTAAGALKSYKLAAKAISKLQSLPSGNISLLCDVVVREVSDLTGYDRVMAYKFHEDEHGEVIAECKISDLEPYHGLHFPATDIPQASRFLFMKNKVRMICDCSAPPVKVIQDKRLAQPISLGGSTLRAPHGCHAQYMANMGSIASLVLSVTISEDDDETCDKQKGRKLWGLVVCHHTSPRFIPFPLRYACEFLIQVFGIQLNKEVELAAQMRETHILRTQIMLCDMLLRDAPMTIVTQSPNVMDLVRCDGAALYYRKESWLLGVTPTKAQIQDLAEWLLKYHNGTTGLSTDSLVEAGYPRAHNLGDMVCGMAAVRITSQDFLFWFRSHTGKEVKWGGAKHDPADKDDDRGKMHPRSSFKAFMEVMKRRSLPWEDMEMDAIQ

SEQ ID NO: 10003 - protein, 193 aa, Taxus baccata
DEHGEVVAEIRRSDLEPYLGLHYPATDIPQASRFLFMQNRVRMICDCRATPVKVIQSGELKQPLCLVGSTLRAPHGCHAQYMANMGSIASLVMAVIVNGNGNGNDEDGGGGSGRSSMKLWGLVVCHHTSPRAVPFPLRSACEFLMQTFGLQINMELQLAAQLIENNILRTQTLLCDMLLRDAPIGILTQSPSI

SEQ ID NO: 10004 - protein, 302 aa, Arabidopsis thaliana
MTNMTLRKHVIYFLFFISCSLSKPSDASRGGIAIYWGQNGNEGNLSATCATGRYAYVNVAFLVKFGNGQTPELNLAGHCNPAANTCTHFGSQVKDCQSRGIKVMLSLGGGIGNYSIGSREDAKVIADYLWNNFLGGKSSSRPLGDAVLDGIDFNIELGSPQHWDDLARTLSKFSHRGRKIYLTGAPQCPFPDRLMGSALNTKRFDYVWIQFYNNPPCSYSSGNTQNLFDSWNKWTTSIAAQKFFLGLPAAPEAADSGYIPPDVLTSQILPTLKKSRKYGGVMLWSKFWDDKNGYSSSILASV

SEQ ID NO: 10005 - protein, 499 aa, Schizosaccharomyces pombe
MLHRRIHFKSQSTLDFDSVAVSISASTMKNELDKLVLNSRVSDKKTFGIQMDNFFALYRRYLLHTVKGYECDWDSIRPLGPEDMIDYGDLPLCKNAGKYLNRLAVVKLNGGMGNALGVNYPKAMIEVRDNQSFLDLSIRQIEYLNRRYDVSVPFILMNSYDTNDETCKVLRKYAGCKIDISTFEQSRYPRVFVDSQLPVPKAAPSPIEEWYPPGHGDIFDALVHSGTIERLLAQGKDYLFVSNIDNLGASVDLNILSHVIDNQIEYSMEITDKTKADIKVGILVNQDGLLRLLETNQVPEQHREEFMSDKVFKYINTNNVWLYLPAVKRVVENRELNLDIMPNIETVYYNNEPARIIEFTTAIGSAISQFKKTEGIRVSRPRFISVKNSSDLFLVRCDLYNVDHGSLKIEESRLGFPPPVVRMSNEFKDIAELFCRIPYMPSMKDLVSLSISGNVYFGRNVILKGNIVIVASENTILCIPSNAVLENCVVTGNCKIMEC

SEQ ID NO: 10006 - protein, 1117 aa, Adiantum capillus-veneris
MSSTRHSYSSGGSGKSKHGRRIAQTSANAKLYAAYEESSESGSFDYSQSVSAGKEGISSQLVTAYLQRMQRGGLVQQFGCLIAVEEETFRVLHMCEAPEMLDVATQAVPTMGQYSRLCIGADVRTLLSPASASALDRVIGVVDVSMFNPITVQSRSSGKPFYAILHRNDVGLVIDLEPIRPDDASITGGALQSHKLAAKAIARLQSLPGGDIGLLCDSVVEEVHELTGFDRVMAYKFHEDEHGEVVAEIRRTDLEPYIGLHYPATDIPQAARFLFMKNRVRMICDCRLPPVKLIQDKTLSQPMSLTGSTLRAPHGCHTQYMANMNSISSLVMAVIVNDSDDDSAGHSSQGIKLWGLVVCHHTSPRYVPFPVRSACEFLMQVFSLQLNMEVGMAAQVREKHILRTQTLLCDMLLRDAPIGIVSQSPNIMDLVTCDGAALYYGKKCWLLGTTPTEAQIVDIAAWLLDCHKDSTGLSTDSLAKTGYPEASCLGDAVCGLAAAKITATDFLFWFRSHTAKEVRWGGARHDPEERDDGRRMHPRSSFKAFLEVVKQQSLPWEDVEMDAIHSLQLILRGSFQDIDDSNTKTMIHARLNDLKLQGLDELSTVASEMVRLIETATAPILAVDGQGLINGWNGKVAELTGLSFETAMGKSLAKELVHEESKTIVERVLHLALEGEEEQDIEIHLRTYDQHKQKGVVILIVNTCCSRDVSNNVVGVCFVGQDVTGQKLVLDRFIRIQGDYKAIVQSLNPLIPPIFGADEYGFCSEWNAAMEKLSNWRREEVLGKMLVGEIFGLQMVCCRLQGQDVVTKLMIVLNDAVNGQESEKFPLVFYDRNGRRVEALLIASKRTDADGRITGVFCFLHTASPELLQALIIKRAKEKVDKELSYVKEELKKPLEGLAFTRTVLEGTNLTIEQRQLIKTNAWCERQLRKILEDDLNNIEEGYMDLEMSEFFMGSVIDAVISQGMAASRGKGVQILTEIPNDVKLMCLFGDQARLQQVLADLLFCAINHATTTNEDEKDWVTIKVSRTKTRLDDGVHLMHFESRISHSGQGISEALVEEMTNKSQKWTPEGLAISISCTLIRLMNGDVKYTTDAGNKCFLVTIQFPLAHRDDATSVR

SEQ ID NO: 10007 - protein, 373 aa, Neisseria meningitidis MC58
MSNQDFYATLGVARTATDDEIKKAYRKLAMKYHPDRNPDNKEAEEKFKEVQKAYETLSDKEKRAMYDQYGHAAFEGGGQGGFGGFGGFGGAQGFDFGDIFSQMFGGGSGRAQPDYQGEDVQVGIEITLEEAAKGVKKRINIPTYEACDVCNGSGAKPGTSPETCPTCKGSGTVHIQQAIFRMQQTCPTCHGAGKHIKEPCVKCRGAGRNKAVKTVEVNIPAGIDDGQRIRLSGEGGPGMHGAPAGDLYVTVRIRAHKIFQRDGLDLHCELPISFATAALGGELEVPTLDGKVKLTVPKETQTGRRMRVKGKGVKSLRSSATGDLYCHIVVETPVNLTDRQKELLEEFERISTGLENQTPRKKSFLDKLRDLFD

SEQ ID NO: 10008 - protein, 502 aa, Candida glabrata
MSTAKKHTKTHSTYAFESNTNSVAASQMRNALNKLADSIGSEHGDDARTRFENELDSFFTLFRRYLVEKSSSNTLEWDKIKSPNPEEVVRYDTINSQAENVSSLSKLAVLKLNGGLGTSMGCVGPKSVIEVREGNSFLDLSVRQIEHLNRQYDSDVPLLLMNSFNTDKDTEHLIKKYSANRIRIRSFNQSRFPRVYKDSMLPVPETYNDPKDAWYPPGHGDLFESLHASGELDALIAQGREILFVSNGDNLGATVDLKILNHMIETGAEYIMELTDKTRADVKGGTLISYDGQVRLLEVAQVPKEHIDEFKNIRKFTNFNTNNLWINLKAVKRLVESSALEMEIIPNQKTITRGGQEINVLQLETACGAAIRHLSGAHGVVVPRSRFLPVKTCSDLLLVKSDLFYLQHGALKLDPSRFGPNPLIKLGSHFKKVSDFSARIPHIPKLVELDHLTITGNVFLGKGVTLRGTVIIVCSDGQKIDIPNGSVLENVVITGNLQILEH

SEQ ID NO: 10009 - protein, 99 aa, Zea mays
AGERILCRHPFIESKRAYVVPQHVEELLQCYWPGTSDKPRAELPSLEKIRSRCMQQLEMLRPDHIRRLNPTPYKVSVSTKLYDFIHRLWLNEAPVGELQ

SEQ ID NO: 10010 - protein, 437 aa, Cleome spinosa
MEFLPVSAVLQKASKPAIVVASVLILLTVTPALYSLLGGYSIFPFVITSNPFLLSLPPPSDGSSSSSSPDASHDPSPSQGPSDNSSSSVDEEKCDYFSGEWVSNPEAPYYTNTTCWAIHEHQNCIKYGRPDTEFMKWRWKPDGCELPVFNPIEFLQIVSGKAMAFVGDSISRNQVQSLLCLLSRVEYPQDISPTADTDFRTWKYPSYNFTVHALWSPFLVSSTEADPSGPDKTGLFNLYIDEFDPIWMAEIGQLDYLIISSGHWFFRPVIFYENRQLVGCHYCGLANVTVLPLDYGYRKALRTVLKAILDNFAGVAFFRTFSPHHFEGGPWNKGGDCIRTRPYRRNETVFRDENLEFHNIQLEEFRAAEEEAVKKGLRLRLIDTTQAMLLRPDGHPGKYGHPPNAQVTLFKDCVHWCLPGPIDTWNDFLLRMMKTEK

SEQ ID NO: 10011 - protein, 73 aa, Sinningia canescens
ISGTNGEVMPGQWEFQVGPSVGIEAGDHIWCARYLLERITEQAGVVLSLDPKPMEGDWNGAGCHTNYSTKSMR

SEQ ID NO: 10012 - protein, 574 aa, Arabidopsis thaliana; identical to SEQ ID NO: 7731

SEQ ID NO: 10013 - protein, 392 aa, Buxus sempervirens
DLEPVNPLDPPVTATGALKSYKLAAKAISRLQSLPNGNISLLCDVLVREVSELTGYDRVMVYKFHEDEHGEVVAETHRTNLEPYLGLHFPATDIPQASRFLFMKNKVRMICDCLAPPVRVVQDKRLERPLSLCSSTLRAPHGCHAQYMKNMGSIASLVMSVTINEDDDEMDSDQQKGRKLWGLVVCHHTSPRFVPFPLRYACEFLIQVFSIQLNKEVELAAQVREKHILRNQSMLCGMLLRESPVGIITQSPNVMDLVKCDGAALYYKDKFWLLGVTPTEAQISDIAGWLLEYHNGSTGLSADSLLEAGYPGASVLGDAVCGMAAIKLTSKDFLFWFRSRTGKEIKWGGAKHEPFDKDEGRKMHPRSSFKAFLEVVKWRSLPWEDIEMDAIQ

SEQ ID NO: 10014 - protein, 187 aa, Sciadopitys verticillata
DEHGEVVSEIRRSDLEPYLGLHYPATDIPQASRFLFMQNRVRMICDCCATPVKAVQAEELKQPLCLVGSTLRAPHGCHAQYMANMGSIASLVMAVIINGNDEEGASGRSSMKLWGLVVCHHTSPRAVPFPLRYACEFLMQAFGLQLNMELQLAAQLTEKHILRTQTLLCDMLLRDAPIGIVTQSPSI

SEQ ID NO: 10015 - protein, 394 aa, Carludovica palmata
ELEPVNPADVPVSAAGALKSYKLAAKAISRLQSMPSGNTSLLCDVLVKEVSELTGYDRVMAYKFHEDQSGEVISECRRPELEPYLGLHYPATDIPQASRFLFMKNKVRMICDCSAPPVKVIQDKRLAQPLSLCGSTLRAPHGCHAQYMANMGSIASLVMSVTINEDDDETGRDQQQKGRKLWGLVVCHHTSPRFVPFPLRYACEFLMQVFGIQLNKEVELAAQAKAKHILRTQTLLCDMLLRDAPIGIFTRSPNVMDLVKCDGAALFYRNQFWLLGTTPTEAQIRDIVAWLQEYHDGTTGLSTDSLAEAGYPGASELGDAVCGMAAINVTNKDFILWFRSHMAKEIKWGGAKRDSFNRNDEGRQMHPRSSFKAFLEVVKRRSLPWEDMEMDAIQ

SEQ ID NO: 10016 - protein, 135 aa, Dimocarpus longan
GIDFDIEGGTNQHWDDLARYLSGYSTQGKKVYLTAAPQCPYPDAWVGGALQTGLFDYVWVQFYNNPPCQYTSGSFTNLEDAWKRWTTDIPATQIFLGLPASPEAAGSGFIPASDLTSQVLPAIKGSAKYGGVMLW

SEQ ID NO: 10017 - protein, 291 aa, Oryza sativa Japonica Group
MARHQLCLLTTTMLVAVVVFLPCLATATGKTGQIAVFWGRNKTEGSLKEACDTGLYTTVIISFFSVFGHGRYWTDLSGHDVSRVGADVKHCQSKNIPVLLSVGGDGYQTSRTTSGTPTSAAARRGVFRPFGDAVLDGVDLYIDHGGPANYDVLVRRLAGYRGKPVLLTATPRCVYPDANAAAALGTGLVRRIHPRFYGDAACTNKTDGEGRRSLFDWEDWDAWTSRFPASQVYVGLPAEETAADWINPESLYYAVMQRAQTASNYGGAMLWDRGADKAYDNYYGRALKDFV

SEQ ID NO: 10018 - protein, 460 aa, Euptelea polyandra
SGKPFYAIIHRIDVGLVIDLEPVSPAEVPVAAAGILKSYKLSAKAISRLQSLPSGNISLLCDVLVQEVSDLTGYDRVMVYKFHEDEHGEVVAECLRSNLEPYLGFHYPATDIPQASRFLFMRNKVRMICDCSARPVKVIQDKSLAQPLSLCGSTLRAPHGCHAQYMANMGSIASLVMSVTIDENDDEIQTDQQKGRVLWGLVVCHHTSPRFVPYPLRHACEFLIQVFGIQLNKEVELATQLREKHILQTQTVLCDMLLRDAPVGIVTQSPNVMDLVRCDGAALYYKNQFWLLGLTPTEAQIRDIAGWILEHHDGSTGVSIDSLMEAGYPGSSVLGDVVSGMAAIKITSKDFLFWFRSHTAKEIKWGGAKHDHVDKDDGRKMHPRSSFKAFLEVVKRRCLPWEDVEMDAIHSLQLILRGSLKDETVNDSKTIVNALMVDARIQGVDELCNVTNEMVRLMEK

SEQ ID NO: 10019 - protein, 783 aa, Triticum aestivum; identical to SEQ ID NO: 2731

SEQ ID NO: 10020 - protein, 377 aa, Buchnera aphidicola str. APS (Acyrthosiphon pisum)
MAKKDYYQILGIPKSAEEREIKKAYKKLAMKYHPDRNQGDKTAEGKFKEIKEAYEILINEEKRSAYDQYGHAAFENGQSNSTYSTFTNSADFSDIFGDVFGDIFGGNRTQRAKKGADLCYNMEITLEEAVKGIKKEIQIPTLQKCKTCYGSGTRTGTKPRSCSTCHGKGQIHIRKGFFTVQQSCPTCHGKGTIITDPCNLCHGQGRVETYKILSVKIPPGLDTNDRIRLNNEGEAGANGAQSGDLYVQITVKKHPIFEREGNNLYCEVPINFTMAALGGEIEVPTLDGRVKLKIPYETQSGKLFRIRGRGVKSVQNRNQGDLLCRVVVETPVNLNEQQKNLLHELGNSFHGFRGEKNSPRSKRFFDGVKRFFDDLTR

SEQ ID NO: 10021 - protein, 395 aa, Joinvillea ascendens
DLEPVNPADVPVTAAGALKSYKLAAKAISRLQSLPSGNLSLLCDVLVREVSELTGYDRVMAYKFHEDEHGEVIAECRRSDLEPYLGLHYPATDIPQASRFLFMKNKVRMICECSAPPVKVVQDDRLAQPLSLCGSTLRAPHGCHAQYMANMGSIASLVMSVTINEDDDDDTGSEQQQKGRKLWGLVVCHHTSPRFVPFPLRYACEFLLQVFGIQLNKEVELAAQAKERHILCTQTLLCDMLLRDAPVGIFNQSPNVMDLVKCDGAALYYQNHFWLLGSTPSEAQIKNIAEWLLEYHDGSTGLSTDSLTEAGYPGAAALGEVVCGMAAIKISSKDFIFWFRSHTAKEITWGGAKHEPVDRDDGGRKMHPRSSFKAFLEVVRWRSVPWEDIEMDAIQ

SEQ ID NO: 10022 - protein, 188 aa, Triticum aestivum
NKFVQKSRLVPVRNSRDIVDPRVRRLVDAEALKMEIIPNPKEVDGVGVLQLETAAGAAIRFFEKAIGINVPRSRFLPVKATSDLLLVQSDLYTLVDGYVIRNPARVKPSNPSIELGPEFKKVANFLARFKSIPSIVELDSLKVSGDVSFGSGVVLKGNVTIAAKAGVKLEIPDGAVLENKDINGPEDL

SEQ ID NO: 10023 - protein, 923 aa, Avena sativa
MASKGAGGGGGGHEEPQRPKQQLPRDSRGSLEVFNPSSSSAAVEPPSAFRPAARSASPFIEEATGGIEDVGKATQRAAEWGLVLQTNEQTGRPQGVSARSSGGGGSARSSSDDKAVAGAIPRVSEELRAALSAFQQTFVVSDASRPGHPIMYASAGFFNMTGYTSKEVVGRNCRFLQGSGTDPAEIAKIRQALANGSNYCGRVLNYKKDGTAFWNLLTIAPIKDEEGRVLKFIGMQVEVSKYTEGNKDTVVRPNGLPESLIKYDARQKDQARSSVSELLLAIKNPRSLSESTNSTFKRKSQESVGALTGDRPGKRSSESGSRRNSKSGARTSLQKISEVPERGSKSRKSGLYSLMSLLGMGPGNIEKDMLKPRDEDPLLDSDDERPESFDDELRRKEMRRGIDLATTLERIEKNFVITDPRLPDNPIIFASDSFLQLTEYSREEILGRNCRFLQGPETDRATVRKIRDAIDNQTEVTVQLINYTKSGKKFWNLFHLQPMRDQKGDVQYFIGVQLDGTEHVRDAAEREGVMLIKKTAENIDEAAKELPDANLRPEDLWANHSKVVLPKPHMKDSASWRAIQKVLEGGENIDLKHFRPVKPLGSGDTGSVHLVELLNTGEYFAMKAMDKNVMLNRNKVHRANAEREILDMLDHPFLPTLYASFQTKTHICLITDYYPGGELFLLLDRQPLKVLREDAVRFYAAEVVIALEYLHCQGIIYRDLKPENILLHRDGHISLTDFDLSCLTSCRPQVFLPEEANKKSRRKSRSSPIFFAEPMRASNSFVGTEEYIAPEIITGAGHTSAVDWWALGILLYEMLYGYTPFRGKTRQRTFANILHKDIRFPASISVSLPARQLIYRLLHRDPSNRLGSYEGSNEIKEHPFFRGINWALVRGTAPPKLDAPLFPDDTDKGMGDAAAADTHTDMF

SEQ ID NO: 10024 - protein, 281 aa, Vigna radiata
GSSTDQAPGDDSEVILYPQAIFKDPFRRGNNILVICDVYTPAGEPLQTNKRYDAAKIFSHPDVVAEVPWYGIEQEYTLLQKDVNWPLGWPLGGFPGPRDPYYCSAGADRSFGRDISDAHYKACLFAGINISGINGEVMPGQWEFQVGPAVGISAGDELWVARYILERITEIAGVVLSFDPKPIKGDWNGAGAHTNYSTKTMRNDGGYEVIKSAIEKLGKRHKEHIAAYGEGNERRLTGRHETADINTFLWGVANRGASIRVGRDTEKAGKGYFEDRRPASN

SEQ ID NO: 10025 - protein, 368 aa, Xylella fastidiosa Dixon
MSKRDYYQVLGVPRTASEDDLKKAYRRCAMKYHPDRNPGDAAAEAAFKECKEAYEVLADTKKRKLYDTHGHAAFEHGVGGGNAPDMNDIFGDIFGNIFGGARASRRGADVGYMVELDLEEAVAGVERQIQIPTLVECTHCNGSGSEDGHVETCGTCRGSGQVRIQRGIFAMQQTCPHCGGRGVIIRNPCKVCNGAGRVEDHKTLSVKIPAGVDNGDRIRLSGEGEQGPDGVPPGDLYVEVRVREHPIFQRDGDDLHCEVPVRISQAALGDIVRVATLDGEAEIRIPAETQSGKLFRLRGKGVRSVRSRTEGDLYCRIVVETPVNLTAEQRKLLEQFEMTFAGEDARKHSPKSATFLDGVKSFWDRMTS

SEQ ID NO: 10026 - protein, 392 aa, Knema latericia
DLEPVNPSDVPITAAGALKSYKLAAKAISRLQSLPSGNISLLCDVLIREVSELTGYDRVMAYKFHEDDHGEVIAECRRSDLEPYLGLHYPATDIPQASRFLFMKNKVRMICDCFAQPVKVIQDERLEQPLSLCGSTLRAPHGCHAQYMANMGSIASLAMSVTINEDGDDASGQQQQRGKKLWGLVVCHHTSSRFVPFPLRYACEFLIQVFGIQLNKEVELAAQRREKHILQTQTVLCDMLLRDTPVGIVTQSPNVMDLVKCNGAALYYRNQFWLLGTTPTETQIRDIAGWLLEYHDATTGLSTDSLTEAGYPGAPDLGDDVCGMAAIKITSKDFLFWFRSHTAKEIKWGGAKHDPVDKDDDGRKMHPRSSFKAFLEVVKQRSLPWEDVEMDA

SEQ ID NO: 10027 - protein, 927 aa, Avena sativa
MASKGAGAGGGGGGGDGYDEPQRPKQQLPRDSRGSLEVFNPSSSAVEPPSAFRPAARSASPFIEEVAGGIEDVGKATQRAAEWGLVLQTNEQTGRPQGVSARSSGGGGSARSSSDDKAVAGAIPRVSEELRAALSAFQQTFVVSDASRPGHPIMYASAGFFNMTGYTSKEVVGRNCRFLQGSGTDPAEIAKIRQALADGSNYCGRVLNYKKDGTAFWNLLTIAPIKDEEGRVLKFIGMQVEVSKYTEGNKDTAVRPNGLPESLIKYDARQKDQARSSVSELLLAIKNPRSLSESTNSTFKRKSQESVGPLTGDRPGKRSSESGSRRNSKSGARTSLQKISEVPERGNKSRKSGLYSLMSLLGMGPGNIEKDMLKPRDEDPLLDSDDERPESFDDELRRKEMRRGIDLATTLERIEKNFVITDPRLPDNPIIFASDSFLQLTEYSREEILGRNCRFLQGPETDRATVRKIRDAIDNQTEVTVQLINYTKSGKKFWNLFHLQPMRDQKGDVQYFIGVQLDGTEHVRDAAEREGVMLIKKTAENIDEAAKELPDANLRPEDLWANHSKVVLPKPHMKDSASWRAIQKVLEGGENIDLKHFRPVKPLGSGDTGSVHLVELLNTGEYFAMKAMDKNVMLNRNKVHRANAEREILDMLDHPFLPTLYASFQTKTHICLITDYYPGGELFLLLDRQPLKVLREDAVRFYAAEVVIALEYLHCQGIIYRDLKPENILLHRDGHISLTDFDLSCLTSCRPQVFLPEEANKKSRRKSRSSPVFFAEPMRASNSFVGTEEYIAPEIITGAGHTSAVDWWALGILLYEMLYGYTPFRGKTRQRTFANILHKDIRFPASISVSLPARQLIYRLLHRDPSNRLGSYEGSNEIKEHPFFRGINWALVRGTAPPKLDAPLFPDGTDKGLGDATAAADNHTDMF

SEQ ID NO: 10028 - protein, 281 aa, Vigna radiata
GSSTGQAPGEDSEVIIYPQAIFKDPFRRGNNILVICDAYTPAGEPIPTNKRHNAAKIFSHPDVVAEVPWYGIEQEYTLLQKDVNWPLGWPVGGFPGPQGPYYCGAGADKAFGRDIVDAHYKACLYAGINISGINGEVMPGQWEFQVGPAVGISAGDELWVARYILERITEIAGVVLSFDPKPIKGDWNGAGAHTNYSTKTMRNDGGYEVIKSAIEKLGKRHKEHIAAYGEGNERRLTGRHETADINTFLWGVANRGASIRVGRDTEKAGKGYFEDRRPASN

SEQ ID NO: 10029 - protein, 491 aa, Alternaria alternata
  misc_feature (400)..(400): Xaa can be any naturally occurring amino acid
MRGKLGTVLGGAEGCNRCAQSACGCADMRRSRVRMALVRECLRRGRASFGLVDGSVEATTSGRHWQHDPSRPSQRTMFQPPAAPVFAGCSQCPLTNTTSLNAPHPNFNTSIHYTVSCPGRLPAREASLVASCVPLGMNLIHPNNTSSHQSAPKNGGAVQFQTQPLNQTRVTKGKYSLTDFTIQRTLGTGSFGRVHLVQSKHNQRFYAVKVLKKAQVVKMKQVEHTNDERRMLQQVKHPFLITLWGTFQDSKNLYMVMDFVEGGELFSLLRKSQRFPNPVAKFYAAEVTLALDYLHSHNIIYRDLKPENLLLDRHGHLKITDFGFAKEVPDITWTLCGTPDYLAPEVVASKGYNKSVDWWSLGILIFEMLCGFTPFWDGGSPMKIYENILKSRVKYPPYIXPDAHDLLQKLITPDLTKRLGNLHGGSKDVMNHPWFAEVTWDRLQKKDIDAPYVPPVRAGVGDASQFDKYPEETEAYGQAGDDPHGHLFPDF

SEQ ID NO: 10030 - protein, 323 aa, Arabidopsis thaliana; identical to SEQ ID NO: 8676

SEQ ID NO: 10031 - protein, 569 aa, Zea mays
MAAANGDACRSVGGVPRPTNPMVTPLLTDLYQFTMAYAYWKAGKHLDRAVFDLYFRKNPFGGEFTIFGGLEECIRFIANFKFTEEEIKFLRSVMPACEDDFFEYLRSIDCSDVEVYAIPEGYAVFPKVPLMRIEGPVAFSHTSRLCCLPQVVQLLETPFLSLVNYASLVTTNAARHRLVAGKSKNLLEFGLRRAQGPDGGISASRYCYMGGFDATSNVAAGRLFGIPIRGTHSHAFVSSFMGLDEITDKTLTSSDGSNTCEDFISLVQNWLIRIQDSSSLHGTFGETSQSELAAFTSYALAFPNSFLALVDTYDVMRSGVPNFCAVALALNDMGYKAVGIRLDSGDLAYLSVEARKFFHAVEKEFVVVGFGKTSITASNDLNEETIDALNKQGHEVDAFGIGTYLVTCYAQAALGCVFKLVEINKQPRIKLSEDVMKVSIPCKKKCYRLYGKEGYPLVDIMTGEDEPGPKIGERLLCRHPFNESKRAYVVPQHVEELLKCYWPGNSSNSREELPSIHEIRTRCIHHLDRMRPDHMRRLNPTPYKVSVSAKLYDFIHFLWLNEAPVGELQ

SEQ ID NO: 10032 - protein, 432 aa, Glycine max
MAQILAPSTQWQMRISKSSPNASPITSNMWSSLLWKQNKKVSPTSSAKFRVMAIKSDNSIINRLEGLLNLDITPFTDKIIAEYIWIGGTGIDVRSKSRTISKPVEHPSELPKWNYDGSSTGQAPGDDSEVILYPQAIFKDPFRGGNNILVICDSYTPQGEPIPTNKRHRAAEIFSNPKVQAEVPWYGIEQEYTLLQTNVKWPLGWPVGGYPGPQGPYYCSAGADKSFGRDISDAHYKACLYAGINISGTNGEVMPGQWEYQVGPSVGIEAGDHIWASRYILERITEQAGVVLSLDPKPIEGDWNGAGCHTNYSTKSMREDGGFEVIKKAILNLSLRHKDHISAYGEGNERRLTGKHETASINTFSWGVANRGCSIRVGRDTEKNGKGYLEDRRPASNMDPYVVTSLLAETTLLWEPTLEAEALAAQKLALKV

SEQ ID NO: 10033 - protein, 433 aa, Mesembryanthemum crystallinum
MAQILAPSLQVKMSITKSSTPASSMLPNTWTSVVLKQSRKGSIKNSTKFKVCASIKPDVSVQNRVEQLLNLDVTPFTDKIIAEYIWIGGAGIDLRSKSRTLSKPVEHPSELPKWNYDGSSTGQAPGEDSEVILYPQAIFKDPFRGGNNILVICDAYTPAGEPIPTNKRHKAAEIFSNPKVVSEVPWYGIEQEYTLMQPNVKWPLGWPVGAYPGPQGPYYCGVGADKSFGRDISDAHYKACLYAGINISGTNGEVMPGQWEFQVGPSVGIEAGDHVWCARYILERITEQVGVVLTLDPKPIEGDWNGAGCHTNYSTKSMREEGGFEVIKKAILNLSLRHKDHISAYGEGNERRLTGKHETASIDSFSWGVANRGCSIRVGRDTEKAGKGYLEDRRPASNMDPYVVTGLLAETTLLWEPTLEAEALAAQKIAMKV

SEQ ID NO: 10034 - protein, 169 aa, Triticum aestivum
MAGCGEKSDAGVGLYAVLGVASDCSDAELRSAYRKLAMKWHPDKCGSGSSGGSEAAKARFQKIQAAYAVLSDPNKRILYDVGAYESDGDDEGAGEILGDILEAMNHTPPHEDGESESLEDLHKQFEELFLKPDAYESDGDDEGAGEILGDILEAMNHTPPHVRDRCSAY

SEQ ID NO: 10035 - protein, 374 aa, Oryza sativa
  misc_feature (213)..(213): Xaa can be any naturally occurring amino acid
  misc_feature (229)..(229): Xaa can be any naturally occurring amino acid
  misc_feature (236)..(236): Xaa can be any naturally occurring amino acid
  misc_feature (256)..(256): Xaa can be any naturally occurring amino acid
  misc_feature (265)..(265): Xaa can be any naturally occurring amino acid
  misc_feature (277)..(277): Xaa can be any naturally occurring amino acid
  misc_feature (305)..(305): Xaa can be any naturally occurring amino acid
KKSCFSPPRPPARRPAPPPQRGGGGGVIKSCGGPPTAPCTAISAPLATGPENSGGSPPTTTIPALAVLFRRALPLSPPPLGGGFEAFFPPRRNGRGFPFPFPPGPPPAGAFWVRGILISPRAREKGRTRGPNRAGCPTRSRGVIGSARLGLVVWCPAPPGFPLGAPGGAGKKPGPFQDRVWKAPSASPPVRLTRVSRWPPVVDLFPERASSGXGPVSVSVGLMNSVGAXVGAMPCXHGGRPGGSTVAGRSGASVVXLAIGKLALXGLVFRHSFVTIXGQFPIGILGVMLLFSGIELAMASRDMGXKEESFVMLVCAGVSLTGSSAALGFISGIVLYLLLRLRDLEWDIRGLLGRWAAGRRQSTNEANEDGAGDA

SEQ ID NO: 10036 - protein, 248 aa, Brassica napus
  misc_feature (175)..(175): Xaa can be any naturally occurring amino acid
  misc_feature (182)..(182): Xaa can be any naturally occurring amino acid
  misc_feature (184)..(186): Xaa can be any naturally occurring amino acid
  misc_feature (214)..(215): Xaa can be any naturally occurring amino acid
MASNNGNDDLYAVLGLNKECTSTELRTAYKKLALRWHPDRCSSMGNMEFVDEAKKKFQAIQEAYSVLSDSNKRFLYDVGAYNSDDDVEDQNGMGDFLNEMAAMMNQSKPNENSSGDSFEQLQDLFNEMFQGDATAFPPSSSSFPASTFTSSCDFVFDTNYQQSPFGMSSMGTSDXFGFDSRXHXXXLGVEHQQDFKKGKNNGGRRNRRKNSTQXXNNYGVPTSPFTSDIFYLSTSQRTTGYGLLNGYA

SEQ ID NO: 10037 - protein, 368 aa, Xylella fastidiosa 9a5c
MSKRDYYQVLGVPRTASEDDLKKAYRRCAMKYHPDRNPGDAAAEAAFKECKEAYEVLADTKKRKLYDTHGHAAFEHGVGGGNAPDMNDIFGDIFGNIFGGARASRRGADVGYMVELDLEEAVAGVERQIQIPTLVECTHCHGSGSEDGHVETCGTCRGSGQVRIQRGIFAMQQTCPHCGGRGVIIRNPCKVCNGAGRVEDHKTLSVKIPAGVDNGDRIRLSGEGEQGPEGVPPGDLYVEVRVREHPIFQRDGDDLHCEVPVRISQAALGDIVRVATLDGEAEIRIPAETQSGKLFRLRGKGVRSVRSRTEGDLYCRIVVETPVNLTAEQRKLLEQFEMTFAGEDARKHSPKSATFLDGVKSFWDRMTS

SEQ ID NO: 10038 - protein, 394 aa, Liriodendron tulipifera
DLEPVNPADVPVTAAGALKSYKLAAKAISRLQSLPSGNISLLCDVLVREVSELTGYDRVMAYKFHEVEHGEVIAECRRSELEPYLGLHYPATDIPQASRFLFMKNKVRMICDCLALPVRVIQDKKLAQPLSLCGSTLRAPHGCHSQYMASMGSIASLVMSVTINEDDDDTSSEQQQKGRKLWGLVVCHHTSPRFVPFPLRYACEFLVQVFGIQLNKEVELAAQMRERHILRMQTVLCDMLLRDAPVGIITQSPNVMDLVKCDGAALYYRNQFWLLGTTPMEAQIRDIAGWLLEYHDSTTGLSTDSLTEAGYPGAADLGDDVCGMAAIKITSKDFLFWFRSHTAKEIKWGGAKHDPVDKDDDGRKMHPRASFKAFLEVVKRRSLPWEDVEMDAIQ

SEQ ID NO: 10039 - protein, 67 aa, Zea mays
  misc_feature (19)..(19): Xaa can be any naturally occurring amino acid
  misc_feature (60)..(60): Xaa can be any naturally occurring amino acid
FKKVSNFLARFKSLPRIVXLSSFKVFGDVWFGFGISLKGKVPIFPQPGVKFEIPNGDVLXNKDVHGP

SEQ ID NO: 10040 - protein, 557 aa, Ostreococcus tauri
MRRKGRLPPCHNALVTALLTDTYQLTMAYAYWKNGTHERSATFELFFRKNPFDGEFTVFAGLEEALRFLSNFAFTEADCAYLRSTSIGANMEGEFFDFLLGLDASKVRVYGQLEGSVVFPRVPLLRLEGPLATVQLFETTLLCLVNYASLVATNAARHRLVAGEDAQLLEFGLRRAQGVDGGISASRYSYLGGFDATSNVEAGRQFGIPIKGTHAHSYVQSHASWSTVKNPKLVSADGSTTCDDFPALVMEKLKQLEALRDDMDLELRWTDTNTSELAAFTTYALAFPGSFLALVDTYNVLKSGLPNFCAVALALRELGYSAVGIRLDSGDLSYLSKQTRSFLQSIERLLGTKIADRLSEVSITASNDIHEAVLYSLRQHGHEIDAFGIGTHLVTCYEQPALGCVYKLVEIDDTPRIKLSEDIAKVTIPGRKKGYRLFSQTGEAIVDVMTRDDEPAPKVGERMLIRHPFEESKRAYVVPSKVEPLFNLVWDREHGTQESLDLTLETSRRRCKESIHQLRADHLRYTNPTPYKVSVSAALYDFIRDLWFAEAPVGELR

SEQ ID NO: 10041 - protein, 396 aa, Meliosma squamulata
ELEPVNPDDVPVTAAGALKSYKLAAKAISRLQSLPSGNITLLCEVLVREVRDLTGYDRVMVYKFHEDEHGEVIAECRRSDLEPYLGLHYPATDIPQASRFLFMKNKIRMICDCSSQPVKIIQDKRLAQPLSLGGSTLRAPHGCHAQYMANMGSIASLVMSVTINDDDDDDDDTSESDKKKGRKLWGFVVCHHTSPRFVPFPLRYACEFLSQVFGIQLNKEVELAAQLKEKHILKTQTMLCDMLLRDAPMGIITQSPNVMDLVKCNGATLYYNNKFWLLGITPTEEQIRDIIGWLFENHDQSTGLSTDSLVEAGYPGALFLGNAVCGMAAIKITSKDFLFWFRSHTAKEIKWGGAKHDPIDKDDGRKMHPRSSFRAFLEVVKWRSIPWEDIEMDAIQ

SEQ ID NO: 10042 - protein, 362 aa, Oryza sativa Japonica Group; identical to SEQ ID NO: 6937

SEQ ID NO: 10043 - protein, 214 aa, Triticum aestivum
  misc_feature (111)..(111): Xaa can be any naturally occurring amino acid
RFVEGEKKVYCITNVNAAFPIPVSIEAIKDVVSVAHYILVVEKEAVFQRLANDKFCEKNRCIVITGRGYPDIPTRRFLRYLVEQLHLPAYCLVDSDPYGFDILATYKFGSXQLAYDANVLRVPEIRWLGVFTSDFEEYCLPDCCQLQLSSEDRRKLEGILTRCYLHKEAPEWRLKLEAMLEMGVKFEIEALSASSISFLSQEYIPQQIRLGRYI

SEQ ID NO: 10044 - protein, 389 aa, Platanus occidentalis
DLEPVNPDDVPVTAAGALKSYKLAAKAISKLQSLPSRNISLLCDVMVREVSDLTGYDRIMVYKSHEDEHGEVVAECRRPDLEPYLGLHYPATDIPQLSRFIFLKNKVRMICDCSAPPVKVVQDKKLAQPLSLGGSTLRAPHGCHAQYMANMGSIASLVMSVTINEDDDEGDQQNGRKLWGLVVCHHTSPRFVPFPLRYACEFLIQVFGIQLNKEVELAAQSREKHILRIQTMLCDMLLRDAPVGIVTQSPNVMDLVKCDGAALYYRNKFWLLGITPTEAQIKDIAGWFLEYHDQSTGLSTDSLMEAGYPGALVLGDAVCGMAAIKITSKDFLFWFRSHTAKEIKWGGAKHDPVDKDDGRKMNPRSSFKAFLEVVKRRSLPWEDVEMDAI

SEQ ID NO: 10045 - protein, 114 aa, Coccidioides immitis
DVYLRPVAIFPDPFRRGENILVLCETWDSDGSPNKYNYRHEAARLMRANAHEHFWFGLEQEYTLLGPDGWPYGWPKGGFPGAQGPYYCGVGTGKVHCRDIVEAHYKACLYAGIN

SEQ ID NO: 10046 - protein, 393 aa, Sabia swinhoei
DLEPVNPDDVPVTAAGALKSYKLAAKAISRLQSLPSGNISLLCDVLVREVSDLTGYDRVMVYKFHEDEHGEVIAECRRSDLEPYLGLHYPATDIPQASRFLFMKNKVRMICDCSARPVKVVQDKRLARPLSLCGSTLRAPHGCHAQYMANMGSIASLVMSVTINEDDDDEMESDQKKGRKLWGFVVCHHTSPRFVPFPLRYACEFLIQVFGIQVNKESELAAQLREKHILQTQTMLCDMLLRDAPVGIVSQSPNVMDLVKCSGAALYYKNKFWLLGVTPTEEQIRDIIGWFVENHGQSTGLSTDSLMEAGYPGASVLGDAVCGMAAIKITSKDFLFWFRSHTAKEIKWGGAKHDPVDKDDGRKMHPRSSFKAFLEVVKRRSLPWEDIEMDAIQ

SEQ ID NO: 10047 - protein, 375 aa, Salmonella enterica subsp. enterica serovar Paratyphi A str.
MAKRDYYEILGVSKTAEEREIKKAYKRLAMKYHPDRNQGDKEAEAKFKEIKEAYEVLTDAQKRAAYDQYGHAAFEQGGMGGGFNGGADFSDIFGDVFGDIFGGGRGRQRAARGADLRYNMDLTLEEAVRGVTKEIRIPTLEECDVCHGSGAKAGTQPQTCPTCHGSGQVQMRQGFFAVQQTCPHCQGRGTLIKDPCHKCHGHGRVEKSKTLSVKIPAGVDTGDRIRLAGEGEAGEHGAPAGDLYVQVQVKQHPIFEREGNNLYCEVPINFAMAALGGEIEVPTLDGRVMLKVPSETQTGKLFRMRGKGVKSVRGGAQGDLLCRVVVETPVGLSEKQKQLLKDLQESFGGPTGEKNSPRSKSFFDGVKKFFDDLTR

SEQ ID NO: 10048 - protein, 394 aa, Tofieldia calyculata
DLEPVNPADVPVTAAGALKSYKLAAKAISKLQSLPSGDISLLCDVLVREVSDLTGYDRVMVYKFHEDEHGEVLAEFKRSDLEPYLGLHYPATDIPQASRFLFMKNKVRMICDCAAIPVKVIQDERLAQCLSLCGSTLRAPHGCHAQYMANMGSIASLVMSVTISEDDNETDSDQQEKGRKLWGLVVCHHTNPRFVPFPLRYACEFLIQVFGIQLNKEVELAAQTREKHILQTQAVLCDMLLRDFPIGIFTQSPNVMDLVKCDGAALYYRNQFWLLGITPTEKQIRDIAGWLLEYHGCSTGLSTDSLLEAGYPGASVLGDAVCGMTASRINSKEFVFWFRSHTAKEIKWGGAKHDPVDKGDDGRKMHPRSSFEAFLEVVKRRSLPWEDVEMDAIQ

SEQ ID NO: 10049 - protein, 218 aa, Zea mays
MVKLTMIARVTDGLPLAEGLDDGRDLKDADFYKQQAKLLFKNLSKGHHEASRMSIETGPYYFHYIIEGRVCYLTMCDRSYPKKLAFQYLEDLKNEFERVNGNQIETAARPYAFIKFDTFIQKTRKLYLDTRTQRNLAKLNDELYEVHQIMTRNVQEVLGVGEKLDQVSEMSSRLTSDTRIYADKAKDLNRQALIRKYAPVAIVIGVVLMLFWLKNKIW

SEQ ID NO: 10050 - protein, 375 aa, Pseudomonas putida KT2440
MSKRDYYEVLGVERGATEADLKKAYRRLAMKYHPDRNPGDKESEDKFKEANEAYEVLSDASKRAAFDQYGHAGVDPSMGGGGAGFGGANFSDIFGDVFSDFFGGGGRGGGRGGAQRGSDLRYTLELNLEEAVRGTTVSIRVPTLVNCQPCDGSGAKKGSTPSTCPTCGGIGQVRMQQGFFSVQQTCPRCHGQGKIITDPCTSCHGEGRVEEYKTLSVKVPAGVDTGDRIRLSGEGEAGTHGGPTGDLYVVISVREHEIFQRDGKHLYCEVPISYTDAALGGELEVPTLDGRVKLKIPEGTQTGKQFRLRGKGVAPVRGGGAGDLLCRVAVETPVNLSRRQRELLEELRDSLEGDSSHSPKASGWFDGVKRFFGDL

SEQ ID NO: 10051 - protein, 212 aa, Rhizobium yanglingense
EPARQTQIKEFDAFPALEQLPLWGFDGSSTMQAEGRSSDCVLKPVAVYPDPARTNGALVMCEVMMPDGVTPHPSNSRATILDDEDAWFGFEQEYFFYENGRPLGFPEQGYPAPQGPYYTGVGYKNVGSVAREIVEEHLDLCLAAGINHEGINAEVAKGQWEFQIFGKGSKRAADQIWMARYLLLRLCEKYGIDIEFHCKPLGDTDWNGSGMR

SEQ ID NO: 10052 - protein, 230 aa, Brassica napus; identical to SEQ ID NO: 781
  misc_feature (196)..(196): Xaa can be any naturally occurring amino acid

SEQ ID NO: 10053 - protein, 126 aa, Zea mays
AAYHGKTRSHMAFENTSTNVAAAQMRNALTNLAETVEDPKEKKLFETEMDNFFALFRRYLNDKAKGNAVDWDRIAPPAQGQVVDYEDLANTESVQFLSKLAVLKLNGGLGTSMGCVGPKSVIEVRD

SEQ ID NO: 10054 - protein, 196 aa, Zea mays
MDQIQIEGAFVGSNQDLFPGPAPTMVLTSNISVQKTLYEVLSVSEDATYDEIRAAYRSAALNTHPDKAQTTLESSSVPSTEQQEFSSVQKAWEVLRHPTSRAYYDKQLQSSRQSIEIIASEIQVGDMIVESAAGALELLYPCRCGDYFSITSGELSGMGIVVTGDGEELNECLLFLIAADEKEVLAAAVGVVLNNL

SEQ ID NO: 10055 - protein, 199 aa, Zea mays
GAGGGGRGRMQAHHRQSYYAVLGVQPGATAAEIRAAYHRLAMRWHPDKIASGGGGADPARAEEAKSRFQQIHEAYQVLSDDKRRALYDAGMYDPLDDDDDQEDVEGFHDFVQEMVSLMAREEPVYSLAELQSMLDGMIKDFTAPQPWPSGFYTGGGGGGASSPSPLGKPSSQEQSTASSRLHPYGFGDAPCFSRTAFSQ

SEQ ID NO: 10056 - protein, 335 aa, Microcystis aeruginosa PCC 7806
MKNYYEILQIPRNASNNQIKAAFRRLARQYHPDYNPNDPEAVTKFREIEQAYRVLSDKDKRKEYDRSLSPEIPTFQRSAEDFYQQGWHYAQEKNYQLAIAFYQQAIAINPQFWQAYLQRAEVYYHNQQDRQVSSDCRQVLQLKPDCSQAYYYLGLSRQRLGYTQSSLEAYGKAIAIDQNNPQFYYQRGLALDGKLIAFGNSDLWDGDICPHIPAAGIICHDGGISMSQSGHYLFGDVWTGTLSSGVAWSEPNLGPLGSVPVTIGSSYGTNVTWIRYGSDFGPGFNGPVAFRPLYGISSVLTVPTPTATTPEPSSLLGFITLGGLMLGGTVRKARK

SEQ ID NO: 10057 - protein, 480 aa, Pinus taeda
MAAAPAVAPPAAETDRIPKLQAEVTKLNQISDNEKEGFVRLVSRYLSGEEEKIEWEKIKTPTDEIVVPYDTLAALGEDPSETKELLDKLVVLKLNGGLGTTMGCTGPKSVIEVRNGLTFLDLIVKQIESLNNKYDSKVPLVLMNSFNTHDDTIKIVEKYSGSNIDIHIFNQSQYPRMVAEDLTPWPTKGRTDKEAWYPPGHGDVFPALLNSGKLDELLSQGKEYVFIANSDNLGAIVDLKILNHLVKNKNEYCMEVTPKTLADVKGGTLISYEGRVQLLEIAQVPEEHVGEFKSIEKFKIFNTNNLWVNLKAIKRLVEADALKMEIIPNPKEVDGVKVLQLETAAGAAIRFFDRAIGVNVPRSRFLPVKATSDLLLVQSDLYTVEEGFVIRNPARVNPTNPTIELGPEFKKVGNFLKRFKSIPSIIDLDSLKVSGDVWFGSGVILKGKVIIEAKQGATLEVPDESVIENKVVSSPDDIVN

SEQ ID NO: 10058 - protein, 1123 aa, Physcomitrella patens subsp. patens
MASAKLAYSTGSGIKSKHSVRVQQTTADAKLQAAYEESNDSGDSFDYSKSVGQAAKSTVQQVPAQAVTAYLQRMQRGGLTQTFGCMLAVEENTFRVIAYSENALDMLDLMPQAVPSVGQQDVLGIGTDSRSLFTPSSAAALERATQQSDLSMVNPVSVHSRSSGKPFYAILHRIDVGIVMDFEPVRPNDVVVSSAGTIHSHKLAAKAISRLQSLPGGDIGLLCDTVVEEVRELTGYDRVMAYKFHEDEHGEVLAEIRRSDLEPYLGLHYPATDIPQASRFLFMKNRFRMIVDCYAPPVKVIQDKDLRQPLTLAGSTLRAPHGCHAQYMGNMGSIASVTMAVVVNDQEDDGGSQKARRLWGLVVCHHTSARMISFPLRSACEFLMQVFGLQLNMEVELAAQLREKHILRTQTLLCDMLLRDAPIGIVSQSPNIMDLVKCDGAALYYGNRFWLLGITPSEQQIKEIADWLLECHKDSTGLSTDSLADAGYPGANLLGDAVCGMAAARITPKDFLFWFRSHTAKEIKWGGAKHDADDRDDGRKMTPRSSFNAFLEVVKRRSVPWEDIEMDAIHSLQLILRGSFQDIDDSDTKTMIHARLNDLKLQGMDELSTVANEMVRLIETATTPILAVDSSGFINGWNAKVAELTGLSVGDAMGRSLVKDLILEESVEDVQRLLYLALQGEEEQNVEIRLRTFGPQKAKGAVILIVNACSSRDVQENVVGVCFVGQDVTGQKMLHDKFTRIHGDYKSIVQNPNPLIPPIFGSDDLGYCTEWSPSMEKLTGWKRDEVLGKMLVGEVFGMHLMCCRLKGQDAVTKFMIVLNNAMDGQDTDKYPFSFFDRQGKFVEALLTANKRTDADGYITGVFCFLHIASPELLQALTVQRATEKVAFAKLKELAYIRQEIKNPLYGIMFTRNLMEDTDLSDDQKQFMDTSAVCERQLRKILDDMDLESIEDGYLELETAEFEMGSMMDAVVSQGMVTSREKGLQLIRETPREIKDMCLFGDQVRLQQVLADFLLNAVRFTPSSEGWVGIKVVATKRRLGGGFHVVHLEFRVTHPGSGLPEELIHEMFDRGRGMTQEGLGLNMCRKLVKLMNGNVQYKRETGKSYFLVTLELPLAVRDDTGTMR

SEQ ID NO: 10059 - protein, 212 aa, Oryza sativa Indica Group
MAGREKRRRVAALDGEERRRRQEEAATLLHRIRDVLLRVLLVVQQLLQQNKHCSKRDIYYMYPSIFQEQAVVDRAINDICVLFKCSRHNLNVVPVAKGLVMGWIRFLEGEKEVYCVTNVNAAFSIPVSIEAIKDVVSVADYILIVEKETDPYGFDILATYKFGSLTEGKLKEFSQGVTCTGKPHNGGKVVLFVPVLQAIHDYDGSLQVRART

SEQ ID NO: 10060 - protein, 500 aa, Arabidopsis thaliana
  misc_feature (99)..(99): Xaa can be any naturally occurring amino acid
  misc_feature (265)..(265): Xaa can be any naturally occurring amino acid
MEPKENGSELGQKIIDGPTNPMVTPLLNDLYQFTMAYAYWKAGKHNERSVFDLYFRKNPFGGEYTVFAGLEECVKFLANFKLTDEEIDFVQECLPGSEXTNAARHRFVAGKSKSLLEFGARRAQGPDGAISASKYCYLGGFDATSNVAAGKLFGIPLRGTHSHAYVSSFMSTDEIVDKVLRSADGKTTCEDFVSHVQTWLKKIQYSPSLSGIFSETNQSELAAFTSYALAFPKTFLALVDTYDVMKSGIPNFCAVALALNDFGCXYKALGIRLDSGDLAYLSREARNFFCTVERELKVPGFGKMVVTASNDLNEETIDALNKQGHEVDAFGIGTYLVTCYSQAALGCVFKLVEINNQPRIKLSEDVTKVSIPCKKRSYRLYGKEGYPLVDIMTGENEPPPKVGERLLCRHPFNESKRAYVVPQRVEELLKCYWRGSADEAREVLPPLKEIRDRCIKQLENMRPDHMRRLNPTPYKVSVSAKLYDFIHFLWLNEAPVGELQ

SEQ ID NO: 10061 - protein, 299 aa, Triticum aestivum
  misc_feature (285)..(285): Xaa can be any naturally occurring amino acid
MACELKWSPLLPILLLAGMVGISHAGNIAVYWGQNGNEGTLADACNSGLYAYVMVSFLSTFGNGQTPAINLAGHCDPLSGNCNVFSSDITTCQSNGVKVLLSLGGGAGSYGLSSSEDAQSVATYLWDNFLGGSSSSRPLGDAVLDGIDFDIETGNSAHYDELATFLSQYSAQGRKVYLTAAPQCPYPDASLGPALQTGLFDNVWVQFYNNPPCQYASGDASNLLSAWNTWTSSVKVSGGFYLGVPASTAAGRSGYVSPGDLTSAVLPGVKGAQHYGGIMVWDRYXDVQNSYSSQVKDSV

SEQ ID NO: 10062 - protein, 389 aa, Aeropyrum pernix K1
MSGEMFGDEVDIKARLRAAEVMYKKFHRLISDVIKGRPPKLEIPKRTLSNTIFDPERGILVIGEEKLEREFLNVGESRRFMQTLLMASIIYQSLIENEYPTIRDLYYKGKHTIVYRDYSGRKREENTWDEQKESDSVIQDIEVYTGLFREDMLILSKEKGKVVGNMRIRSGGDVIDLSKLGHGAYAIEPTPDLIEFLDVDAEFVLVVEKDAVFQQLHRAGFWKKYKALLVTGSGQPDRATRRFVRRLHEELKLPVYIITDSDPYGWYIYSVYKVGSITLSYESERLATPKAKFLGVQMTDIFGYRGKKPYLSEAERKKFMIKATDKDIKRAKELLNYSWIGKNRRWNVEIRLFLKHLVKLEIEAIASKGLKFFAYQYIPEKIETGDWID

SEQ ID NO: 10063 - protein, 444 aa, Oryza sativa Japonica Group; identical to SEQ ID NO: 7328

SEQ ID NO: 10064 - protein, 297 aa, Oryza sativa; identical to SEQ ID NO: 9556

SEQ ID NO: 10065 - protein, 519 aa, Coccidioides immitis RS
MQRVKLNLSGATLSHVTSYLGSKVMMLTSFSPTDQTMRFSHFSSHNWATFRGQPLTEISGALGDLGTFLPILIALAVNDSISLPATLVFSGLYNIFTGWFFGIPLPVQPMKAIAAVAIARDFDGDQIAAAGIFAGVVIFVFTATGALRWFANAVPIPVVKGIQVGAGLSLVISAGAKLKGKMGWIEPRWADNYLWVIAALVGLLVTNIYRRVPYGLILFLLGLVFAFVSLATSGHGNLPHFSIWIPRAVQPTTDDWKVGIVQAGIGQIPLTTLNSIIAVVHLAGDLLPDVHTPSITSIGFSVAMMNLVGTCVGCMPVCHGSGGLAAQYRFGARSGASIIFLGAVKLIVGIFLGNTLLDLLYSFPTAFLAVMVIAAGLELASVGESLNTTRAWDLGNNDRSSSLPTLRLAEVKLTEEERKRRWTVMIVTVGLLVAFKNAGIGFVAVLPGLHKAAGPSKLNLISAESKACCRDARRRTCGGSMHITTSEERGQFYLIEKAELPTGRWVAREAGQSGPSSVG

SEQ ID NO: 10066 - protein, 206 aa, Zea mays
MPHLAATPPTSSAAAVPAAGRIAFRRPWNTPQPEALRLRLRLRARGVRREDGGGVRTEEQEQTAPRTFYDLLGISADGSPDDVRASYRRLALKYHPDVSPPGAAAENTRRFIEVQEAYETLSDPSRRASYDRALARGVCRLAFSGRRSQSHHAYYHYQEQEEGSGWRRSWEDQIAELKRRSVAKDSEENLSWGARMRRRAEASAAE

SEQ ID NO: 10067 - protein, 73 aa, Sinningia glazioviana
  misc_feature (55)..(55): Xaa can be any naturally occurring amino acid
ISGTNGEVMPGQWEFQVGPSVGIEAGDHIWCARYLLERITEQTGVVLSLDPKPIXGDWNGAGCHTNYSTKSMR

SEQ ID NO: 10068 - protein, 114 aa, Chrysosporium lucknowense
DVYLRPVAIYPDPFRRGDNILVLCETWDSDGSPNKYNHRHEAARLMRTHADEHFWFGLEQEYTLLGPDGWPYGWPKGGFPGAQGPYYCGVGTGKVHCRDIVEAHYKACLYAGIN

SEQ ID NO: 10069 - protein, 302 aa, Arabidopsis thaliana
MTNMTLRKHVIYFLFFISCSLSKPSDASRGGIAIYWGQNGNEGNLSATCATGRYAYVNVAFLVKFGNGQTPELNLAGHCNPAANTCTHFGSQVKDCQSRGIKVMLSLGGGIGNYSIGSREDAKVIADYLWNNFLGGKSSSRPLGDAVLDGIDFNIELGSPQHWDDLARTLSKFSHRGRKIYLTGAPQCPFPDRLMGSALNTKRFDYVWIQFYNNPPCSYSSGNTQNLFDSWNKWTTSIAAQKFFLGLPAAPEAAGSGYIPPDVLTSQILPTLKKSRKYGGVMLWSKFWDDKNGYSSSILASV

SEQ ID NO: 10070 - protein, 293 aa, Oryza sativa Japonica Group; identical to SEQ ID NO: 6996

SEQ ID NO: 10071 - protein, 114 aa, Chrysosporium queenslandicum
DVYLRPVAIFPDPFRRGENILVLCETWDSDGSPNKYNYRHEAARLMRAHANEHFWFGLEQEYTLLGPDGWPYGWPKGGFPGAQGPYYCGVGTGKVHCRDIVEAHYKACLYAGIN

SEQ ID NO: 10072 - protein, 208 aa, Rhizobium leguminosarum
TAWQDADQEFDAFPTLEQLPLWGFDGSSTQQAEGRSSDCVLKPVAIYPDPARTNGALVMCEVMMPDGVTPHASNARATILDDEDAWFGFEQEYFFYQNGRPLGFPEQGYPAPQGPYYTGVGYSNVGDVAREIVEEHLDLCLAAGINHEGINAEVAKGQWEFQIFGKGSKKAADQIWMARYLLQRLTEKYGIDIEYHCKPLGDTDWNGS

SEQ ID NO: 10073 - protein, 114 aa, Uncinocarpus reesii
DVYLRPVAIFPDPFRRGDNILVLCETWDSDGSPNKYNFRHEANRLMRTHAHEHFWFGLEQEYTLLGPDGWPYGWPKGGFPGAQGPYYCGVGTGKVHCRDIVEAHYKACLYAGIN

SEQ ID NO: 10074 - protein, 608 aa, Phelipanche ramosa
SGKPFYAIIHRVTGSLIIDFEPVKPHEVPMTAAGALQSYKLAAKAITRLHALPNGSMKRLCDTMVQEVFELTGYDRVMIYKFHDDDHGEVFTEITKPGLVPFAGLHYPATDIPQAARFLFMKNKVRMICDCRANHVKVIQDENLPFDLTLCGSTLRAPHSCHLQYMENMDSIASLVMSVVVNEGDEDGPDSSSGPDKRKRLWGLVVCHNTSPRFIPFPLRYACEFLAQVFAIHVNKELELDNQMVEKNILRTQTLLCDLLLRDAPLGIVSGNPNMMDLVKCDGAVLLYRITKYRLGLTPTDFQIRDIVSWLDEYHLDPTGLSTDSLYDAGFPGALALGDAICGMAAVRITDKDWLFWFRSHTAAEIRWSGARHEPGEKDDGRKMHPRSSFKAFLEVVKTRSLPWKEYEMDAIHSLQLILRNASKENKEKDMEKREIHARLNELQIDGAKEIEVVTSEMVRLIETASVPIFAVDLDGLVNGWNTKIADLTGLGVDEAIGRHFLALVEDSSADTVNKMLELALQGKEERDVEFEIKTHGQRSESGPITLIVNACASRDVNENVVGVCFIAHDITTQKSMMDKFTRIEGDYRSIIQNPNPLIPPIFGTDEF

SEQ ID NO: 10075 - protein, 258 aa, Oryza sativa
MASRRLAPLLVLLLSSSLAAGQSTGDTVVFWGRNTDQLEGSLREACDTGLYTTVIISFLSAFGYIPGTYKLDIKHCQSRGILVLLAIGGQGGEYSLPTSQAAVDLEDYLWNAFLGGGRPGVARPFGDAVVDGIDFFIDQGATEHYDELARRLYAHNKDYKGRLGVMLTATARCVFPDQRLQAALSTGLFSRIHVKVFGDGRCASRREELEKWMAAYPQSRVLVGVVASPEADRDGYVSHKDLYYDVLQFINKLPNYGG

SEQ ID NO: 10076 - protein, 207 aa, Sinorhizobium meliloti
GKTQIKEFDAFPTLEQLPLWGFDGSSTQQAEGRSSDCVLKPVAVYPDPVRTNGALVMCEVMMPDGKTPHPSNTRATVLDDESAWFGFEQEYFFYKNGRPLGFPEQGYPAPQGPYYTGVGYKNVGDIARQIVEEHLDICLAAGINHEGINAEVAKGQWEFQVFGKGSKKAADEVWLARYLLLRLTEKYGIDVEFHCKPLGDTDWNGSG

SEQ ID NO: 10077 - protein, 1122 aa, Arabidopsis thaliana; identical to SEQ ID NO: 9020

SEQ ID NO: 10078 - protein, 428 aa, Medicago sativa
MAQILAPSIQCQTRITKTSPLATPISSKMWSSLVMKQNKKVARSAKFRVMAINSGTINRVEDLLNLDITPFTDSIIAEYIWIGGTGIDVRSKSRTISKPVEHPSELPKWNYDGSSTGQAPGEDSEVILYPQAIFKDPFRGGNNILVICDAYTPQGEPIPTNKRHKAAEIFSNPKVEAEIPWYGIEQEYTLLQTDVKWPLGWPVGGYPGPQGPYYCAAGADKSFGRDISDAHYKACLYAGINISGTNGEVMPGQWEYQVGPSVGIEAGDHIWASRYILERITEQAGVVLTLDPKPIEGDWNGAGCHTNYSTKSMREDGGFEVIKKAILNLSLRHKVHIEAYGEGNERRLTGKHETASINTFSWGVANRGCSIRVGRDTEKNGKGYLEDRRPASNMDPYVVTALLAESTLLWEPTLEAEALAAQKIALKV

SEQ ID NO: 10079 - protein, 209 aa, Sinorhizobium meliloti
GKTQIKEFDAFPTLEQLPLWGFDGSSTQQAEGRSSDCVLKPVAVYPDPVRTNGALVMCEVMMPDGKTPHPSNTRATVLDDESAWFGFEQEYFFYKNGRPLGFPEQGYPAPQGPYYTGVGYKNVGDIARQIVEEHLDICLAAGINHEGINAEVAKGQWEFQVFGKGSKKAADEVWLARYLLLRLTEKYGIDVEFHCKPLGDTDWNGPGMQ

SEQ ID NO: 10080 - protein, 271 aa, Nicotiana tabacum
MEFCSGGNLHTLRQKQPNKHFTEEASRFYASEVLLALEYLHMLGIVYRDLKPENVLVRDEGHIMLSDFDLSLRCSVNPTLVKSSSVHGGGGGGNPSNGSGILDNDSAVQGCIQPSTFFPRNILPTKKNRKSKSDFGLFVGGSLPELMAEPTNVRSMSFVGTHEYLAPEIIRGEGHGSAVDWWTFGIFLYELLHGTTPFKGAGNRATLFNVVGQPLRFPETPQVSAIARDLIRGLLVKEPHKRIAYKRGATEIKQHPFFEGVNWALVRSAEG

SEQ ID NO: 10081 - protein, 211 aa, Rhizobium yanglingense
ARQTQIKEFDAFPALEQLPLWGFDGSSTMQAEGRSSDCVLKPVAVYPDPARSNGALVMCEVMMPDGVTPHPSNSRATILDDEDAWFGFEQEYFFYENGRPLGFPEQGYPAPQGPYYTGVGYKNVGSVAREIVEEHLDLCLAAGINHEGINAEVAKGQWEFQIFGKGSKRAADQIWMARYLLLRLCEKYGIDIEFHCKPLGDTDWNGGAMQA

SEQ ID NO: 10082 - protein, 70 aa, Zea mays
MNFVSGLPLTSTEKDSVWVIVDKLTKWVNLNAIKRLVEADALKMEIIPNPKEVNGIKVLQLETAAGAAIR

SEQ ID NO: 10083 - protein, 1133 aa, Physcomitrella patens subsp. patens
MEEQDPASSIDRSKVTAAASGASRGRSKYIAAPRSERKSLEVFGGAPASARYLPGAGNAFGGNSVAEEEEETAAVPSPRIDPPWVVPKIGPKPSQNVQPASTLPMSSSASKPAPLPQIPPAVPQSYMSETTKAKAPLPWDINLEIPDYKPKPVIGAEETKTKPVIRHHRSSSDTMTNTLPDLKEERKSAIEKLKQQAEVDAKRDIAKKAKDDGARSPDRKEMSDDVMKGRAAEWGLVLKSDAETGKTQGVTIRKSGDRRSGGSESAGRVSMTLPTVTASIRTSEASDAGSDASHPSNLPKVSREVKEALSTFQQTFVVSDATQPDFPILYASAGFFNMTGYTPKEVIGRNCRFLQGAGTDNADVARIREALKEGKSFCGRLLNYKKDGSAFWNLLTITPIKDDDGKVLKFIGMQVEVSKHTEGKKEKSLRPNGLPESLIRYDARLQDKATAAVGDLVGAFKNPVAPSTPPDTLNTGPKSPPSLPPDLQLVDSATESKLASKSSLHDSTRRRSTGTNIMTRSDSRLSNLPENGQPAYPRRNRRSSGFLSIFGLGKPEPKSPDPEMDPQLRMLEDEDRPESFEVDLERSKEIRRGIDLATTLERIAKNFVITDPRLPDNPIIFASDEFLELTEYTREEILGRNCRFLQGPDTDLAVVDQIRDAIAARRDITVQLLNYTKSGKPFWNLFHLQAMRDHDGELQYFIGVQLDGSEYLEPERRRLSEKTEKEGAKVVQETANNIDDAVRELPDANLKPEDLWSKHSLPVHPKPHNKVSRAWDAIHKMKINGQGLGLKDFRPIKPLGSGDTGSVHLVELRETGLVFAMKAMDKSVMMQRNKVHRARAERDILALMDHPFLPTLYSTFQTQTHICLVTDFCPGGELFLLLERQPRKVFTEDVVRFFAAEVVIALEYLHCLGVVYRDLKPENVLLRADGHIQLTDFDLSFLTSAKPRLVEQDLPPGRRRKPKRPPSPIFVAEPVTPSNSFVGTEEYIAPEIITGQGHSSAVDWWALGILIYEMLYGRTPFRGKNRQRTFTNVLQRDIIFPASIPVSISARQLMRDLLQRNPLKRLGSHRGASDVKNHPFFRGINWPLLRHTTPPPLETPALLITPDVEPTKADEDLEWDEEEAAPISTFQEF

SEQ ID NO: 10084 - protein, 173 aa, Prunus armeniaca
MEHEETGCQPHPEGPILCVNNCGFFGSVATRNMCSKCHKDMMLKEEQAKLAASSFGNIVNGTSNSNGNEPVVAAGVDVQAHLVEPKTISLQPSFSFGSGSGGSGEAKPEGPKRCGTCNKRVGLTGFNCRCGHLFCAVHRYSDKHDCPYDYHTAARDVIAKANPVVKADKLEKI

SEQ ID NO: 10085 - protein, 379 aa, Cytophaga hutchinsonii ATCC 33406
MAKRDYYEVLEITKSASADEIKKAYRKLAIKFHPDKNPDNPEAEEKFKEAAEAYEVLSTPEKRQRYDQYGHQAAGGGGYGGGMNMDDIFSQFGDVFGSGGSPFESFFGGGGGGRGRGVRKGSNLRIKLKLNLEEIANGCEKKIKVKRQVACDECSGTGAKNGAVQKCGTCNGTGQVKRVVNTMLGQMMSATTCPTCNGEGTTIKDKCTSCHGQGTVEKEETITIKIPAGVVDGMQLSMSGKGNMPPRGGVAGDLLILIEEIEDEQLKRDGLNIIYELYVTFFDAVFGTSVEVPTVDGKVKIKIEPGTQSGKILRLRSKGLKDVNSYQKGDQLIYVNVWTPQTLSKEEKELLATIKESENFKPNPGKNDKSFFERMKEFF

SEQ ID NO: 10086 - protein, 349 aa, Physcomitrella patens subsp. patens
MGVDYYNVLKVPKTATEDDLKKAYRKLAMKWHPDKNPNNKKEAEAKFKQISEAYEVLSDPQKRLIYDQEGEEGLKGGVPPAGSSHGFSNGSGGAHSFRYNPRNAEDIFAEFFGGGNWFGGMGGRGSRGGPFGDGMFGGFGGGESVFRSPDGSQGFRSFGEGPSHAQPRKAAPVENKLLCSLEELYKGSTRKMKISRSIADASGKTMPVEEILTIEVKPGWKKGTKITFPEKGNEQPGMLAADLVFVIDEKPHDTFKRDGNDLIVTKKISLVEALSGCSFTLGSLDGRSLTVSIPDVIHPGYEKVLAKEGMPVAKEPGRRGNLRIKFDIDFPTRLSAEQKAGLKRLLGGV

SEQ ID NO: 10087 - protein, 667 aa, Nostoc punctiforme PCC 73102
MSSVSISDNSSKFSGNSRSLLKKRTLLFRYLAEINLIFGIWYLQWRVTHSINFDALWISIPLLIAEIYSYFGGVMFVIGLWRPLVRQVKSLDQMTPPLPRSDWPTVDVFVTCYNEPPKIVEETAKAALVMDYPPTKLRVYVLDDGNSADMRAMTERLCIEDLQSPQLQQEANRIDAEHSSLLQRLKELENLTPNTQGAEQWLQTSSSEPVVNQLATEFVQSLRQFILWLPPTHQSISDSPVETLRDRLTTERKALEETIRKKELELLELSRFRYIARPKTPGVAHHAKAGNINYAIFSGQTAGNFIVTLDADHIPKQNFLKRVVPYFYTYNLSTGRYDQNQIAFVQTRQDFYNIPPGDPFGHRANLFYGPLQQGKDGMNAAFYTGTNAILRREALVSVGLQNFADEFAKDEKRLDEFDLVGGVSSNSITEDMNTAMRLHSAGWKSIYHNELLAEGLAPDDLSSTLKQRLRWAQGTIQVLVRENPLTKSGLTFWQRLQYFKTMYSYFSGFATLVFISCPIIYFFTDIVPVKTYGSDFAIHFFPAFIINRLTFLAATWGIPATEVWRSEQYAIALFPLLIQAVWSVFTGQKLNFQVTPKQRQSGIYLRLVWPQLVIFILTILGILWSLYRFAIGHLNNPLVHLLNGAWAIYNLLLLSAIIRASVWQPPK

SEQ ID NO: 10088 - protein, 356 aa, Camellia sinensis
MSLLSDLINLNLSDTTEKVIAEYIWIGGSGMDLRSKARTLSGPVSDPKKLPKWNYDGSSTGQAPGEDSEVIIYPQAIFKDPFRRGNNILVMCDTYTPGGEPIPTNKRFNAAKIFSHPDVVAEEPWYGIEQEYTLLQKQVKWPLGWPLGGFPGPQGPYYCGIGVDKAYGRDIVDSHYKACLYAGVNISGINGEVMPGQWEFQVGPSVGISAGDELWVARYILERITEIAGVVVSFDPKPIEGDWNGAGAHTNYSTKSTRSDGGFEVIKKAIEKLGLRHKEHIAAYGEGNERRLTGRHETADINTFLWGVANRGASIRVGRDTEKAGKGYFEDRRPASNMDPYVVTSMIAETTLLWKP

SEQ ID NO: 10089 - protein, 373 aa, Campylobacter jejuni subsp. jejuni NCTC 11168
MEISYYEILEITQNADKETIKKAYRKMALKYHPDRNQGDKEAEDKFKLVNEAYEVLSNDEKRAIYDRYGKDALKGGGFGSSSSGFGGFEDLGDIFSSFFGEGFGSSRRRKSSNDEKIPSDFIVNLKLSFKEAVFGCKKNIDFTYKCSCKTCNGTGAKDGKLQTCPKCQGRGQVGVSQGFITFAQTCPDCQGIGEKASEKCSDCKGLGYNESKDSVELNIPEGVDTGMKLRVNAKGNILKNGTRGDMYVKIIAAEDDTFIRDDDDIYIEFPVFFTQAILGESIKVPTIRGEATLNLPKGAKDGQRFVLEKEGVKDVHSSRMGNQIVQISIKFPTSLNDEQKELLEKLSESFGIKDGMHQEQKGLFEKITNWFKS

SEQ ID NO: 10090 - protein, 73 aa, Sinningia insularis
  misc_feature (13)..(13): Xaa can be any naturally occurring amino acid
ISGTNGEVMPGQXEFQVGPSVGIEAGDHIWCARYLLERITEQAGVVLSLDPKPIEGDWNGAGCHTNYSTKSMR

SEQ ID NO: 10091 - protein, 301 aa, Methanocaldococcus jannaschii
TVNQAKIFAQTTKMLEFAKQLLETDDFSTLREAYYVSKNWGEARFDDQQASNNVIEDLEAALGVLREHLGFIPEEDGSSVVGPLKIIEETPEGELVVDCTKLGTGAYNIPNDVTKLNLETDADFILAIETSGMFARLNAERFWDKHNCILVSLKGVPARATRRFIKRLHEEHDLPVLVFTDGDPYGYLNIYRTLKVGSGKAIHLADKLSIPAARLIGVTPQDIIDYDLPTHPLKEQDIKRIKDGLKNDDFVRSFPEWQKALKQMLDMGVRAEQQSLAKYGLKYVVNTYLPEKIKDESTWLP

SEQ ID NO: 10092 - protein, 180 aa, Rhizobium gallicum bv. gallicum
EFDAFPALEQLPLWGFDGSSTMQAEGRSSDCVLKPVAVYPDPARTNGALVMCEVMMPDGVTPHPSNSRATILDDEDAWFGFEQEYFFYEDGRPLGFPEQGYPAPQGPYYTGVGYKNVGSVAREIVEEHLDLCLAAGINHEGINAEVAKGQWEFQIFGKGSKRAADQIWMARYLLLRLCEK

SEQ ID NO: 10093 - protein, 180 aa, Rhizobium gallicum bv. gallicum
EFDAFPALEQLPLWGFDGSSTMQAEGRSSDCVLKPVAVYPDPARTNGALVMCEVMMPDGVTPHPSNSRATILDDEDAWFGFEQEYFFYENGRPLGFPEQGYPAPQGPYYTGVGYKNVGSVAREIVEEHLDLCLAAGINHEGINAEVAKGQWEFQIFGKGSKRAADQIWMARYLLLRLCEK

SEQ ID NO: 10094 - protein, 62 aa, Protea cryophila
MPGQWEYQVGPSVGIEAGDHIWCSRYLLERITEQAGVVLTLDPKPIEGDWNGAGCHTNYSTK

SEQ ID NO: 10095 - protein, 349 aa, Arabidopsis thaliana; identical to SEQ ID NO: 8537

SEQ ID NO: 10096 - protein, 562 aa, Saccharomyces cerevisiae
MSLLYIILLFTQFLLLPTDAFDRSANTNIAVYWGQNSAGTQESLATYCESSDADIFLLSFLNQFPTLGLNFANACSDTFSDGLLHCTQIAEDIETCQSLGKKVLLSLGGASGSYLFSDDSQAETFAQTLWDTFGEGTGASERPFDSAVVDGFDFDIENNNEVGYSALATKLRTLFAEGTKQYYLSAAPQCPYPDASVGDLLENADIDFAFIQFYNNYCSVSGQFNWDTWLTYAQTVSPNKNIKLFLGLPGSASAAGSGYISDTSLLESTIADIASSSSFGGIALWDASQAFSNELNGEPYVEILKNLLTSASQTATTTVATSKTSAASTSSASTSSASTSQKKTTQSTTSTQSKSKVTLSPTASSAIKTSITQTTKTLTSSTKTKSSLGTTTTESTLNSVAITSMKTTLSSQITSAALVTPQTTTTSIVSSAPIQTAITSTLSPATKSSSVVSLQTATTSTLSPTTTSTSSGSTSSGSTSSDSTARTLAKELNAQYAAGKLNGKSTCTEGEIACSADGKFAVCDHSAWVYMECASGTTCYAYDSGDSVYTQCNFSYLESNYF

SEQ ID NO: 10097 - protein, 177 aa, Zea mays
MVLTSNISVQKTLYEVLSVSEDATYDEIRAAYRSAALNTHPDKAQTTLESSSVPSTEQQEFSSVQKAWEVLRHPTSRAYYDKQLQSSRQSIEIIASEIQVGDMIVESAAGALELLYPCRCGDYFSITSGELSGMGIVVTGDGEEVEGLQASDSGSASVVLGCGSCSLKIRLVIDGTS

SEQ ID NO: 10098 - protein, 381 aa, Vibrio parahaemolyticus RIMD 2210633
MSKRDFYEVLGVSRDASERDIKKAYKRLAMKFHPDRNQGDESAADKFKEVKEAYEVLTDSQKKAAYDQYGHAAFEQGGGGFGGGFGGGGADFGDIFGDVFGDIFGGGRRGGGGHRAQRGADLRYNMELTLEEAVRGVTKEIEVPTLVHCDSCDGSGAKKGSSAETCGTCHGHGQVQMRQGFFAVQQTCPTCHGKGKIIKDPCNECHGQGRKQKTKTLNVKIPAGVDTGDRIRLSGEGEAGEMGAPSGDLYVQVHVKEHHIFERDGNNLYCEVPVSFAMAALGGEVEVPTLDGRVSLKVPSETQTGRMFRMRGKGVKGVRGGGIGDLIVKLVVETPVNLSSRQKELLKEFEESCGGEAATKHKPKSEGFFNGVKKFFDDLTS

SEQ ID NO: 10099 - protein, 368 aa, Candidatus Phytoplasma mali
MVKKRDYYEILGISRDASDEDIKKAYRKMAKKYHPDISKEHDSEKKFKEVQEAYEVLSDSNKKSNYDNFGHQNANGSDGFEGFGSNFGDFDDIFNNLFSKNSRNTKTSSDLDERIEMEIDFLEAVLGTKKTIQLVLEDYCQECNGSGAHNNKDIVTCQYCNGLGYVNVEQRIFFGNVRSQQMCSYCDGQGQKIKNKCFFCKGKKTQKYKKTLVVDIPAGIDNGMTLKMSQKGNGGRIGSNNLRGDLYITFRVKASKIFSRKGLDVYTEIFITFSQAVLGVVAATETIYGKVDLKIPAGTQSGNKMRLKNKGIADVNSYYRKGDHYVIVNIETPKNISKEQKKIFEDLKKLENNYYKNKTSSGFFKKIL

SEQ ID NO: 10100 - protein, 186 aa, Glycine max; identical to SEQ ID NO: 8389

SEQ ID NO: 10101 - protein, 535 aa, Chlamydomonas reinhardtii
MGSHGPISCLCCRAHVEDGAAAGVHAGRRARSLIATVAVVLLLAAAQAPGAEAFRRGGGGGGGGRDFYSLLGVAKDADEATIKKAYRRQALKWHPDRNTDKKEEAAARFRDIAAAYEVLSDADKRRTYDQFGEEGLKHGGGGGPGGPGGAGGFNMNFQGGDPFEMFNMFFGGGGGGGGMGGGMGGQRRAQFNMGGGGMGGGFGGMGGGGMGGGGRGGHSGGGGEGLYDDDPHVQTLTTDTFPAGDTAWVWLVEFYAPWCGHCKQLAPKWSAVAKSLKGVVKVGAINCEDAKELCGAHGVRGYPTIQAFVPGSGAKPYSGDRSAKAISDWALDLVPSRVSQITTDLSLRQLLARCSGGSSSGSSGSSSKGKDRASWSACVMLVSAKSETPHLLRALSVAYAGKVAFGELRVGSGKGAGGALSAPMAHVASQLGVDVEAERAAGKLPLLITICNGDLALVDRWVDSLARHLDTYAAGKKCAKQVRLDAGTDLGKFSAGQLKQLVKDKGLDCRGCTEKDDFVRRLKDFIASGGAAGTR

SEQ ID NO: 10102 - protein, 461 aa, Nocardioides sp. JS614
MSMGSAGLNRARDKMAAAGVDEVAIETFAHYYRLLEHGETGMIPESSIDPVDMESLATVAVSDEDAAAAIRTTAVIKLNGGLGTSMGMDRAKSLLCVRRGLSFLDIIARQVLHLRKEYGATLPLIFMNSFRTSEDTMAALARYADLPVEGLPLEFLQNKEPRLLAKDLSPVSWPKDPDLEWCPPGHGDLYTALRGTGLLERLIEAGYERVFVSNSDNLGAVPDARVAGWFATSGAPFAIEAVRRTPSDRKGGHFARRKIDGRIVLRETAQTPDADKDALADLDRHKYCSTNNLWFDLAAMKHALDVRQGILGLPLIRNVKHLDPGDPSTPEVIQIETAMGAAIEVFDGSRLIEVGRERFVPVKTTNDLLVLRSDVYDLGQDFVLDQAATEVPYVDLDDDYYKLVGEFDKRFPDGAPSMKKASSLRIEGDWTFAHGVQVVGDVNLEASSAQRVDADTVLSDG

SEQ ID NO: 10103 - protein, 558 aa, Oryza sativa Japonica Group; identical to SEQ ID NO: 9333

SEQ ID NO: 10104 - protein, 234 aa, Aristolochia arborea
VPQAARFLFMKNKVRMICDCYAKPVKVYQDERLSFDLTLCGSTLRASHSCHLQYMKNMDSVASLVMAVVVNEGEEDGDPDTNQEQQAQPKRKRLWGLVVCHNTTPRFVPFPLRYACEFLMQVFAIHVNKELELENQIREKNILRTQTLLCDMLLRDSPLSIVSRSPNIMDLVRCDGAALLYQNEVYTLGAAPTESQIREISRWLSEFHMDSTGLSTDSLQDAGYPKALSLGDIV

SEQ ID NO: 10105 - protein, 277 aa, Arabidopsis thaliana
MGVDFYKVLEVDRSANDDELKKAYRKLAMKWHPDKNPNNKKEAEAKFKQISEAYDVLSDPQKRAIYEQYGEEGLNQAPPPGAGGGYPGGSDAGASFRFNPRSADDIFSEFFGFTRPSFGTGSDSRAGPSGFRRPTPVEEILTIEIKPGWKKGTKITFLEKGNEHRGVIPSDLVFIVDEKPHPVFKRDGNDLVVMQKISLVDALTGYTAQVTTLDGRTLTVPVNNVISPSYEEVVKGEGMPIPKDPSRKGNLRIRFIIKFPSKLTTEQKSGIKRMLSP

SEQ ID NO: 10106 - protein, 233 aa, Aristolochia arborea
VPQAARFLFMKNKVRMICDCYAKPAKVYQDERLSFDLTLCGSTLRASHSCHLQYMKNMGSVASLVMAVVVKEGEEDDNPDLNQEQAQPKRKRLWGLVVCHNTTPRFVPFPLRYACEFLMQVFAIHVNNEVELENQIREKNILRTQTLLCDMLLRDTSLSIVTRSPNIMDLVKCDGAALLFRNKVYTLGITPTESQIREINQWFSEYHMDSTGLSTDSLHDAGYPKALSLGDIV

SEQ ID NO: 10107 - protein, 287 aa, Oryza sativa Indica Group
MTGFGSPCGACKFLRRKCVRGCVFAPYFCHEQGAAHFAAIHKVFGASNVSKLLAHLPLADRPEAAVTISYEAQARLRDPIYGCVAHIFALQQQVRIVHSIDVSLVGVAGLLILVSRRVFEQVMTLQAQLASLKAAAAQGIHHQDVGATTKGGYMSAAATAADDQLGYGGYDQWCGSNGGGAPAASQPGAYSSNGGAGHGHDSITALLAAGSDYMQHSLYHAFEHSEGAGAVDDGHAAAAAFEAAAESSSCGMAASFAADESVWRSSSSGYQDCEDLQSVAYAYLNRS

SEQ ID NO: 10108 - protein, 234 aa, Aristolochia burelae
IPQASRFLFMKNKVRMICDCYAKPVRVYQDEKLSFDLTLCGSTLRAPHSCHLQYMKNMSSIASLVMAVVVNEGEEDDNPDINQQRQQVPRRKRLWGLVVCHNTTPRFVPFPLRYACEFLMQVFAIHVNNELELENQIREKNILRTQTLLCDMLLRDSPLSIVTRSPNIMDLVKCDGAALMYQNKVYTLGLAPTESQIREINQWLSEYHMDSTGLSTDSLHDAGYPKALSLGDIV

SEQ ID NO: 10109 - protein, 375 aa, Chlamydomonas reinhardtii
MRLNTQVSGRATGAPRQGRRLTVRVQAYGMKAEYIWADGNEGKAEKGMIFNEMRSKTKCFEAPLGLDASEYPDWSFDGSSTGQAEGNNSDCILRPVRVVTDPIRGAPHVLVMCEVFAPDGKPHSTNTRAKLREIIDDKVTAEDCWYGFEQEYTMLAKTSGHIYGWPAGGFPAPQGPFYCGVGAESAFGRPLAEAHMEACMKAGLVISGINAEVMPGQWEYQIGPVGPLALGDEVMLSRWLLHRLGEDFGIVSTFNPKPVRTGDWNGTGAHTNFSTKGMRVPGGMKVIEEAVEKLSKTHIEHITQYGIGNEARLTGKHETCDINTFKHGVADRGSSIRIPLPVMLKGYGYLEDRRPAANVDPYTVARLLIKTVLKG

SEQ ID NO: 10110 - protein, 359 aa, Dehalococcoides sp. BAV1
MVNKRDYYEVLGLERSASDEDIKKAFRKMAMKHHPDRNHEEGAADKFKEVNEAYEVLSNPEKRAAYDRFGFSAGADSFGQGGFENFDFGGLGSIFETFFGGATQGAKRGPRRGPDMSYDIKISLEEAATGVEKDITTERLEYCTECSGTGAKAGTSPVKCTSCNGTGQVYQVQKSVFGRFTSVTPCPKCRGEGTIIGEPCTKCRGTGKEYVKRTVQVKIPAGVADGNQIRLNGYGGVGDKGASAGDVYINVGIAEHADFKRDEDDVIYELEINFAQAALGTEVNVPGLNTEHKLKIPSGSQNGKYFVLKGKGIPHLNRFGSGDEMVHLNVVTPEKLSRKQKQLFEELEKSFAEDKKQAT

SEQ ID NO: 10111 - protein, 1162 aa, Vitis vinifera
  misc_feature (85)..(85): Xaa can be any naturally occurring amino acid
  misc_feature (198)..(198): Xaa can be any naturally occurring amino acid
  misc_feature (294)..(294): Xaa can be any naturally occurring amino acid
  misc_feature (337)..(337): Xaa can be any naturally occurring amino acid
  misc_feature (514)..(514): Xaa can be any naturally occurring amino acid
  misc_feature (566)..(566): Xaa can be any naturally occurring amino acid
  misc_feature (595)..(595): Xaa can be any naturally occurring amino acid
  misc_feature (609)..(609): Xaa can be any naturally occurring amino acid
  misc_feature (647)..(647): Xaa can be any naturally occurring amino acid
  misc_feature (711)..(711): Xaa can be any naturally occurring amino acid
  misc_feature (752)..(752): Xaa can be any naturally occurring amino acid
  misc_feature (782)..(782): Xaa can be any naturally occurring amino acid
MGLGSRGGERRATHRTPTFSSSAASNMNNPNSRNNTIAQYNADARLLAEFEQSGESGKSFNYSRSVMNAPESVPEDQIIAYLSRXQRGGLVQPFGCMLAIEEPTFRIISYSENSMDFLGLNTLSETTQLKSLIGVDVRTLFTPPSSASLAKAAMSREISLLNPIWVHSRSAQKTFYAILHRIDVGIVIDLEPTRSGDXALSLAGAVQSQKLAVRAISRLQSLPGGDIGVLCDTVVEDVQKLTGYDRVMVYKFHDDDHGEVVSEIRRSDLEPYLGLHYPATDIPQAARFLFKQNXVRIICDCNAKAVRVIQSEELKQPLCLVNSTLRSPHGCHLQYMXNMGCIASLAMAVVINGNDATKLWGLVVCHHTSPRYVPFPLRYACEFLMQAFGLQLYMELQLASQLAEKKILRMQTLLCDMLLREAPLGIVTHSPSIMDLLKCDGAALYYGGRCWLLGVTPTESQVKDIAEWLLTEHGDSTGLSTDSLADAGYPGAALLGDAVCGMATARITSKDFLXWFRSHTAKEVKWGGAKHHPEDKDDGGRMHPRSSFKAFLEVVKSRSLPWEVSXINAIHSLQLIMRDSFQDIEDSSGKVMVHXQKYDSEMQGLNELXSVACEMVKLIETATAPIFGVDSSGCINGWNAKIAELTXLQAKEAMGKSLVDEIVHEDLRGAVDNLLCRALQGKEDKNVELKLKNFGLNQQDSALYIVVNACXSRDYTNDIVGVCFVGQDITSEKIVMDKFIRLQGDYKAIVQXLNPLIPPIFASDGNACCSEWNTSLEKLTGXMRHEVIRKMLPGEVFGGLCPLKSQDTLTRFTILLYQAISGQDTEKFPFGFFDKSGKLVEVLLTANKRTDANGNVIGCFCFLQIDTPDKHQGLGHGPEYRECFSKFKELAYIRQEMKNPLNGIRFTHKLLETTATSVYQKQFLETSEACERQMMSIIADIDMGIIEEGSSMELNVEEFLLGNVLDAVVSQVMMLLKEKKLQLVCEIPEEIKTLPLSGDQIKLQQVLSDFLHNIVHHAPSSDGWIEIKISTGLKMIQDFNEFIHLQFRMTHIGQGLPPDLIQDMFEGGDQWNTQEGLGLNLSRKLLSAMNGRVQYVREHGKCYFLVDIDLKNRRAREKGKQIQVTWNLGIDYSPCFAKLGLVYDYLYYDYLINMAGCQSHLI

SEQ ID NO: 10112 - protein, 1131 aa, Glycine max; identical to SEQ ID NO: 7848

SEQ ID NO: 10113 - protein, 356 aa, Camellia sinensis
MAQLSDLINMNLSDSTEKIIAEYIWIGGTGLDLRSKARTLSGPVNDPKKLPKWNYDGSSTGQAPGEDSEVIIYPQAIFKDPFRKGNNILVMCDAYTPAGEPIPTNKRYNAEKIFSHTDVVAEEPWYGIEQEYTLLQKDVKWPIGWPKGGYPGPQGPYYCGAGADKAFGRDIVDSHYKACLYAGINISGINGEVMPGQWEFQVGPAVGISAGDELWVARYILERITEIAGVVVSFDPKPIEGDWNGAGAHTNYSTKSMRKDGGYQVIKKAIEKLGLKHKEHIAAYGEGNERRLTGRHETADINTFLWGVANRGASVRVGRDTEKAGKGYFEDRRPASNMDPYVVTSMIAATTILWKP

SEQ ID NO: 10114 - protein, 476 aa, Cucumis melo
MASAATLSPADTEKLSKLKASVSGLTQISENEKSGFINLVSRYLSGEAQHVEWSKIQTPTDEVVVPYDSLAPVPNDPAETKKLLDKLVVLKLNGGLGTTMGCTGPKSVIEVRNGLTFLDLIVIQIENLNSKYGCNVPLLLMNSFNTHDDTQKIIEKYKGSNVDIHTFNQSQYPRLVAEDYLPLPSKGRTDKDGWYPPGHGDVFPSLKNSGKLDALIAQGKEYVFVANSDNLGAVVDLQILNHLIQNKNEYCMEVTPKTLADVKGGTLISYEGKVQLLEIAQVPDEHVNEFKSIQKFKIFNTNNLWVNLKAIKRLVEANALKMEIIPNPKEVDGIKVLQLETAAGAAIRFFDHAIGINVPRSRFLPVKATSDLLLVQSDLYTLVDGFVLRNKARKDPSNPSIELGPEFKKVGNFLSRFKSIPSIIELDSLKVVGDVSFGAGVVLKGKVTISAKPGTKLAVPDNAVIANKEINGPEDF

SEQ ID NO: 10115 - protein, 289 aa, Vitis vinifera
MAGMEQGAGSRYIHQLFRPELQLERTPQQPHQPPQLNDSGDSPENEDRTDPDGSPGAATTSSRRPRGRPPGSKNKAKPPIIITRDSPNALRSHVLEISAGADIVESVSNYARRRGRGVCILSGGGAVTDVTLRQPAAPSGSVVTLHGRFEILSLTGTALPPPAPPGAGGLTIYLGGGQGQVVGGRVVGPLVASGPVLLMAASFANAVYDRLPLEEEEESPVQVQPTASQSSGVTGGGGQLGDGGNGSTTTAGGGAGAGVPFYNLGPNMGNYPFPGDVFGWNGGATRPPF

SEQ ID NO: 10116 - protein, 153 aa, Oryza sativa Indica Group
GRVQLLEIAQVPDEHVNEFKSIEKFKIFNTNNLWVNLKAIKRLVEAEALKMEIIPNPKEVDGVKVLQLETAAGAAIRFFEKAIGINVPRSRFLPVKATSDLLLVQSDLYTLVDGFVIRNPARTNPSNPSIELGPEFKKVANFLARFKSIPSIV

SEQ ID NO: 10117 - protein, 335 aa, Cyanothece sp. PCC 8801
MASTDYKDYYAILGVSKNATADEIKKAFRKLAVKYHPDRNPDNKQAEEKFKEISEAYEVLFDSEKRQKYDQFGQYWQQAGQGAWSNGKTSVDFGDFDFSQYGNFDEFINELLGRFGTPGGARTGGYTYRTTTPKQPGYSDFGGFSDAGVGGFGTQPSSSDRTASLSLTFSEAFRGTQKRLKLGNETINVRIPAGVKTGSRVRVPKKGAVNPYNQQRGDLYLNIELQSHPFFQFEGDNLLCEVPVTPDEAVLGTSIEVPTPDGMVTVKVPPGIRSGQSLRLRGKGWVNPKDGRGDQLVKIVIDTPQTLSATEREYYEKIRATRTYNPRSHLQQIHL

SEQ ID NO: 10118 - protein, 374 aa, Thauera sp. MZ1T
MSKRDYYEVLGVNRDAGDDEIKKAYRKLAMKFHPDRNPDNKEAEEKFKEAKEAYEMLSDPQKKAAYDRYGHAGVDPSMGAGPGAQGFDGFADAFGDIFGDLFGGGGRGGRSNVYRGADLRYNLEITLEEAARGAEKTIRIPTVEECGTCHGSGAKPGTHPKPCPTCQGHGQVRVQQGFFSIQQTCPKCHGSGKIIPDPCRDCGGAGRTKKQKTLEVKIPAGIDDGMRLRHAGHGEPGLNGGPPGDLYVEIHIRKHAVFERDHDDLHCEMPISITTAALGGEIEIPTLEGMARLKIPAETQSGKVFRLRGKGIKNVRSHVHGDLMCHVVVETPVNLTERQKELLREFEESASGNATRHNPKAQGWMDKVRDFFGG

SEQ ID NO: 10119 - protein, 463 aa, Oryza sativa Indica Group
MASSAGDPLLSGEAGDGRRRFVPSTIRLKTSVWSELGGAVGDLGTYIPIVLALSLASHLDLGTTLIFTALYNFATGLLFGIPMPVQPMKSIAAVALSSAHLTIPQIMSAGLAVAAILLFLGVTGLMTTLYRLLPLPVVRGVQLSQGLSFAFTAVKYIRYVQDFSRSSSASTSVPRPLLGLDGLVLALAALLFIILATGSGDDEDVNRDGTSRRRRSCSRVPAALIVFALGLVLCFVRDPSILQDLRFGPAPLGLVKITWDDFKIGFWEGAVPQLPLSVLNSVIAVCKLSSDLFPERAELSPARVSVSVGLMNFVGCWFGAMPCCHGAGGLAGQYRFGGRSGASVVFLAIGKLALGLVFGNSFVTILGQFPIGILGVMLLFSGIELAMASRDMGSKEESFVMLVCAGVSLTGSSAALGFISGIVLYLLLRLRDLEWDIRGLLGRWAAGRRQSTNEANEDGAGDA

SEQ ID NO: 10120 - protein, 210 aa, Zea mays
  misc_feature (51)..(51): Xaa can be any naturally occurring amino acid
  misc_feature (86)..(86): Xaa can be any naturally occurring amino acid
  misc_feature (112)..(112): Xaa can be any naturally occurring amino acid
  misc_feature (166)..(166): Xaa can be any naturally occurring amino acid
  misc_feature (171)..(171): Xaa can be any naturally occurring amino acid
  misc_feature (183)..(183): Xaa can be any naturally occurring amino acid
  misc_feature (199)..(199): Xaa can be any naturally occurring amino acid
VTNLDHIGENDKFGFISLVSRFLIGETEHIDWSKIHTPTDDVVVPYYTVAXTTHDLMETKNLLDNLVVLLLIGGLVTTIGLHWRPXSVIEVRNGFTFLDLIAIHSDSLNSMXGCSVPLLLMNSVNAHDDSRKIVDIDCYSHLEVPTFYDSQYPRIVTRGFLPLPRXGNVGXSGWYPTRTGDVXTSLDYSGQRDFLLSHXQEYVFVANIYE

SEQ ID NO: 10121 - protein, 263 aa, Triticum aestivum
  misc_feature (246)..(246): Xaa can be any naturally occurring amino acid
TCSVHRGLPRLTRLNKFVQKSRLVPVRNSRDIVDPRVRDYYSILGVQKTATEEEIKKAYKKLALKWHPDRNRDNTKEAEAKFKEIAEAYEVLVDKQKREIYDQYGEEGLRAGFGAGGPGGGPGGGVHFGGFSDPFKIFQEMFGRGGMGGMGGMGGSGVHFNFHGDDDYDGFGGGGFGGGFPGMGGRARQRKAKPIKRVFQCSLEELYTGTTKKLKVTKQVTDSQGHTSESSKILTIDVKPGWKAGXKLTFENEGYEARGYYPS

SEQ ID NO: 10122 - protein, 392 aa, Acridocarpus adenophorus
DLEPVNPADVPVTAAGALKSYKLAAKAISRLQSLPSGDISLLCDVLVKEVRDLTGYDRVMAYKFHEDEHGEVVSECRRSDLEAYLGLHYPATDIPQASRFLFMKNKVRMICDCLAPPVKVIQDERLPQPLSLCGSTLRSPHGCHAQYMENMGTIASLVMSVSINEDDDMMDGDQQQMPRKLWGLVVCHHTSPRFVPFPLRYACEFLIQVFGVQINKEVELAAQVREKHILRIQTLLCDMLFRDAPVAIITQSPNVMDLVKCDGAALYYKNKFWLLGITPTEAQIRHIVEWLLECHSGNTGLSTDSLMEAGYPGASVLGDAVCGMAAVGITSRDFLFWFRSHTAKEIKWGGAKHDPDDKDDGTKMHPRSSFKAFLEVVKWRSLPWEDVEMDAI

SEQ ID NO: 10123 - protein, 337 aa, Robiginitalea biformata HTCC2501
MSKAKLEYIWLDGYTPTANLRSKTKIESDFSGKLEDCPIWAFDGSSTKQAEGGSSDCLLKPVAIYPDPARKNGYLVMCEVLNPDGSPHETNSRATIDSDANDDFWFGFEQEYFIMDSHTDLPLGFPHGGYPGPQGLYYCSVGGKNTHGRELVERHADYCLEAGLNFEGINQEVACGQWEFQIFAKGAKTAGDQIWVARYLLDRLTEEYGWYIEYHPKPVRGDWNGSGMHANFSNTLLRTCGSKEIYEKVCEAFRPVTKEHIAVYGDENDLRLTGQHETQSIDEFSYGVSDRGASIRIPIMTVEKGWKGWLEDRRPASNGDPYKIAARIIKTVESADV

SEQ ID NO: 10124 - protein, 73 aa, Oryza sativa
  misc_feature (15)..(15): Xaa can be any naturally occurring amino acid
  misc_feature (24)..(24): Xaa can be any naturally occurring amino acid
  misc_feature (34)..(34): Xaa can be any naturally occurring amino acid
WTASAGSGNASGGPXAGAYLSWYXHLIGILKNAXSATDVRAAYRRLAMKWHPDRCVSDLGEANRRFQRIQEAY

SEQ ID NO: 10125 - protein, 567 aa, Ostreococcus tauri; identical to SEQ ID NO: 6609

SEQ ID NO: 10126 - protein, 235 aa, Aristolochia clematitis
IPQASRFLFMKNKVRMICDCYAKPVKVYQDEKLPFDLTLCGSTLRAPHSCHVQYMKNMSSVASLVMAVVVNEGEEDDNPDPNQQQQQQQPKRKRLWGLVVCHNTTPRFVPFPLRYACEFLMQVFAIHVNNELELENQIREKNILRTQTLLCDMLLRDSPLSIVTRSPNIMDLVKCDGAALMYQNKVYTLGLAPTESQIRDVNRWLLEYHMDSTGLSTDSLHDAGYPKALSLGDIV

SEQ ID NO: 10127 - protein, 286 aa, Oryza sativa Japonica Group
FLAAFAAVSNAGKVAVYWGQGAGNGDGTLAETCATGLYDFVNIAFLNVYGSGLTPVLNLAAHCNPDAGTCKSLSSEISSCQQSGVKVLLSLGGERGQYSLSSADDARGVADYLWNTFLGGSSDSRPLGDAVLDGIDFDIEKDGDHYDELAMALSSKCNGACVLTAAPQCPYPDAHLDAAIKTGVFSHVWVQFYNNRQCQYASGDASALQAAWAQWTSGVPAPADVFLGLPTAPAAAPSGGYIDADTLLSQVLPAVEGAAANYGGVMLWNRWRDVTAGYGAKLKGKV

SEQ ID NO: 10128 - protein, 219 aa, Physcomitrella patens subsp. patens
MVKLTLIARVTDGLPLAEGLDDGREQNDMEFYKQQAKQLCKELSRRQHEASRMSVETGPYFFHYIIEGGVCYLTLCERSYPKKLAYQYLEELQREFEKVNRSQIETVARPYAFIKFDTFIQKTRKLYQDTRTQRNLSKLNDDLYEVTQIMTRNIQEVLGVGDRLDQVSQMSSRLATESKVYSDKAKDLNRQALIRKWAPVGIVIGVVLLLLWFRRSFWS

SEQ ID NO: 10129 - protein, 447 aa, Brassica napus; identical to SEQ ID NO: 7880

SEQ ID NO: 10130 - protein, 233 aa, Aristolochia eriantha
IPQAARFLFMKNKVRMICDCYAKPVKVFQDEKLSFDLTLCGSTLRAPHSCHLQYMKNMSSVASLVMAVVVNEGEEDDNPDPNQQQQVPKRKRLWGLVVCHNTTPRFVPFPLRYACEFLMQVFAIHVNNELELESQIREKNILRTQTLLCDMLLRDSPLSIVTRSPNIMDLVKCDGAALMYQNKVYTLGLAPTESQIRDINRWLLEYHMDSTGLSTDSLHDAGYPSVLSLGDIV

SEQ ID NO: 10131 - protein, 567 aa, Candida albicans SC5314
MLYLLTIFSLLLPALAINARSNSNVAVYWGQNSGGSQQRLSYYCDSDAVDIVILSFMHQFPSPIQLNFANACEGTYTANGILQCQTIAEDIKYCQNKGKTILLSLGGAAGSYGFSDDATAKQFAHTLWDLFGNSKNLATNDRPFYDAVLDGFDFDIENNWSTGYPALATELRTLFQKDTSKNYYLGAAPQCPYPDASVGPLLKQSEIDFVFIQFYNNYCNLGSSSFNWDTWLNYAETDSPNKNIKLFVGVPASSRAAGSGYNDPSAVSQYLTSDILNSKYFGGISMWDVSAGWSNTNSNGNFVENMKAIVKKASPGEETTSSSTTTTTTTTSTTISSSSSSSKTSKTSTTSTTSSSISSTTSSTTSSTSSSSTSSSTSSTTSSSTTSSQISTTSTAPTSSTSLSSSTISTSASTSDTTSVTSSETTPVVTPSSLSSAITIPGDSTTTGISKSSSTKPATSTTSALSSSTTTVATIPDDKEIINTPTDTETTSKPPAIITESDATTITQNLTPSTTTKNVKTTSTNIVTEWVWAPTTLRTLTTTYQILTTRTHIETVFAEPSTVVIYN

SEQ ID NO: 10132 - protein, 183 aa, Triticum aestivum
MDASAGAGSGNAPGAGAGAGASSCCYYALLGIRKNASSTDIRAAYRRLAMKWHPDRWASDPGATGEAKRRFQRIQEAYSVLSDKGKRAMYDAGLFDPLHDDDQDFSDFMQEMLVMMDSVKNEKPDTLEDLQKMLDDIVNGDGGSRATAGAGGSGGGGGGCGGRVPPEANRRTRVAPYPQPSRR

SEQ ID NO: 10133 - protein, 612 aa, Rhinanthus minor
SGKPFYAIIHRVTASLIIDFEPVKPHEVPMTAAGALQSYKLASKAIARLQALSGGSIERLCETMVQEVFELTGYDRVMTYKFHEDDHGEVLTEITKPGLEPYVGLHYPATDIPQAARFLFMKNKVRMICDCRANHVRVIQDENLPMDLTLCGSTLRAPHSCHLQYMENMNSIASLVMSVVVNEGNEEAAPDETPQQLDKRKRLWGLVVCHNTSPRFVPFPLRYACEFLAQVFAIHVNKEIEMENQMLEKNILRTQTLLCDMLLRDAPLGMVSQSPNVMDLVKCDGSILLHKNQKYRLGITPSDFQIRDIVSWLDEYHRDSTGLSTDSLYDAGFPGALALGDVVCGMAAVRITDRDWLFWFRSHTASEIRWGGAKHELGERDDGRKMHPRSSFKAFLEVVKTRSLPWKDFEMDAIHSLQLILRNASSKEMEERKDLEGVEIQARLNELQIDGVQELEAVTSEMVRLIETASVPIFAVGVDGLVNGWNTKIADLTGLPVDKAIGLHFLSLVEESSAEAVSKMLELALEGKEEQNVHFEIKTHGPNSDSSPISLIVNACASRDFRENVVGVCFIAQDITTQKSVMDKFTRIEGDYRAIVQNPNPVIPPIFGTDEF

SEQ ID NO: 10134 - protein, 715 aa, Cryptococcus neoformans var. neoformans JEC21; identical to SEQ ID NO: 904

SEQ ID NO: 10135 - protein, 376 aa, Xanthomonas oryzae pv. oryzae KACC10331
MSKRDYYEVLGVARGASDEELKKAYRRCAMKHHPDRNPGDAAAEAAFKECKEAYEVLSDGNKRRAYDAHGHAAFEHGMGGGGGGPGSPDMGDIFGDIFGNIFGGGAAGPRAARRGADVGYVLELDLEEAVAGIERRIEIPTLIECVSCHGSGSEDGKVQTCGTCHGRGQVRIQRGIFAMQQSCPHCDGRGTLIQNPCKTCHGAGRVEENKVLSIKVPAGVDTGDRIRLAGEGEAGPAGTPPGDLYVEVRVREHAIFQRDGDDLHCEVPIRISQAALGDTVRVATLGGEAEIRIPAETQTGKLFRLRGKGVRSVRSRSEGDLYCRVVVETPVNLTADQRELLQQFEATFTGEDARKHSPKSATFIDGVKGFWDRMTS

SEQ ID NO: 10136 - protein, 612 aa, Schwalbea americana
SGKPFYAIIHRVTGSLIIDFEPVKPHEVPMTAAGALQSYKLAAKAITRLQALPSGSLERLCDTMAQEVFELTGYDRVMVYRFHDDDHGEVFTEITKPGLEPYAGLHYPATDIPQAARFLFMKNKVRMICDCRLNHVKVVQDGNLGFDLTLCGSTLRAPHSCHVQYMENMNSIASLVMSVVVNEGEEESSGPGLDTSQLDKRKRLWGLVVCHNTSPRFVPFPLRYACEFLAQVFAIHVSKELELENQMLEKNILRTQTLLCDMLLRDAPLGIVTQSPNVMDLVKCDGALLLHKGIKYRLGLTPTDFQLRDLVSWLDEYHRDSTGLSSDSLYDGGFPGALALGDAICGMAAVRITDKEWLFWFRSHTAAEIRWGGAKHESAEKDDGRKMHPRSSFKAFLEVVKTRSLPWKDYEMDAIHSLQLILRNTSLKEADDKDLGGREIQEKLGELQIDGMHELEAVTSEMVRLIETASVPIFAVGVDGLVNGWNTKIADLTGLHVDEAIGKHFLGLVEETSADAVSKMLESALEGKEEQNVHFEIKTHGLRSESGPISLIVNACASRDVKDSVVGVCFIAHDITAQKSVMDKFTRIEGDYRAIIQNPNPLIPPIFGTDEF

SEQ ID NO: 10137 - protein, 1171 aa, Physcomitrella patens subsp. patens
MEGLNPISSDLKPQEPPKSQEPPRTQEPLNPVGAPRGRGKFYAIPRSERKSIEVFGGAPTTTRYLPGVAANFGVSSAVAPKESKGKATPSSRIDPPWANPKFAPAELPPAWLAPKPAPNSPPLRPTPSSLPESWNKPPHMLDSLEKSPPWSKPDATKPSASKALLSGEMSLDIPAYKPKRVVGGEEAAPKPVVRHQRSSSDTMTNTLPDLQEERQSAINKLKQQAEEDSKRELAKKARNDGVKSPERKEMTTTVMADRAAEWGLVLKSDAETGKTQGVTIRRSGDNRRSGDRRSSDGENAPGRVSMTLPTVPASRTSETSDAGSDTSHPSNLPKVSREIKDALSTFQQTFVVSDATQPDFPILYASAGFFNMTGYTPKEVIGRNCRFLQGPGTDPEDVTRIRDALKEGRSFCGRLLNYKKDGSAFWNLLTITPIKDDDGKVLKFIGMQVEVSKHTEGKKEKALRPNGLPESLIRYDARLQVKATEAVGDLVGVFKKPTIPTSPRDSQLRKPLLEEEKKLAQQDFAHGSKGAHKRDAARRKSTGTDFVKRNETGQSNVPEGIANEHLAPGNPPRRNRRSSGFLSLLGWTKPEPKLDPELDPELRMLDYEERPESFEVDVERSKEIRRGIDLATTLERIAKNFVITDPRLPDNPIIFASDEFLELTEYTREEILGRNCRFLQGPDTDRAVVDQIRDAIAARRDITVQLLNYTKSGKPFWNLFHLQAMRDHNGELQYFIGVQLDGSEYLEPERRRLSEKTEKEGAKVVQETANNIDGAVRELPDANMKPEDLWSKHSLPVHPKPHSINSPSWEAIRKFRKSGVTLGLKDFRPIKPLGSGDTGSVHLVELRGTGLVFAMKAMDKSVMMQRNKVHRARAERDILALMDHPFLPTLYATFQTQTHICLISDFCLGGELFLLLERQPRKVFTEDVVRFYAAEIVIALEYLHCVGVVYRDLKPENVLLKEDGHIQLTDFDLSFLTSAKPLLVEPDVPPSRRKKPKRPPPPIFFAEPVTPSNSFVGTEEYIAPEIITGQGHSSAVDWWTLGILIYEMLYSRTPFRGKNRQKTFTNVLQKDVIFPASIPVSLQVRQLMRGLLQRNPMKRLGSNRGASDVKTHPFFRGISWPLLRNMKPPPLESPLELISEEVESIKSTPAEDLEWNEHEAAAATTFTSDVF

SEQ ID NO: 10138 - protein, 607 aa, Scrophularia arguta
SGKPFYAIIHRVTGSLVIDFEPVKPHEVPMTTAGALQSYKLAGKAINRSQSLPSGSVERLCDTMVQEVFELTGYDRVMTYKFHDDDHGEVFTEVTKPGLEPYAGLHYPATDIPQAARFLFMKNKVRMICDCRAEHVKVVQDEKLPFDLTLCGPTLRAPHSCHLQYMENMNSIASLVMSVVINEGAEEVSEPSSPQKRKRLWGLVVCHNTTPRFVPFPLRYACEFLAQVFAIHVNKELELENQMLEENILRTQTLLCDMLLKDAPLAIVSQSPNVMDLVKCDGAALLYKNKRYRLGLTPTDFQIRDLLSWLDTYHRDSTGFSTDSLYDAGFPGSLALGDAVCGMAAVKITNKDWLFWFRSHTAAEIRWSGAKHEPGEKDDGRKMHPRSSFRAFLEVVKTGSLPWKDYEMDAMHSLQLILRNAFREADAKDYETEAIHTRLNDLRVDGIHELEAVTSEMVRLIEAASVPILAVDVDGVVNGWNTKIAALTGLTIDQAIGRDFLMLVEDSCADRVSKMLELALQGKEETNVEFEIKTHGSRSGSDPITLIVNACASRDVKENVIGACFIAQDITDQKSMMDKSTRIEGDYRAIVQNPNPLIPPIFGTDEF

SEQ ID NO: 10139 - protein, 392 aa, Acridocarpus chevalieri
DLEPVNPADVPVTAAGALKSYKLAAKAISRLQSLPSGNIFLLCDVLVKEVRDLTGYDRVMVYKFHEDEHGEVVSECRRSDLEAYLGLHYPATDIPQASRFLFMKNKVRMICDCLAPPIKVIQDERLPQPLSLGASTLRSPHGCHAQYMANMGTIASLVMSVTINEDDDMMDGEQQQMARKLWGLVVCHHTSPRFVPFPLRYACEFLIQVFGVQINKEVELAAQVREKHILQIQTLLCDMLLRDAPVAIITQSPNVMDLVKCDGAALYYKKKFWLLGITPTEAQIRDIVEWLLEFHSGNTGLSTDSLMEAGYPGASVLGDAVCGMAAVSITSKDFLFWFRSHTAKEIKWGGAKHDPDDKDDGRKMHPRSSFNAFLEVVKWRSLPWEDIEMDAI

SEQ ID NO: 10140 - protein, 392 aa, Acridocarpus excelsus
DLEPVNPADVPVMATGALKSYKLAAKAISRLQSLPSGDISLLCDVLVKEVRDLIGYDRVIVYKFHEDEHGEVVSECCRSDLEAYLGLHYPTMDIPQASRFLFMKNKVRMICDCLAPLVKVIQDERLHQPLSLYGSTLRSPHGCHAQYMANMGTIASLVMSVTINEDDDMMDGDQQQMPRKLWGLVVCHHTSPRFVSFPLRYACEFLIQVFGVQINKEVELAAQVREKHILRIQTLLCDMLLRDAPVAIITQSSNVMDLVKCDGVALYYKNKFWLLGITPTEAQISDKVEWLLECHSGNTGLSTDSLMEAGYPGASVLGDAVCGMAVVGITSRDFFFWFRSHTTKEIKWGDAKHDPDDKDDGTKIHHRSSFKAFLKVVKWRSLPWEDVEMDAI

SEQ ID NO: 10141 - protein, 422 aa, Vitis vinifera; identical to SEQ ID NO: 911

SEQ ID NO: 10142 - protein, 304 aa, Oryza sativa Japonica Group
MASQRRRSSATAVLLSLLLLLQLAAAYPQGKRQNVAVFWGRNKAEGSLRQTCDTGDYNIVIISFLSVFGHGKYWLDLSGHDLRDVGADIRHCQSKGVYMLLSIGGDGYQYSLPSSKSAADVAENLYYSVLGGDRPGAFHPFGDDTIVNGVDFFIDNGPADHYDDLANRINDYNQNIRDPIGIMLTATVRCSYPDPRMKAALDTKLFRRIHVRFYDDPSCSYNHAGLAGVMAQWNKWSATYPDGQIFLGVVAANLTGKNDMVAVGELRDKLLPAVQNTDTYGGVMLWNSYYDSLTHYGRYVKDLA

SEQ ID NO: 10143 - protein, 392 aa, Acridocarpus orientalis
DLEPVNPADVPVTAAGALKSYKLAAKAISRLQSLPSGNISLLCDVLVKEVRDLTGYDRVMVYKFHEDEHGEVVSECRRSDLEAYLGLHYPATDIPQASRFLFMKNKVRMICDCLAPPIKVIQDERLPQPLSLGGSTLRSPHGCHAQYMANMGTIASLVMSVTINEDDDMMDGDQQQMARKLWGLVVCHHTSPRFVPFPLRYACEFLIQVFGVQINKEVELAAQVREKHILQIQTLLCDMLLRDAPVAIITQSPNVMDLVKCDGAALYYKKKFWLLGITPTEAQIRDIVEWLLEFHSGNTGLSTDSLMEAGYAGASVLGDAVCGMAAVSITSKDFLFWFRSHTAKEIKWGGAKHDPDDKDDGRKMHPRSSFKAFLEVVKWRSLPWEDVEMDAI

SEQ ID NO: 10144 - protein, 451 aa, Oryza sativa Japonica Group
MAQAVVPAMQCQVGAVRARPAAAAAAAGGRVWGVRRTGRGTSGFRVMAVSTETTGVVTRMEQLLNMDTTPFTDKIIAEYIWVGGTGIDLRSKSRTISKPVEDPSELPKWNYDGSSTGQAPGEDSEVILYPQAIFKDPFRGGNNILVMCDTYTPAGEPIPTNKRNRAAQVFSDPKVVSQVPWFGIEQEYTLLQRDVNWPLGWPVGGYPGPQGPYYCAVGSDKSFGRDISDAHYKACLYAGINISGTNGEVMPGQWEYQVGPSVGIEAGDHIWISRYILERITEQAGVVLTLDPKPIQADSVICFVIRLRLILQITKSMREDGGFEVIKKAILNLSLRHDLHISAYGEGNERRLTGLHETASIDNFSWGVANRGCSIRVGRDTEAKGKGYLEDRRPASNMDPYVVTALLAETTILWEPTLEAEVLAAKKLALKFLENHATFHSPVNILVEHHT

SEQ ID NO: 10145 - protein, 392 aa, Acridocarpus smeathmannii
DLEPVNPADVPVTAAGALKSYKLAAKAISRLQSLPSGNISLLCDVLVKEVRDLTGYDRVMVYKFHEDEHGEVVSECRRSDLEAYLGLHYPATDIPQASRFLFMKNKVRMICDCLAPPIKVIQDKRLPQPLSLCGSTLRSPHGCHAQYMANMGTIASLVMSVTINEDDVMMDGDQQQMARKLWGLVVCHHTSPRFVPFPLRYACEFLIQVFGVQINKEVELAAQVREKHILQIQTLLCDMLLRDAPVAIITQSPNVMDLVKCDGAALYYKKKFWLLGITPTEAQIRDIVEWLLEYHSGNTGLSTDSLMGAGYPGASVLGDAVCGMAAVSITSKDFLFWFRSHTAKEIKWGGAKHNPDDKDDGRKMHPRSSFNAFLEVVKWRSLPWEDVEMDAI

SEQ ID NO: 10146 - protein, 448 aa, Oryza sativa Indica Group
MAGVGVVVDPEAVGGGGDGRMKEGLARRAVENLRFRSVWGEVNGAMGDLGTYIPIVLSLALSRQLDLGTTLVFTGIYNAITGLLYGVPMPVQPMKSIAAAALADPSFAIPEIMAAGILTAAFVLFLGLTRLMDLVYRFVPLSVVRGIQLAQGLNFAMAAVKYIRYEQDLGKGKSLGRRPWVGLDGLVLAIAAVCFIVLVNGAGEEQEQRQQQQQWWRRRLGSVPSAVVVFVVGVAFAVARHPAAVRELRAGPSRMRVVHISREAWKQGFIKGALPQIPLSVLNSVVAVCKLTRDLFPERKESPTSVSVTMGAMNLVGCWFGAMPCCHGAGGLAGQYKFGGRSGGCVAALGVLKLALGLLLGGSMLRVLVQFPVGLLGALLLFAGVELAAAARDMSTRAEAFVMLLCTAVSLVGSSAALGFLCGMLAHALLYLRACALRERIVSSQTDL

SEQ ID NO: 10147 - protein, 189 aa, Solanum demissum
MESTISSSSSRSVSPSSSSSPNSPPSPSVTMVVVSPCAACKILRRRCAEKCVLAPYFPPNDPIKFTTAHRVFGASNIIKFLQELPESQRADAVSSMVYEANARLRDPVYGCAGSICQLQKQVSDLQAQLAKAQAEIVNMQCQQANLMALICMEMGQSTPQAISPPQQSLDNFPMNYLDDNIGSWETLWT

SEQ ID NO: 10148 - protein, 1119 aa, Cuscuta pentagona
MSSSRPSQSSSNSARSKHSARIIAQTSIDAKLHAEFEESGDSFDYSSSIRVTSVNTGEQKPRSDKVTTAYLHQIQKAKFIQPFGCLLALDEKTFRVIAFSENAPDMLTMVSHAVPSVGDLPVLGIGTDIRTIFTAPSGAALQKALGFGEVSLLNPILVHCKTSGKPFYAIVHRVTGSLIVDFEPVKPYEAPMTAAGALQSYKLAAKAIARLQSLPSGSLERFCDTIVQEVFELTGYDRVMAYKFHDDDHGEVVSEITKPGLEPYLGLHYPATDIPQAARFLFMKNKVRMICDCQAKHVKVVQDEKLLFDLTLCGSTLRAPHTCHLQYMENMNSIASLVMAIVVNDGDDEEEEERSGSGKRKRLWGLVVCHNTTPRFVPFPLRYACEFLAQVFAIHVNKELELENQIVEKNILRTQTLLCDILLRDAVLGIVSQSQSPNMMDLVKCDGAVLLYKSKIHRLGITPTDFQLQDIVYRLNEHHMDSTGLSTDSLYDAGFPGALSLGLCGMASVRISEKDWLFWFRSHTASEVRWGGVKHEPDDGRKMHPRSSFKAFLEVVETRSLPWKDYEMDGIHSLQLIMRNAFFNEADTVATNVIHAKLNDLRIDGLQELEAVTSEMVRLIETAMVPIIAVGVDGLVNGWNTKIAELTGLSVDEAIGNHLLTLVEDSSVHTVKKMLNLALQGEEEKNVQFEIMTHGIRSECGPISLVVNACASRDVQESVVGVCFIAQDITGQKTVMDKFTRIEGDYRAIIQNPNPLIPPIFGTDEFGWCSEWNSAMTKLSGWRRDEVIDKMVLGEVFGTQKACCRLKSHEAFVTLGVVLNNAITGHESDKTVFGFCTRNGKYVECLLSVTKRLNQDGAVIGLFCFLQLASQELQQALHFQKLSEQTATKRLKVLAYLRKQVKNPLSGIMFSRKMLEGTELGNDQQNILHTSAQCQQQLSKVLDDTDLDCIIEGYLDLEMVEFKLDEVLLASISQVMTKSNGKSLRVINDVAENVLCETLYGDSLRLQQVLAEFLSVAVNFTPSGGQLAVSSSLTKDHLGQSVQLAHLEFRVTHSGGGVPEELLTQMFGSDVDALEEGISLLVSRNLVKLMNGDVQYHREAGRSAFIISVELAVATKPRA

SEQ ID NO: 10149 - protein, 392 aa, Acridocarpus zanzibaricus
DLEPVNPADVPVTAAGALKSYKFAAKAISRLQSLPSGNISLLCDVLVKEVRDLTGYDRVMVYKFHEDEHGEVVSECRRSDLEAYLGLHYPATDIPQASRFLFMKNKVRMICDCLAPPIKVIQDERLPQPLSLGGSTLRSPHGCHAQYMANMGTIASLVMSVTINEDDDMMDGDQQQMARKLWGLVVCHHTSPRFVPFPLRYACEFLIQVFGVQINKEVELAAQVREKHILQIQTLLCDMLLRDAPVAIITQSPNVMDLVKCDGAALYYKKKFWLLGRTPTEAQIRDIVEWLLEFHSGNTGLSTDSLMEAGYPRASVLGDAVCGMAAVSITSKDFLFWFRSHTAKEIKWGGAKHDPDDKDDGRKMHPRSSFKAFLEVVKWRSLPWEDMEMDAI

SEQ ID NO: 10150 - protein, 1137 aa, Solanum lycopersicum
MESQSSENRRGGGGRTSLNQNKQNNNKDSGLNTSSAASNMKNNASKAALAQYNADAKLMAEFEQSSVSGKSFDYSKSVLFPPHEANEEEITSYLSRIQRGGLVQPFGCMVAIEEPTFKIIGYSENCYDMLGFKPTKMKLGLIGVDARNLFTPSSGDSLAKVMASREISLLNPIWVHSRTTHKPFYAILHRIDVGIVIDLEPANSSDPALLLAGAVQSQKLAVRSISRLQSLPGGDIGVLCDTAVEDVQKLTGYDRVMVYKFHDDNHGEIVSEIRRSDLEPYLGLHYPATDIPQAARFLFKQNRVRMICDCNAQPVKVVQSEELKQPICLVNSTLRSPHECHSKYMANMGSISSLVMAILINSGDSMKLWGLIVCHHTSPRYVPFPLRYACEFFTQAFGLQLNMELQLASQLAEKKTLQMQTLLCDMLLRDVPFGVVTQSPSIMDLVKCDGAALYCGGKCWLLGVTPTEAQVKDIAQWLLVAHKDSTGLSTDCLADAGYPGAALLGDAVCGMATARITSKDFLFWFRSHTAKEVKWGGAKHHPDDKDDGGKMHPRSSFNAFLEVVKSRSLPWEIPEINAIHSLQIIMRESIQENENSSLKTLTTSQQNDADGPSMDELSSVAMEMVRLIETATAPIFGVDPSGLINGWNEKIADLTGLHASEAVGMSLINDITHEDSRGTVEKVLHRALLGEEEKNVEIKLRRFGKDPPGSVIYLVINACTSRDHKNGVVGVSFVAQDVTPEKFIMDKFIQLRGDYEAIVQSLSPLIPPIFASDENACCSEWNAAMERLTGWTKYEVMGRTLPGEVFGGLCRLTGQDALTKFMILFYQAISGHDTKKLPFGFFNRRGEFLEVFLTANKRTDEHGNVCGCFCFLQPMTIDPEASDERQDSKDSLWKYKEYVYVLQQMKNPLNGIQFTHKLLEATGVSDNQKQLLETSEACEKQILSVIDNMDFGGIEDGKVQLNMEEFVLGNVVDAIVSQVMIFLKEKNLQLLHDIPDQIKTLPLYGDQIKLQRVLSDFLLSVVHHAPSPDGWVEIKVLPGLKLIQDGNELIHLQLRMTHPGQGLPAALIDDMSGERNRWTTQEGIALNVAQKLLNVMNGHVRYVRGEDKCYFLIDVELQTLKPTQHGPKLEVTQEIEI

SEQ ID NO: 10151 - protein, 455 aa, Oryza sativa Japonica Group
MAGVGVVVDPEAVGGGGDGGGDGRMKEGLARRAVENLRFRSVWGEVNGAMGDLGTYIPIVLSLALSRQLDLGTTLVFTGIYNAITGLLYGVPMPVQPMKSIAAAALADPSFAIPEIMAAGILTAAFVLFLGLTRLMDLVYRFVPLSVVRGIQLAQGLNFAMAAVKYIRYEQDLGKGKSLGRRPWVGLDGLVLAIAAVCFIVLVNGAGEEQEQRQQQQQQQQWWRRRLGSVPSAVVVFVVGVAFAVARHPAAVRELRAGPSRMRVVHISREAWKQGFIKGALPQIPLSVLNSVVAVCKLTRDLFPERKESPTSVSVTMGAMNLVGCWFGAMPCCHGAGGLAGQYKFGGRSGGCVAALGVLKLALGLLLGGSMLRVLVQFPVGLLGALLLFAGVELAAAARDMSTRAEAFVMLLCTAVSLVGSSAALGFLCGMLAHALLYLRACALRERIVSSQTDL

SEQ ID NO: 10152 - protein, 376 aa, Andropogon ternarius
ALSIAGAVQSQKLAVRAISRLQALPGGDVKLLCDTVVEHVRVLTGYDRVMVYRFHEDEHGEVVAESRRDNLEPYLGLHYPATDIPQASRFLFRQNRVRMIADCHATPVRVIQDPGLSQPLCLVGSTLRAPHGCHAQYMANMGSIASLVLAVIISSGGDDEQTGRGGISSAMKLWGLVVCHHTSPRCIPFPLRYACEFLMQAFGLQLNMELQLAHQLSEKHILRTQTLLCDMLLRDSPTGIVTQSPSIMDLVKCDGAALYYHGKYYPLGVTPTESQIKDIIEWLTVCHGDSTGLSTDNLADAGYLGAAALGDAVCGMAVAYITPSDYLFWFRSHTAKEIKWGGAKHHPEDKDDGQRMHPRSSFKAFLEVAKSRSLPW

SEQ ID NO: 10153 - protein, 302 aa, Arabidopsis thaliana; identical to SEQ ID NO: 7078

SEQ ID NO: 10154 - protein, 376 aa, Apluda mutica
ALSIAGAVQSQKLAVRAISRLQALPGGDVKLLCDTVVEHVRELTGYDRVMVYRFHEDEHGEVVAESRRDNLEPYLGLHYPATDIPQASRFLFRQNRVRMIADCHATPVRVIQDPGLSQPLCLVGSTLRAPHGCHAQYMANMGSIASLVMAVIISSGGDDEQTGRGGISSAMKLWGLVVCHHTSPRCIPFPLRYACEFLMQAFGLQLNMELQLAHQLSEKHILRTQTLLCDMLLRDSPTGIVTQSPSIMDLVKCDGAALYYHGKYYPLGVTPTESQIKDIIEWLTVCLGDSTGLSTDSLADAGYLGAAALGDAVCGMAVAYITPSDYLFWFRSHTAKEIKWGGAKHHPEDKDDGQRMHPRSSFQAFFEVVKSRSLPW

SEQ ID NO: 10155 - protein, 233 aa, Aristolochia gigantea
IPQAARFLFMKNKVRMICDCYAKPVKVFQDEKLSFDLTLCGSTLRAPHSCHLQYMKNMSSVASLVMAVVVNEGEEDDNPDPNQQQQVPKRKRLWGLVVCHNTTPRFVPFPLRYACEFLMQVFAIHVNNELELESQIREKNILKTQTLLCDMLLRDSPLSIVTRSPNIMDLVKCDGAALMYQNKVYTLGLAPTESQIREINRWLLEYHMDSTGLSTDSLHDAGYPSVLSLGDIV

SEQ ID NO: 10156 - protein, 356 aa, Frankia sp. EAN1pec
MSSKSKSYQAEYIWIDGTEPEPLMRSKTRIVKGGKEPEIWGFDGSSTNQAPGSNSDCVLQPVFTCPDPLRGGDNVLVLCEVQLTDFTPHPTNTRAAARAVAEKYADMSPMFGIEQEYTFFQNGRPLGWPASGFPEAQGPYYCGVGGEKMPGRDIVEKHTQACLDAGLAIEGTNAEVMMGQWEFQIGVLPTPAIGDHIWVGRWLLHRIAEDFGASVSFAAKPMAGDWNGAGAHTNFSTKQTMESWDAIVAVCEALGTRVMEHVTHYGDGIELRLTGKHETAPWNKFSWGASDRGASIRIPWAVEKAKKGWIEDRRPNANMDPYVVSSLIVDTCCSALAGDKPTLFVPSQTADATVKV

SEQ ID NO: 10157 - protein, 147 aa, Oryza sativa
MTGKNYYEMLELPKNASEADIKKAYRRLALKWHPDKNPDNQKEAEKRFKEISEAYEVLSDNNKRQIYDRYGKEGLTRGAGGSAGALRPTVTSTSTRSRPSLAWAVAAAPGGCPTEFIFKVTRDLQGVLGTRTFLIFYRSSQKGCRFV

SEQ ID NO: 10158 - protein, 238 aa, Aristolochia grandiflora
IPQASRFLFMKNRVRMICDCYAKPVKVYQDEKLSFDLTLCGSTLRAPHSCHSHYMKNMSSIASLVMAVVVNEGEEDDNPNSNQQQQPQQQQVPKRKRLWGLVVCHHTTPRFVPFPLRYACEFLMQVFAIHVNNEVELENQIREKNILRTQTLLCDMLLRDSPLSIVTRSPNIMDLVKCDGAALMYLGKVYTLGLAPTESQIREINRWLLEYHMDSTGLSTDSLQDAGYPGALSLGDVV

SEQ ID NO: 10159 - protein, 376 aa, Bothriochloa odorata
ALSIAGAVQSQKLAVRAISRLQALPGGDVKLLCDTVVEHVRELTGYDRVMVYRFHEDEHGEVVAESRRDNLEPYLGLHYPATDIPQASRFLFRQNRVRMIADCRATPVRVIQDPGLSQPLCLVGSTLRAPHGCHAQYMANMGSIASLVMAVIISSGGDHEQTGRGGISSAMKLWGLVVCHHTSPRCIPFPLRYACEFLMQAFGLQLNMELQLAHQLSEKHILRTQTLLCDMLPRDSPTGIVTQSPSIMDLVKCDGAALYYHGRYYPLGVTPTESQIKDIIEWLTVCHGDSTGLSTDSLADAGYLGAAALGDAVCGMAVAYITPSDYLFWFRSHTAKEIKWGGAKHHPEDKDDGQRMHPRSSFKAFLEVVKSRSLPW

SEQ ID NO: 10160 - protein, 349 aa, Oryza sativa; identical to SEQ ID NO: 8424

SEQ ID NO: 10161 - protein, 232 aa, Aristolochia kaempferi
IPQASRFLFMKNKVRMICDCYAKPVKVYQDERLSFDLTLCGSTLRASHSCHLQYMKNMGSVASLVLAVVVKEGEEDDNPDPNQEPQSKRKRLWGLVVCHNTTPRFVPFPLRYACEFLMQVFAIHVNNEVELENQIREKNILRTQTLLCDMLLRDSSLSIVTRSPNIMDLVKCDGAAFLCRNKVYTLGVTPTESQIREINQWLSEYHMDSTGLSTDSLHDAGYPNALSLGDIV

SEQ ID NO: 10162 - protein, 218 aa, Solanum tuberosum
MVKLTLIARVTDGLPLAEGLDDGRDVQNADFYKQQVKALFKNLSMRQNDASRMSIETGPYVFHYIIEGHVCYLTMCDRSYPKKLAFQYLEDLKNEFERANGSQIETAARPYAFIKFDTFIQKTKKLYQDTRTQRNISKLNDELYEVHQIMTRNVQEVLGVGEKLDQVSQMSSRLTSESRIYADKAKDLNRQALIRKWAPVAIVLGVVILFFWLRTKIW

SEQ ID NO: 10163 - protein, 173 aa, Solanum lycopersicum
AGINISGINGEVMPGQWEFQVGPSVGISAGDEVWVARYILERIAEIAGVVVSFDPKPIPGDWNGAGAHTNYSTKSMREDGGYEIILKAIEKLGLKHKEHIAAYGEGNERRLSGKHETANINTFKWGVANRGASVRVGRDTEKAGKGYFEDRRPASNMDPYVVTSMIAETTIIG

SEQ ID NO: 10164 - protein, 229 aa, Aristolochia kaempferi
IPQAARFLFMKNKVRMICDCYAKPVKVYQDGRLSFDLTLCGSTLRAPHSCHMQYMKNMGSIASLVMAVVVNEGEEDNNPDTNQEQQAQPKRKRLWGLVVCHNTTPRFVPFPLRYACEFLMQVFAIHVNNELELENQIREKNILRTQTLLCDMLLRDSPLSIVSRSPNILDLVKCDGAALLYQNKVYTLGAAPTESQIHEINRWLSEYHMDSTGLSTDSLQDAGYPKALS

SEQ ID NO: 10165 - protein, 336 aa, Zea mays
MGADYYKVLGVDRGAGDDDLKKAYRKLAMRWHPDKNTTNKKEAETKFKDISVAYEVLSDPKKRAIYDQLGEEGLKGQPPPGAGGSGAFPFFPGGAHSTAPHFNHRSADDIFKEFFGSPGMGGMRAEPGFQRSMFGNDIFSSRFGAEGSTSMQQPPRKAAAIENPLPVSLADLYKGVTKKMKISREAIDASGRISNAEDILTIEVRPGWKKGTKITFPDKGNEAPNMKAADIVFILDEKPHDVFTRDGNDLVVTEKISLVEALIGYTARVTTLDGRSLSLPINSIIHPSYEEVVPREGMPIPKDPSKKGNLRIKFNIMFPSRLTSDQKAGLKRILGS

SEQ ID NO: 10166 - protein, 233 aa, Aristolochia maxima
IPQAVRFLFVKNKVRMICDCYAKPVKVYQDEKLSFDLTLCGSTLRAPHSCHLQYMKNMSSVASLVMAVVVNEGEEDGNPDPNQQQQQPKRKRLWGLVVCHNTTPRFVPFPLRYACEFLMQVFAIHVNNELELENQIREKNILRTQTLLCDMLLRDSPLSIVTRSPNIMDLVKCDGAALMYQNKVYTLGLAPTESQIREINRWLLEYHMDSTGLSTDSLHDAGYAKALSLGDIV

SEQ ID NO: 10167 - protein, 1128 aa, Oryza sativa; identical to SEQ ID NO: 7073

SEQ ID NO: 10168 - protein, 614 aa, Sopubia cana
FYAIIHRVTGCIVIDFEPVKPHEVPMTAAGALQSYKMAAKAIARLQALPNGSLERLCQTMAQEVFELTGYDRVMVYRFHDDDHGEVFAEITKPGLEPYLGLHYPAIDIPQAARFLFMKNKVRMIWDCRANRVKVVQDEALSSDLTLCGSTLRAPHSCHLRYMENMNSIASLVMSVVINEGTDEDSPISSSPSHPDKRIRIWGLVVCHHTSPRFIPFPLRYACEFLSQVFAIHVTKELELQNQMLEKSILKTQTVLCNMLLRGSPLSIVTQSPTVMDLIKCDGSILLYKGTMHRLGMAPSELQIQDIISWLDEYHSDSTGMSTDSLLEAGFPGAAALGDAFCGMAAVRITVRDWLFWFRAHTAAEVRWGGAKHEKEDEDDGRRMHPRSSFKAFREVVKARSVLWRDFEMDAIHTLQLILRSVCEKEEEEERERRKDVVVAGEIEARLNEMHINGAKEMDAVISEMVRLIEMASVPILAVGVNRMVNGWNTKIADLTGLPVDGAIGRQFLELIEEDSADVVRRMLELALQGQEERNVQFEIKTHGPRANSGSISLVVNACTNRDVEDNIVGVVFIAQDVTTERSMMDKFTRIEGDYRAIVQNPNPLIPPIFGLDEF

SEQ ID NO: 10169 - protein, 118 aa, Oryza sativa
MASNHIDFYEVLELKRDASQNEIKKAYRKLALRWHPDKNPNNKDEAEKKFKNISQAYEILSDEKRKKIYDKYGIEGIMGENQSGGNYNFSGGVNPFDLFNNDLGGMGFGVWNEFGKYI

SEQ ID NO: 10170 - protein, 392 aa, Camarea axillaris
DLEPVNPADVPVTAAGALKSYKLVAKAISRLQSLPSGNISLLCDVLVKEVRDLTGYDRVMVYKFHEDEHGEVVSECRRSDLESYLGLHYPATDIPQASRFLFMKNKVRMICDCLAPPVKVIQDERLPQPLSLCGSTLRSPHGCHAQYMTNMGTIASLVMSVTVNEDDDTMDGDQQHMTKKLWGLVVCHHASPRFVPFPLRYACEFLIQVFGVQINKEVELAAQVREKHILQIQTMLCDMLLRDAPVAIITQSPNVMDLVKCDGAALYFKNKTWLLGVTPTEEQIRGIAEWLLEYHSGNTGLSTDSLMEAGYPGASGFGDAVCGMAAVSITSRDFLFWFRSHTAEEIKWGGAKHDPDDKDDLRKMHPRSSFKAFLEVVKWRSMPWEDVEMDAI

SEQ ID NO: 10171 - protein, 299 aa, Malus x domestica
MASKSTATFLALLSLVTLVLALGANAGGIAIYWGQNGNEGTLAETCASGNYQFVNVAFLTTFGNGQTPAINLAGHCDPTTEECTKLSPEIKSCQAKGIKVILSIGGASGSYSLTSADDARQVATYLWNNFLGGQSSSRPLGAAVLDGIDFDIEGGTDQHWDDLARYLSGYSKRGKKVYLTAAPQCPFPDAYVGNALKTGLFDNVWVQFYNNPPCQYASGDVTNLEDAWKQWTSAIPADKIFLGLPAAPQAAGSGFIPATDLSSQVLPAIKSSAKYGGVMLWSKYYDDPDGYSSSIKNDV

SEQ ID NO: 10172 - protein, 471 aa, Striga asiatica
SGKPFYAIIHRVTGSLVIDFEPVKPHEVPMTAAGALQSYKLAAKAITRLQALPSGSLEKLCETMAQEVFELTGYDRVMVYKFHEDDHGEVFAEVTRPGLEPYLGLHYPATDIPQAARFLFMKNKVRMICDCRAAHVKVVVQDEGFSSNLTLCGSTLRAPHSCHLRYMENMNSIASLVMSVVINEGTDEESSTATSSSSSSHHHPDKQKRLWGLVVCHHTSPRFVPFPLRYACEFLSQVFSIHVGKELELLNQTLEKNILKTQTMLCDMLLRGNPLAVVTQSPTVMDLVKCDGAVFLYKGKNHRLGLSPSDLQIFDIVSWLDEFHRDSTGMTTDSLLGAGFPGAGALGDAFCGMAAVRITGRDWLFWFRSHTAAEVQWGGAKQEKGEEDDGRKMHPRSSFKAFLEVVKARSVAWREFEMDAIHSLQLILRNACDKEEEEEARRKDMVVAGEIQSRLNELHIDGAKEMEMVTS

SEQ ID NO: 10173 - protein, 392 aa, Heteropterys aureosericea
DLEPVNPADVPVTAAGALKSYKLASKAISRLQSLPSGNISLLCDVLVKEVMDLTGYDRVMVYKFHEDDHGEVVSERRRSDLESYLGLHYPATDIPQASRFLFMKNKVRMICDCLAPPVKVIQDERLPQPLSLCGSTLRSPHGCHAQYMTNMGTIASLVMSVTINEDDDMMDGDQQQMTRKLWGLVVCHHTSPRFVPFPLRYACEFLIQVFGVQINKEVELAAQVREKHILQIQTMLCDMLLRDAPVAIITQSPNVMDLVKCDGASLYFKNKTWLLGVTPTEEQIRDIAEWLLEYHSGNTGLSTDSLMEAGYPGASVLGDAVCGMAAVSITSRDFLFWFRSHTAKEIKWGGAKHDPDDKDDLRKMHPRSSFKAFLEVVQWRSMPWEDIEMDAI

SEQ ID NO: 10174 - protein, 289 aa, Oryza sativa Japonica Group; identical to SEQ ID NO: 9706

SEQ ID NO: 10175 - protein, 392 aa, Heteropterys bahiensis
DLEPVNPADVPVTAAGALKSYKLASKAISRLQSLLSGNISLLCDVLVKEVRDLTGYDRVMVYKFHEDEHGEVVSECRRSDLESYLGLHYPATDIPQASRFLFMKNKVRMICDCLAPPVKVIQDERLPQPLSLCGSTLRSPHGCHAQYMTNMGTIASLVMSVTINEDDDMMDGDQQQMTRKLWGLVVCHHTNPRFVPFPLRYACEFLIQVFGVQINKEVELAAQVREKHILQIQTMLCDMLLRDAPVAIITQSPNVMDLVKCDGAALYFKNKTWFLGVTPTEEQIRDIAGWLLEYHSGNTGLSTDSLMEAGYPGASVLGDAVCGMAAVSITSRDFLFWFRSHTAKEIKWGGAKHDPDDKDDLRKMHPRSSFKAFLEVVKWRSMPWEDIEMDAI

SEQ ID NO: 10176 - protein, 111 aa, Glycine max; identical to SEQ ID NO: 2826

SEQ ID NO: 10177 - protein, 124 aa, Triticum aestivum
  misc_feature (26)..(26): Xaa can be any naturally occurring amino acid
EPGVCMRQLERMRPAHLRKLNPTPYXKVSVSAQLYDFIHFLWLNEAPVGELAMKKDDNGSIQHGSNPDSLYLFFKNNACVSSTMHCKVFMSKGHGLNIYSAQVLNKHHTRVCTIDLTEYHAVVL

SEQ ID NO: 10178 - protein, 298 aa, Geobacter metallireducens GS-15
MAQTDYYEVLGLKKGATEAEIKKAYRKLAVKYHPDKNPGDKGAEDKFKEINEAYAVLSDPQKRAQYDQFGSSGFHQRYSQEDIFRGFDVGDIFKDMGFGTDDIFSRIFGGAGGFRQGGFGFGGGRRRGEDFTMEVPVTFRESYDGGEKRVAFMRDGKREELAVKIPAGVEDGARLRVAGKGGFGHGGGPTGDLYLIIKVGTDPHFTREGDDIVVERKIRFTDALLGASLDVPTLEGTKRIKIPAGIQPGTKIRLKGLGFPRMGKAGKGDLFVRIGVSVPESLTPEQKTLVEELRGKGL

SEQ ID NO: 10179 - protein, 392 aa, Heteropterys bicolor
DLEPVNPADVPVTAAGALKSYKLASKAISRLQSLPSGNISLLCDVLVKEVRDLTGYDRVMVYKFHEDEHGEVVSECRRSDLESYLGLHYPATDIPQASRFLFMKNKVRMICDCLAPPVKVIQDERLPQPLSLCGSTLRSPHGCHAQYMTNMGTIASLVMSATINEDDDMMDGDQQQMTRKLWGLVVCHHTSPRFVPFPLRYACEFLIQVFGVQINKEVELAAQVREKHILQIQTMLCDMLLRDAPVAIITQSPNVMDLVKCDGAALYFKNKTWLLGVTPTEEQIRDIAEWLLEYHSGNTGLSTDSLMEAGYPGASVLGDAVCGIAAVSITSRDFLFWFRSHTAKEIKWGGAKHDPDDKDDLRKMHPRSSFKAFLEVVKWRSMPWEDMEMDAI

SEQ ID NO: 10180 - protein, 273 aa, Vitis vinifera
MAADYYKLLRVNRNAGAEELKKAYKRLAIKWHPDKNPNHNRVEAEAKFKQISEAYDVLSDSRKRQIYDLYGYQYASFNHRDARDVFAELFGSGGKAMEKRLDCSLEELYQGSKREIKISRTVIRESGKARIVEETLLITIGPGWKKGTKITFPMKGNQEPGMTPSDLIFVVHEKPHALYEREGNDLVVKQSISLLDALTGKTLILTTLDGRNLTIPVTDIVRPGYVMVIPDEGMPMSKEPTKKGNLKIKFDVKFPPRLTAQQKYEVKRVLVGG

SEQ ID NO: 10181 - protein, 392 aa, Heteropterys byrsonimifolia
DLEPVNPADVPVTAAGALKSYKLASKAISRLQSLPSGNISLLCDVLVKEVRDLTGYDRVMVYKFHEDEHGEVVSECRRSELESYLGLHYPATDIPQASRFLFMKNKVRMICDCLAPPVKVIQDERLPQPLSLCGSSLRSPHGCHAQYMTNMGTIASLVMSATINEDDDMMDGDQQQMTRKLWGLVVCHHTSPRFVPFPLRYACEFLIQVFGVQINKEVELAAQVREKHILQIQTMLCDMLLRDAPVAIITQSPNVMDLVKCDGAALYFKNKTWLLGVTPTEEQIRDIAEWLLEYHGGNTGLSTDSLMEAGYPGASVLGDAVCGMAAVSITSRDFLFWFRSHTAKEIKWGGAKHDPDDKDDLRKMHPRSSFKAFLEVVKWRSMPWEDIEMDAI

SEQ ID NO: 10182 - protein, 373 aa, Methanosarcina acetivorans
MAGDVNNEVNSKKRQGDTLAKERLLGLAEKIYNQFEEEVIPSVSLPSRTKANIEYSDESDVWVYGDRESERSAKTVKGAFQLLKTTYATDFLINEHLAHNRGSTLRELYYISEGWDYAKFKEQAESDRLIEDLELLTSLQREYFHMRPEEDGATMFGPIEISELTKRGARNIHCQKDVGEGGYQIPFNVENIEFKNHDASMIIAIETGGMYARLMENGFDEAYNAILVHLKGQPARSTRRIIKRMNEELEIPVAVFTDGDPWSYRIYASVAYGAIKSAHLSEFMATPAARFLGLQPSDIVEYELSTDKLTEQDISALRSELSDPRFESEYWKEQIQLQLDIGKKAEQQAFAGKGLDFVTEVYLPNRLKELGMV

SEQ ID NO: 10183 - protein, 599 aa, Oryza sativa Indica Group
MAAVAGSASAGANGSAAAHRVGAPTNPMATALLTDQYQFSMAYAYWKAGKHADRAVFDLYFRKNPFGGEFTVFAGLEECIKFIANFKFTEDDILFLQSVMPMCEDAFFDYLRKTDCSDVEVYSIPEGSVVFPKVPLMRVEGPVAVVQLLETPFVNLINYASLVTTNAARHRHVAGKSKVLLEFGLRRAQGPDGAISASKYCFMGGFDATSNVLAGNLFGIPLRGTHSHAYVSSYMSLDEIPDKSLKSKDGSRVCKDFVSLVKEWLQKIQLADSLCGVFGETNQSELAAFASYALAFPTNFLALVDTYDVMRSGIPNFCAVALALHDLGYKASGIRLDSGDLAYLSIEARKVFRTLEKEFNVPAFGKMIITASNDLNEETIDALNKQGHEVDSFGIGTYLVTCYSQAALGCVFKLVEINSRPRIKLSEDVAKCHDGFQVSIPCKKRCFRLYGKEGYPLVDIMMRESEPSPKAGERILCRHPFLESKRAYVVPQHVEELLQCYWPGTSNKPRVELPSLEEIRGRCMQQLEKLRPDHIRRLNPTPYKVIDSETKAAKHWYNIRTPYSELKLEQNKNVVAPCVGCWAGFLVVFMVQGKLKIPE

SEQ ID NO: 10184 - protein, 406 aa, Coprinopsis cinerea okayama7#130
MRDRLKSAPSQPDPSKIPFRRTYSSNSIKVGRVEVGPSSFLKVKMLGKGDVGRVYLVREKKTNKLYAMKVLSKKEMIERKKIKRALTEQEILATANHPFIVTLYHSFQSEGYLYFCMEYCMGGEFFRALQTRPGKCLPEDGSRFYAAEVVAALEYLHLMGFIYRDLKPENILLHQSGHIMLSDFDLAKQSAEYGGLPSMVHSEQNGVPLVDTMSCTANFRTNSFVGTEAIPEYIAPEVIAAQGHTAAVDWWTLGILIYEMIYATTPFKGQERNETFNNIRHQPVTFRDSPKISSAGKDCMTRLLDKNERTRLGSRSGASEVKQHKWFSKINWGLLRNTRPPIVPSSSNGLDAAHFRHMRESTSLHLDLEDQSKAQPSADLLADDGQPADVLFKAFNSITLHHDGDT

SEQ ID NO: 10185 - protein, 724 aa, Spinacia oleracea
LTVTPIRDDKGCVIKFIGMQVEVSKFTEGINDKALRPNGLPKSLIRYDPRQKEAALGSIIEVVQTVKHPRSLSQPLSNNDADRREVAGKFNLDYMLPKLAEIDNVGTPGRLSSPSRLSTPGRQTPKIDASSRDSDKSSRKSARISLLGFKGRSSAKHERPPSPEPEFLIPKDIDRDDSWERAERERDVRQGIDLATTLERIEKNFVISDPRLPDNPIIFASDSFLELTEYTREEILGRNCRFLQGPETDQTTVQKIRDAIKEQRDITVQLINYTKSGRKFWNLFHLQPMRDQKGELQYFIGVQLDGSDHVEPLRNRLSERTEIQSAKVVKATAENVDEAVRELPDANSRPEDLWAIHSEPVYPRPHKRGSSSWAAIQKITAAGEKVGLEHFNPIKPLGCGDTGSVHLVELKVPENWFAMKAMDKSVMLNRNKVHRACVEREIISTLDHPFLPTLYASFQTSTHVCLITDFCPGGELFALLDKQPLKIFKEESARFYAAEVVIGLEYLHCLGIIYRDLKPENILLQKDGHLVLTDFDLSFLTSCNPHIINHPQPKKRRSRSQPPPTFIAEPVTQSNSFVGTEEYIAPEVITGASHTSAIDWWALGVLLYEMLYGRTPFRGKNRQKTFANIMHKDLTFPSSIPVSLSARQLIYALLNRDPATRLGTQGGASEIKEHPYFRGINWPLIRCMDPPTLEAPFKLIGRDPNAKEVKWDDDGVLASPMDFF

SEQ ID NO: 10186 - protein, 376 aa, Chionachne koenigii
ALSIAGAVQSQKLAVRAISRLQALPGGDVKLLCDTVVEHVRELTGYDRVMVYRFHEDEHGEVVAESRRDNLEPYLGLHYPATDIPQASRFLFRQNRVRMIADCHATPVRVVQDPGLSQPLCLVGSTLRSPHGCHAHYMANMGSIASLVMAVIISSGGDDEHTGRGGISSAMKLWGLVVCHHTSPRCIPFPLRYACEFLMQAFGLQLNMELQLAHQLSEKHILRTQTLLCDMLLRDSPTGIVTQSPSIMDLVKCDGAALYYHGKYYPLGVTPTESQIKDIIEWLTVCHGDSTGLSTDSLADAGYLGAATLGDAVCGMAVAYITPSDYLFWFRSHTAKEIKWGGAKHHPEDKDDVQRMHPRSSFKAFLEVVKSRSLPW

SEQ ID NO: 10187 - protein, 428 aa, Pisum sativum
MRDQKGEVQYFIGVQLDGSQHVEPLHNRIAEDTAKEGENLVKKTAENVDDALRELPDANMKPEDLWMNHSKMVHPKPHRREDAAWRAIQKIMESGEQIGLKHFKPIKPLGSGDTGSVHLVELCGTDHQFAMKAMDKGVILNRNKEHRACTEREILDMLDHPFLPALYASFQTKTHICLITDYCPGGELFMLLDRQPAKVLKEDAVRFYATEVVVALEYLHCQGIIYRDLKPENVLLQSTGHVSLTDFDLSCLTSCKPQLLVPSTNDKKKGQHGPIFMAEPMRASNSFVGTEEYIAPEIITGSGHTSAVDWWALGILLYEMFYGYTPFRGKNRQRTFANILHKDLKFPKSKQVSLGAKQLIYYLLQRDPTSRLGSKGGANDIKNHSFFKGINWALVRCTKPPELDAPLFDTNKEEKEKEDKYVDNGQRI

SEQ ID NO: 10188 - protein, 376 aa, Chrysopogon fulvus
ALSMAGAVQSQKLAVRAISRLQALPGGDVKLLCDTVVEHVRELTGYDRVMVYRFHEDEHGEVVAESRRDNLEPYLGLHYPSTDIPQASRFLFRQNRVRMIADCHATPVRVIQDPGLSQPLCLVGSTLRAPHGCHAQYMANMGSIASLVMAVIISSGGDDEQTGRGGISSAMKLWGLVVCHHTSPRCIPFPLRYACEFLMQAFGLQLNMELQLAHQLSEKHILRTQTLLCDMLLRDSPTGIVTQSPSIMDLVKCDGAALYYHGKYYPLGVTPTESQIKDIIEWLTVCHGDSTGLSTDSLADAGYLGAAALGDAVCGMAVAYITPSDYLFWFRSHTAKEIKWGGAKHHPEDKDDGQRMHPRSSFKAFLEVVKSRSLPW

SEQ ID NO: 10189 - protein, 996 aa, Arabidopsis thaliana; identical to SEQ ID NO: 9351

SEQ ID NO: 10190 - protein, 445 aa, Physcomitrella patens subsp. patens; identical to SEQ ID NO: 6663

SEQ ID NO: 10191 - protein, 477 aa, Solanum tuberosum
MATAATLSPADAEKLNNLKSAVAGLNQISDNEKSGFINLVGRYLSGEAQHIDWSKIQTPTDEVVVPYDKLAPLSEDPAETKNLLDKLVVLKLNGGLGTTMGCTGPKSVIEVRNGLTFLDLIVKQIEALNAKFGCSVPLLLMNSFNTHDDTLKIVEKYANSNIDIHTFNQSQYPRLVTEDFAPLPCKGNSGKDGWYPPGHGDVFPSLMNSGKLDALLAKGKEYVFVANSDNLGAIVDLKILNHLILNKNEYCMEVTPKTLADVKGGTLISYEGKVQLLEIAQVPDEHVNEFKSIEKFKIFNTNNLWVNLSAIKRLVEADALKMEIIPNPKEVDGVKVLQLETAAGAAIKFFDRAIGANVPRSRFLPVKATSDLLLVQSDLYTLTDEGYVIRNPARSNPSNPSIELGPEFKKVANFLGRFKSIPSIIDLDSLKVTGDVWFGSGVTLEGKVTIAAKSGVKLEIPDGAVIANKDINGPEDI

SEQ ID NO: 10192 - protein, 376 aa, Chrysopogon gryllus
  misc_feature (240)..(240): Xaa can be any naturally occurring amino acid
ALSIAGAVQSQKLAVRSISRLQALPGGDVKLLCDTVVEHVRELTGYDRVMVYRFHEDEHGEVVAESRRDNLEPYLGLHYPATDIPQASRFLFRQNRVRMIADCHATPVRVIQDPGLSQPLCLVGSTLRAPHGCHAQYMANMGSIASLVMAVVISSGGDDEQTGRGGISSAMKLWGLVVCHHTSPRCIPFPLRYACEFLTQAFGLHLNMELQLAHQLSEKHILRTQTLVCDMLLRDSPSGXVTQSPSIMDLVKCDGAALYYHGKYYPLGVTPTESQIKDIIEWLTVCHGDSTGLSTDSLADAGYLGAAALGDAVCGMAVAYITPSDYLFWFRSHTAKEIKWGGAKHHPEDKDDGQRMHPRSSFKAFLEVVKSRSLPW

SEQ ID NO: 10193 - protein, 396 aa, Danthonia spicata
  misc_feature (124)..(124): Xaa can be any naturally occurring amino acid
  misc_feature (181)..(181): Xaa can be any naturally occurring amino acid
  misc_feature (354)..(354): Xaa can be any naturally occurring amino acid
TGYDRVMVYKFHEDEHGEVVAESRRPDLEPYLGLHYPATDIPQASRFLFQQNRVRMIHDCHATAVRVIQDPGLQQALCLVGSTLRAPHGCHAQYMANMGSIASLVMAVIISSGSDDEQMARGGXSSAMKLWGLVVCHHTSPRFIPFPLRYACEFLMQAFGLQLNMELQLAHQMSEKHILRXQTLLCDMLLRDSPTGIVTQSPSIMDLVKCDGAALYYHGKYYPLGVTPTESQIKDIIEWLTVCHGDSTGLSTDSLADAGYLGAAALGDAVCGMAVAYITPSDYLFWFRSHTAKEIKWGGAKHHPDDKDDGLRMHPRSSFKAFLEVVKSRSLPWENAEMDAIHSLQLILRDSFRXAAEGTSNSKAIVBGQVQLGELELRGINELSSVAREMVRLIET

SEQ ID NO: 10194 - protein, 234 aa, Aristolochia micrantha
IPQASRFLFMKNKVRMICDCYAKPVRVYQDEKLSFDLTLCGSTLRAPHSCHLQYMKNMSSIASLVMAVVVNEGEEDDNPDINQQRQQVPKRKRLWGLVVCHNTTPRFVPFPLRYACEFLMQVFAIHVNNELELENQIREKNILRTQTLLCDMLLRDSPLSIVTRSPNIMDLVKCDGAALMYQNKIYTLGLAPTESQIREINQWLSEYHMDSTGLSTDSLHDAGYPKALSLGDIV

SEQ ID NO: 10195 - protein, 376 aa, Cleistachne sorghoides
ALSIAGAVQSQKLAVRAISRLQALPGGDVKLLCDTVVEHVRELTGYDRVMVYRFHEDEHGEVVAESRRDNLEPYLGLHYPATDIPQASRFLFRQNRVRMIADCHATPVRVIQDPGLSQPLCLVGSTLRAPHGCHAQYMANMGSIASLVMAVIISGGGDDEQTGRGGISSAMKLWGLVVCHHTSPRCIPFPLRYACEFLMQAFGLQLNMELQLAHQLSEKHILRTQTLLCDMLLRDSPTGIVTQSPSIMDLVKCDGAALYYHGKYYPLGVTPTESQIKDIIEWLTVCHGDSTGLSTDSLADAGYLGAAALGDAVCGMAVAYITPSDYLFWFRSHTAKEIKWGGAKHHPEDKDDGQRMHPRSSFKAFLEVVKSRSLPW

SEQ ID NO: 10196 - protein, 376 aa, Coelorachis selloana
ALSIAGAVQSQKLAVRAISRLQALPGGDVKLLCDTVVEHVRELTGYDRVMVYRFHEDEHGEVVAESRRDNLEPYLGLHYPATDIPQASRFLFRQNRVRMIADCHATPVRVIQDPGLSQPLCLVGSTLRAPHGCHAQYMANMGSIASLVMAVIISSGGDDEQTGRGGISSSMKLWGLVVCHHTSPRCIPFPLRYACEFLMQAFGLQLNMELQLAHQLSEKHILRTQTLLCDMLLRDSPTGIVTQSPSIMDLVKCDGAALYYHGKYYPLGVTPTESQIKDIIEWLTVCHGDSTGLSTDSLADAGYLGAAALGDAVCGMAVAYITPSDYLFWFRSHTAKEIKWGGAKHHPEDKDDGQRMHPRSSFKAFLEVVKSRSLPW

SEQ ID NO: 10197 - protein, 234 aa, Aristolochia tomentosa
IPQAARFLFMKNKVRMICDCYAKPVKVYQDERLSFDLTLCGSTLRAPHSCHLQYMKNMGSIASLVMAVVVNEGEEDDNPDTNQEQQAQPKRKRLWGLVVCHNTTPRFVPFPLRYACEFLMQVFAIHVNKELELENQIREKNILRTQTLLCDMLLRDSPLSIVSRSPNIMDLVKCDGAALLYQNKVYTLGAAPTESQIHEINRWLSEYHMDSTGLSTDSLQDAGYPKALSLGDIV

SEQ ID NO: 10198 - protein, 218 aa, Coprinopsis cinerea okayama7#130
MVRSTIIVRASDALPLAASVDDEQTEQALQEHKTQAKVIFRRLSPNVEPRCSIESGQYTLHYLISDNVCFLTIAEKSYPRKLAFSYLDELSKEFASTYGAKVDTVRKPYAFVGFDTFMSKTARLYQDTRTANAAASGLDRLNDDLQDVTRIMTKNMEELLWRGDSLDRMSHLSTSLRSESEKYRKAAKNINFQAMLRQYAPIGAVALFVFIILLWRFW

SEQ ID NO: 10199 - protein, 232 aa, Aristolochia tomentosa
IPQASRFLFMKNKVRMICDCYAKPVKVYQDERLSFDLTLCGSTLRASHSCHLQYMKNMGSVASLVLAVVVREGEEDDNPDPNQEPQSKRKRLWGLVVCHNTTPRFVPFPLRYACEFLMQVFAIHVNNEVELENQIREKNILRTQTLLCDMLLRDSSLCIVTRSPNIMDLVKCDGAALLCQNKVYTLGVTPTESQIREINQWLSEYHMDSTGLSTDSLHDAGYPKALSLGDIV

SEQ ID NO: 10200 - protein, 794 aa, Psilotum nudum
GSIGSLVMAVIVNDNDAEPSGRGNQPKNRRLWGMVVCHHTTPRAVPFSLRSACEFLMQVFGLQLNMEIELAAQMREKHILRTQTLLCDMLLRDAPIGIVTQSPNIMDLVKCDGAALYYGKKFWLLGTTPTEAQIKDLADWLLDVHRDSTGLSTESLADAGFPGAAALGDAVCGMAAVKITPRDYLFWFRSHTAKEIKWGGAKHNPDDKDDGKKMHPRSSFKAFLEVVKWRSSPWEDVEMDAVHSLQLILRGSFQDIDDSESKTMIHHRLNDLNLHGMDELSTVANEMVRLMETATAPILAVDSSGFINGWNGKAAELTGLPLEDAMNKSLVRDLVVDESVSTVERLLYLALQGEEERNVEIKLKTFGTQADKGPVILVVNACASRNITANVVGVCFVGQDVTGEKVVMDKFTRIQGDYRTIVQSPNPLIPPIFGSDEFGYCSEWNPAMVKLSGWKMEEVLGKMNVGEIFGSEMACCRLRGQDAMTKFMIVLNSAMGGQDSDRFPLGFFDRQGKYVEALLIANKRTDGAGAITGVFCFLHIASAEVQQALQVQKRSARTALDKLKEVAYMRQEIRNPLYGIMFTRRLLEGTNLSEEQKQIIDTSAVCEKQLHQILDEDNFENLDHGNIDLDTIEFTMGTVMDAVISQGMIRSREKGLQLIRETPVDIKNMRLYGDQLRLQQVLADFLTTAVRFTSSSDGWVGIKVVPTMKGLGGGLHVMRFDYRISHPGKGIPEDLVQQMFDCSREITQEGMGLSVSRKLVRLMNGDVSYIREAGVCYFLVNVEFPLADRDDSQN

SEQ ID NO: 10201 - protein, 895 aa, Candida glabrata CBS 138
MEQQGVLAPPSINERNRSLSFSKLLSRSWRKNSTSAVASDNSTDTENNAANPNMIALQKKILSSKTDSWSEAVDDEPVPSGGSQSRFTKLKNIFNNNNSNHNTSNSTRSGSSCASTVSGKSSFEKLPKDISQVRSNSIPSPQKSPYSDKKGHNATSDVEIGLVSPVSDKMNIDLPQVPTSVHASTLTGEHLKELHEYEIAKPKQEAYALNSGKNANRRRSPSTPIKPSPSLVSSQSANGQFSSTNPFNTGTGYANYKERGTVQTTNSYFNYQGLPPHARNENDSNLNAFQNGSKYAAVQEMLSLPTTPSSMNTSLTTHNKEGRNLSNVSLNEIKENEEVSEFYGMDEVPNLDSMGNKKMASSSPLRARSGSPKASNVMDSAQPFPSIVVGYDDADAETDEQSANPSRGSHISSEQKGKPELNPPKNAKFPLRRAASETDAIDLNILKSVKAASGDLSDTTDQHTKLEEIKEPRRSSRLRNKSFSNKFQDITVGPQSFEKIRLLGQGDVGKVYLVKEKRTNRLYALKIFSKSEMIKRKKIKRILAEQEILATSNHPFVVTLYHSFQSEDYLYLCMEYCMGGEFFRALQTRKSKCISEEDAKFYASEVTAALEYLHLLGFIYRDLKPENILLHQSGHIMLSDFDLSIQAKDAKVPVVKGNAQSTVVDTKICSDGFRTNSFVGTEEYIAPEVIRGNGHTAAVDWWTLGILIYEMLFGFTPFKGENTNETFSNILKKDVTFPNNNEVSRNCKDLIKKLLIKNESKRLGSKMGAADIKKHPFFKKVNWTLLRNQEPPLIPVLTENGYDFTKLSSNKNKNRANGTEKDSIDEQERIMFEERVEYDDEVSEDDPFHDFNSMSLMKQDNNSLIYGDNNSYGKIAYTPNANRSRSNSHRAFFKR

SEQ ID NO: 10202 - protein, 231 aa, Brassica oleracea
SSTGQAPGDDSEVILCPQAIFRDPFRKGKNILVICDCYAPTGEPIPTNKRYNAAKIFSHPDVKAEEPWYGIEQEYTLLQKDTNWPLGWPLRGYPGPQGPYYCAAGADKSYGRDIVDAHYKACLYAGINISGINGEVMPGQWEFQVGPAVGISAGDQLWVSRYIVERITEIAGIVVTFDPFPISGDWNGANAHANYSTKSMRSDGGYEVIKKAIKKLGMRHKEHIAAYGEGN

SEQ ID NO: 10203 - protein, 284 aa, Oryza sativa Japonica Group; identical to SEQ ID NO: 8886

SEQ ID NO: 10204 - protein, 382 aa, Oryza sativa
MAGSKFGSFKSEKGSSAGAAAGAGAAAQRRDPYEVLGVGRNATEQEIKSAFRRMALKYHPDKNADDPVASDKFQEATFSYNILSDPDKRRQYDSSGFEAIEADSQELELDLSSLNTVNTVFAALFSKLGVPIKTTVSATVLEEALNGSVGISQLELGQSVFRKVEKQSAHFYSVDITDKEAKMGLVCRVQSTAKSKFKLLYFEPEENGGLSLALQEDSVKTGKVTSAGMFFLGFPVYRFEQNNSEKLRCVEAKILAKRSELSKFESEYREVLAKFTEMTSRYAQEMQTIDELLKERNAIHASYTNNTTLQRSSSSNKGKTSSKESKSDDDQTVKKEKKSKSKSMEGSRSDDDGPRKEKKPKERLRRKKWFNIHLKVDKRRPC

SEQ ID NO: 10205 - protein, 491 aa, Striga gesnerioides
SGKPFYAIIHRVTGSLVIDFEPVKPHEVPMTAAGALQSYKLAAKAITRLQSLPSGSLERLCETMAQEVFELTGYDRVMVYKFHEDDHGEVFAEVTRPGLEPYLGLHYPATDIPQAARFLFMKNKVRMICDCRAAHVKVVQDECFSSDLTLCGSTLRAPHSCHLRYMENMNSIASLVMSVVINEGTDEESSASSSSSSHPDKEKRLWGLVVCHHTSPRFVPFPLRYACEFLSQVFSIHVGKELELLNQTLEKNILKTQTLLCDMLLRGNPLAVVTQSPTVMDLVKCDGAVFLYKGKNHRLGLAPSDLQILDIVSWLDEYHRDSTGMTTDSLLGAGFPGAAALGDAFCGMAAVRITGRDWLFWFRSHTAAEVQWGGAKQEKGDEDDGRKMHPRSSFKAFLEVVKARSVPWRDFEMDAIHSLQLILRNACDKEEEEEARRKDMVVAGEIQSRLNELHIDGAKEMEMVTSEMVRLIETASVPILAVGVEGLVFRV

SEQ ID NO: 10206 - protein, 574 aa, Oryza sativa Japonica Group; identical to SEQ ID NO: 8572

SEQ ID NO: 10207 - protein, 392 aa, Heteropterys capixaba
DLEPVNPADVPVTAAGALKSYKLASKAISRLQSLPSGNIFLLCDVLVKEVRDLTGYDRVMVYKFYEDEHGEVVSECRRSDLESYLGLHYPATDIPQASRFLFMKNKVRMICDCLAPPVQVIQDERLPQPLSLCGSTLRSPHGCHAQYMTNMGTIASLVMSVTINEDDDMMDGDQQQMTRKLWGLVVCHHTSPRFVPFPLRYACEFLIQVFGVQINKEVELAAQVREKHILQIQTMLCDMLLRDAPVAIITQSPNVMDLVKCDGAALFFKNKTWLLGVTPTEEQIRDIAEWLLEYHSGNTGLSTDSLMEAGYPGASVLGDAVCGMAAVSITSRDFLFWFRSHTAKEIKWGGAKHDPDDRDDLRKMHPRSSFKAFLEVVKWGSMPWEDVEMDAI

SEQ ID NO: 10208 - protein, 304 aa, Oryza sativa Japonica Group; identical to SEQ ID NO: 6938

SEQ ID NO: 10209 - protein, 392 aa, Heteropterys catingarum
DLEPVNPADVPVTAAGALKSYKLASKAISRLQSLPSGNISLLCDVLVEEVRDLTGYDRVMVYKFHEDDHGEVVSECRRSDLESYLGLHYPATDIPQASRFLFMKNKVRMICDCLAPPVKVIQDERLPQPLSLCGSTLRSPHGWHAQYMTNMGTIASLVMSVTINEDDDMMDGDQQQMTGKLWGLVVCHHTSPRFVPFPLRYACEFLIQVFGVQINKEVELAAQVREKHILQIQTMLCDMLLRDAPVAIITQSPNVMDLVKCDGASLYFKNKTWLLGVTPTEEQIRDIAEWLLEYHSGNTGLSTDSLMEAGYPGASVLGDAVCGMAAVSITSRDFLFWFRSHTAKEIKWGGAKHDPDDKDDLRKMHPRSSFKAFLEVVKWRSMPWEDVEMDAI

SEQ ID NO: 10210 - protein, 795 aa, Candida albicans SC5314
MVQLALFTNNNHNNNSNSNTPNTLNDDTQYDSTTMNTEDTPIIPDKTDKLNGSDSRSSSRNRTRSISFTRFLFNSNNNNNNNKDHTEQSRCPSNETSDNSVGSPEQQNSGFNKLKKMFKTNSSLTQEDGKNSGRTRSASTPLTPPKVKKETSVPVITTTKAPNKEETTTTKIHSPPESPVVQSNPYFQYQGVPAHTNTSQNPQIETAPGRSDMSVALRHNDSVFSLNENGVLEPPEIHYSELSSSSEDNSDPSSPALPKTPMRDLVEKDELHLKPIEDERDLAIPASPFQRALRRVASAPLVHRLLNEKSPEDANNNNNNNNTGNNLGGPFSTSTQTSPKKDEPFDINKHIGEVKITGRPRTYTQDRTYSNAATRIVDVQVGPNSFEKVRLLGKGDVGKVFLVREKSSNKLYAMKILNKKEMIERNKIKRALAEQEILATSNHPFIVTLYHSFQSKDHLYLCMEYCMGGEFFRALQTRDTKTICEADAKFYAAEVTAALEYLHLMGFIYRDLKPENILLHQSGHIMLSDFDLSKQSERAKNPEISFHKSGMHLSSAGSSNHHNGPAIDTKACIDGFRTNSFVGTEEYIAPEVIRGKGHTSAVDWWTLGIFLYEMLFGTTPFKGQDRKKTFANVLKKDVKFSDTQQSISSNCRNLIKKLLIKDEEKRLGSKTGASEIKNHAFFKDTQWALLRHQKPPMIPVLTKSTSTSNSNKKYEKPMEDTEEIDDVTSISKSINEQIDDPFSQFNSVTLRYGGEFEDLNQSPMYNPDSSAYTSVAYTMTSNNENSFRQKSFLKR

SEQ ID NO: 10211 - protein, 568 aa, Zea mays
MAATSAPPASAHANGNGSLVGVAAPVGAPTNPMATALLTDQYQFSMAYAYWKAGKHADRAVFDLYFRKNPFGGEFTVFAGLEECIKFIANFKFTEHDISFLQSVMPMCEGAFFNYLREVDCSDVEVYSIPEGSVVFPKVPLMRVEGPVAVVQLLETPFVNLINYASLVTTNAARHRHVAGKSKVLLEFGLRRAQGPDGAISASKYCFMGGFDATSNVLAGNLFGIPLRGTHSHAFVSSYMSLDEIPDKALKSKDGSRLCQDFVSLVQEWLQKIQAANSLGGVFGDTNKSELAAFASYALAFPSNFLALVDTYDVMRSGIPNFCAVALALHDLGYKASGIRLDSGDLAYLSIEARKVFSAVEKEYNVPGFAKMLITASNDLNEETIDALNKQGHEVDAFGIGTYLVTCYSQAALGCVFKLVEINNKPRIKLSEDVAKVSIPCKKRCFRLYGKEGYPLVDIMIRESEPSPKAGERILCRHPFIESKRAYVVPQHVEELLQCYWPGTSDKPRAELPSLEKIRSRCMQQLEMLRPDHIRRLNPTPYKVSVSTKLYDFIHRLWLNEAPVGELQ

SEQ ID NO: 10212 - protein, 558 aa, Ustilago maydis 521
MTSSSPRPSSSHQQDGTHMNGNANGASTASASTVPREPSQEDKDQAQQYKTQGNQLFSAKEYSKAIDAFTRAYELDPTDSTFLTNRAAAKMSLKMYKSALSDCQLAKDVQAKQSPDAVAQPKTLIRLARCHLYLGNPSGALSVLNPVVSLRDLDEPTLKQAKQLEKQANSVADHLASFQSFCAQGDWSVAAFALDQAQSHAGISESDVPLAWRIMRATVYLHKNNLDQANSVIADALRADSSNPEALLVRARILLAKGDTAKAIAHCQAALRSDPEQSGARDLLKKCRRLEAKKEEGNTSFKKGDNLAAVRSYTEALEIAGDNSQRDGPAQGFKAILYSNRATANSKKGDHKAAIADCDAALQLDPGYVKALRTRARALLATEKYEDAVRDFKSALQEASVSGGREAEQLQRELRSAEIDLKRSKKKDYYKILNVAKDASDSDIKKAYRKESLKHHPDKGGDEEKFKLCSEAYNVLSDENKRRRYDAGADDLEHDGMGMAGGFGGPGGVEINLADLFGAGGGMGGGFPMGGMGGMGGMGGGFPGQQRGARPPPGFRFG

SEQ ID NO: 10213 - protein, 392 aa, Heteropterys chrysophylla
DLEPVNPADVPVTAAGALKSYKLASKAISRLQSLLSGNISLLCDVLVKEVRDLTGYDRVMVYKFHEDEHGEVVSGRRRSDLESYLGLHYPATDIPQASRFLFMKNKVRMICDCLAPPVKVIQDERLPQPLSLCGSTLRSPHGCHAQYMTNMGTIASLVMSVTINEDDDMMDGDQQQMTRKLWGLVVCHHTSPRFVPFPLRYACEFLIQVFGVQINKEVELAAQVREKHILQIQTMLCDMLLRDAPVAIITQSPNVMDLVKCDGAALYFKNKTWFLGVTPTEEQIRDIAEWLLEYHSGNTGLSTDSLMEAGYPGASVLGDAVCGMAAVSITSGDFLFWFRSHTAKEIKWGGAKHDPDDKDDLRKMHPRSSFKAFLEVVKWRSMPWEDIEMDAI

SEQ ID NO: 10214 - protein, 392 aa, Heteropterys lindleyana
DLEPVNPADVPVTAAGALKSYKLASKAISRLQSLPSGNISLLCDVLVKEVRDLTGYDRVMVYKFHEDDHGEVVSECRRSDLESYLGLHYPATDIPQASRFLFMKNKVRMICDCLAPPVKVIQDEGLPQPLSLCGSTLRSPHGCHAQYMTNMGTIASLVMSVTINEDDDMMDGDQQQMTRKLWGLVVCHHTSPRFVPFPLRYACEFLIQVFGVQINKEVELAAQVREKHILQIQTMLCDMLLRDAPVAIITQSPNVMDLVKCDGASLYFKNKTWLLGVTPTEEQIRDIAEWLLEYHSGNTGLSTDSLMEAGYPGASVLGDAVCGMAAVSITSRDFLFWFRSHTAKEIKWGGAKHDPDDKDDLRKMHPRSSFKAFLEVVKWRSMPWEDVEMDAI

SEQ ID NO: 10215 - protein, 392 aa, Heteropterys megaptera
DLEPVIPADVPVTAAGALKSYKLASKAISRLQSLPSGNISLLCDVLVKEVRDLTGYDRVMVYKFHEDEHGEVVSECRRSDLESYLGLHYPATDIPQASRFLFMKNKVRMICDCLAPPVKVIQDERLPQPLSLCGSTLRSPHGCHAQYMTNMGTIASLVMSVTINEDDDMMDGDQQQMTRKLWGLVVCHHTSPRFVPFPLRYACEFLIQVFGVQINKEVELVAQVREKHILQIQTMLCDMLLRDAPVAIITQSPNVMDLVKCDGAALYFKNKTWLLGVTPTEEQIRDIAEWLLEYHSGNTGLSTDSLMEAGYPGASVLGDAVCGMAAVSITSRDFLFWFRSHTAKEIKWGGAKHDPDDKDDLRKMHPRSSFKAFLEVVKWRSMPWEDMEMDAI

SEQ ID NO: 10216 - protein, 392 aa, Janusia mediterranea
DLEPVNPADVPVTAAGALKSYKLAAKAISRLQSLPSGNISLLCDVLVKEVRDLTGYDRVMVYKFHEDEHGEVVSECRRSDLESYLGLHYPATDIPQASRFLFMKNKVRMICDCLAPSVKVIQDERLPQPLSLCGSTLRSPHGCHAQYMTNMGTIASLVMSVTVNEDDDTMDGDQQQMARKLWGLVVCHHTSPQFVPFPLRYACEFLIQVFGVQITKKVELAAQVREKHILQIQTMLCDMLLRDAPVAIITQSPNVMDLVKCDGAALYFKSKTWFLGVTPTEEQIRDIAEWLLKYHSGNTGLSTDSLMEAGYPGASGLGDAVCGMAAVSITSRDFLFWFRSHTAKEIKWGGAKHDPDDKDDLRKMHPRSSFKAFLEVVKWRSMPWEDMEMDAI

SEQ ID NO: 10217 - protein, 79 aa, Zea mays
  misc_feature (48)..(48): Xaa can be any naturally occurring amino acid
  misc_feature (68)..(68): Xaa can be any naturally occurring amino acid
FDHTIEINVPMSRFLPFKGTGDFKLAQSDLYTYDDRSVTLNSTLTNPXNTSIEHFPDFNNDWSYLGLXQSIPIIVELDT

SEQ ID NO: 10218 - protein, 392 aa, Janusia linearis
DLEPVNPADVPVTAAGALKSYKLAAKAISRLQSLPSGNISLLCDVLVKEVRDLTGYDRVMVYKFHEDEHGEVVSECRRSDLESHLGLHYPATDIPQASRFLFMKNKVRMICDCLAPPVKVIQDERLPQPLSLCGSTLRSPHGCHAQYMTNMGTIASLVMSVTVNEDDDTMDGDQQQMTRKLWGLVVCHHTSPQFVPFPLRYACEFLIQVFGVQINKEVELAAQVREKHILQIQTMLCDMLLRDAPVAIITQSPNVMDLVKCDGAALYFKNKTWLLGVTPTEEQIRGIAEWLLKYHSGNTGLSTDSLMEAGYPGASGLGDAVCGMAAVSITSRDFLFWFRSHTAKEIKWGGAKHDPDDKDDLRKMHPRSSFKAFLEVVKWRSMPWEDMEMDAI

SEQ ID NO: 10219 - protein, 1123 aa, Physcomitrella patens subsp. patens
MSAPKKTYSSTSSAKSKAHSVRVAQTTADAALHAVFEKSGVSGDNFDYSKSVSKSTAGSLHTGAVTAYLQRMQRGGLTQSFGCMVAVEETGFRVIAYSENAPEFLDLMPQAVPNIGEINTLGIGTDVRTLFTPSSAASLEKAAETQEISLLNPITVYCRSKKPLYAIAHRIDIGIVIDFEAVNMNDVTISADGALQSHKLAAKAITRLQALPGGDIGLLCDTVVEEVRELTGYDRVMAYKFHEDEHGEVVAEIRRTDLEPYLGLHYPATDIPQASRFLFMKNRVRMIGDCSAPPVKIVQDPNLRQPVSLAGSTLRSPHGCHAQYMGNMGSISSIVMAVIINDNEDDSRGSVQRGRKLWGLVVCHHTSPRTVPFPLRSACEFLMQVFGLQLNMEVELAAQLREKHILRTQTLLCDMLLRDAPIGIVSQVPNIMDLVKCDGAALYYGKRFWLLGTTPTESQIKDIAEWLLEYHKDSTGLSTDSLADANYPAAHLLGDAVCGMAAAKITSKDFLFWFRSHTAKEIKWGGAKHDPGEKDDNRKMHPRSSFKAFLEVVKRRSLPWEDVEMDAIHSLQLILRGSFQDIDDSDTKTMIHARLNDLKLHDMDELSIVANEMVRLIETATAPILAVDSNGMINGWNAKIAQETGLPVAEAMGRSLVKDLVMDESLEVVERLLYLALRGSEEEQGVEIKLKTFGAQTVKGAVILIVNACASRDVSENVVGVCFVGQDVTGQKMFMDKFTRIQGDYKTIVQNPHPLIPPIFGADEFGYCFEWNPAMEGLTGWKRDEVIGKLLVGEIFGMQKMCCQMKSQDAMTKFMISLNSAMDGQNTDKFSLSFFDREGRYVDALLSTNKRTNADGAITGVICFLQIASSELQQALRVQQATEKVAIAKLKELAYIRQEIKNPLCGITFTRQLLEDTDLSNDQKQFLDTSAVCEQQLQKVLNDLDLESIEDGYLELDTAEFEMRTVMDAVISQGMTISREKGLQIIRETPREIITMRLFGDQVRLQQVLSDFLLNAVRFTPSSEGWVKIKVVPTRKRLGGNEHVMHLEFRVSHPGAGLPEELVLEMFDKGKGMTQEGLGLNICRKLVRLMNGDVQYVREAMQCYFVLYVELPLAQQDDAASQM

SEQ ID NO: 10220 - protein, 376 aa, Coix aquatica
ALSIAGAVQSQKLAVRAISRLQALPGGDVKLLCDTVVEHVRELTGYDRVMVYRFHEDEHGEVVAESRRDNLEPYLGLHYPATDIPQASRFLFRQNRVRMIADCHATPVRVIQDPGLSQPLCLVGSTLRSPHGCHAQYMANMGSIASLVMAVIISSGGDDEQTSRGGISSAMKLWGLVVCHHTSPRCIPFPLRYACEFLMQAFGLQLNMELQLAHQLSEKHILRTQTLLCDMLLRDSPTGIVTQSPSIMDLVKCDGAALYYHGKYYPLGVTPTESQIKDIIEWLTVCHGDSTGLSTDSLADAGYLGAAALGDAVCGMAVAYITPNDYLFWFRSHTAKEIKWGGAKHHPEDKDDGQRMHPRSSFKAFLEVVKSRSLPW

SEQ ID NO: 10221 - protein, 392 aa, Janusia californica
DLEPVNPADVPVTAAGALKSYKLASKAISRLQSLPSGNISLLCDVLVKEVRDLTGYDRVMVYKFHEDEHGEVVSECRRSDLESYLGLHYPATDIPQASRFLFMKNKVRMICDCLAPPVKVIQDERLPQPLSLCGSTLRSPHGCHAQYMTNMGTIASLVMSVTVNEDDDTMDGDQQQMTRKLWGLVVCHHTSPQSVPFPLRYACEFLIQVFGVQINKEVELAAQVREKHILQIQTMLCDMLLRDAPVAIITQSPNVMDLVKCDGAALYFKNKTWLLGVTPTEEQIRGIAEWLLKYHSGNTGLSTDSLMEAGYPGASGLGDAVCGMAAVSITSRDFLFWFRSHTAKEIKWGGAKHDPDDKDDLRKMHPRSSFKAFLEVVKWRSMPWEDIEMDAI

SEQ ID NO: 10222 - protein, 376 aa, Cymbopogon flexuosus
ALSIAGAVQSQKLAVRAISRLQALPGGDVKLLCDTVVEHVRELTGYDRVMVYRFHEDEHGEVVAESRRDNLEPYLGSHYPATDIPQASRFLFRQNRVRMIADCHATPVRVIQDPGLSQPLCLVGSTLRAPHGCHAQYMANMGSIASLVMAVIISSGGDDEQTGRGGISSAMKLWGLVVCHHTSPRCIPFPLRYACEFLMQAFGLQLNMELQLAHQLSEKHILRTQTLLCDMLLRDSPTGIVTQSPSIMDLVKCDGAALYYHGKYYPLGVTPTESQIKDIIEWLTVCHGDSTGLSTDSLADAGYLGAAALGDAVCGMAVAYITPSDYLFWFRSHTAKEIKWGGAKHHPEDKDDGRRMHPRSSFKAFLEVVKSRSLPW

SEQ ID NO: 10223 - protein, 192 aa, Rhizobium sp. CCBAU 41044
APLWGFDGSSTMQAEGRSSDCVLKPVAIYPDPARTNGVLVMCEVMMPDGVTPHASNARATILDDEDAWFGFEQEYFFYENGRPLGFPESGYPAPQGPYYTGVGYSNVGSVAREIVEEHLDLCLAAGINHEGINAEVAKGQWEFQIFGKGSKKAADQIWMARYLLQRLTEKYGIDIEYHCKPLGDTDWNGSGI

SEQ ID NO: 10224 - protein, 392 aa, Gaudichaudia mcvaughii
DLEPVNPADVPVTAAGALKSYKLAAKAISRLQSLPSGNISLLCDVLVKEVRDLTGYDRVMMYKFHEDEHGEVVSECCRSDLESYLGLNYPATDIPQASRFLFMKNKVRITCDCLAPSVEVIQDERLTQPLSLCGSTLRSPHGCHAQYMTNMGAIASLVMSVTVNEDDDTMDGDQQHMTRKLWGLVVCHHTSPRFVPFPLRYACEFLIQVFGVQVNKEVELAAQVRERHSLQIQTMLCDMLLREAPVAIITQSPNVMDLVKCDGAALYFKNKTWFLGVTPTEEQIRGIAEWPLKYHSGNTGLSTDGLMEAGYPGASGLGDAVCGMAAVSITSRDFLFWFRSHTAKEIKWGGAKHDPDDKDDLRKMHPRSSFKAFLEVVKWRSTPWEDIEMDAI

SEQ ID NO: 10225 - protein, 1130 aa, Glycine max
MSTSRPSQSSSNSRRSRHSARMAQATVDAKIHATFEESGSSFDYSSSVRVSGTADGVNQPRSDKVTTAYLNHMQRGKMIQPFGCLLAIDEKTCKVIAYSENAPEMLTMVSHAVPSVGDHPALGIGTDIKTLFTAPSVSGLQKALGCADVSLLNPILVHCKTSGKPFYAIVHRVTGSLIVDFEPVKPYEVPMTAAGALQSYKLAAKAITRLQSLPSGNMERLCDTMVQEVFELTGYDRVMAYKFHEDDHGEVIAEITKPGLEPYLGLHYPATDIPQASRFLFRKNKVRMIVDCHAKHVRVLQDEKLQFDLILCGSTLRAPHSCHAQYMANMDSIASLVLAVVVNDNEEDGDTDAVQPQKRERLWGLVVCHNTTPRFVPFPLRYACEFLAQVFAVHVHKEIELEYQIIEKNILRTQALLCMLMRDAPLGIVSESPNIMDLVKCDGAALIYRNKVWRLGVTPSEPQIREIALWLSEYHMDSTGFSTDSLFDAGFPSALSLGDVVCGMASVRVTAKDMVFWFRSHTAAEIRWGGAKHEAGEKDDSRRMHPRSSFKAFLEVVKARSLPWKEYEMDAIHSLQIILRNAFKEDTESLDLNAKAINTRLSDLKIEGINDLKIERMQELEAVTSEIVRLIDTATVPILAVDVDGLVNGWNIKIAELTGLPIGEATGKHLLTLVEDSSTDRVKKMLNLALLGEEEKNVQFEIKTHGSKMDSGPISLVVNACASRDLRDNVVGVCFVAHDITAQKNVMDKFIRIEGDYKAIVQNRNPLIPPIFGTDEFGWCCEWNPAMMKLTGWKREEVMDKMLLGEIFGTQMAACRLKNQEAFVNLGVVLNKAMTGSETEKVPFGFFARNGKYVECLLSVSKKLDVEGLVTGVFCFLQLASPELQQALHIQRLSEQTASKRLNALSYMKRQIRNPLCGIVFSRKMLEGTDLGTEQKQLLRTSAQCQQQLSKILDDSDLDTIIDGYLDLEMAEFTLHEVLVTSLSQVMTKSNGKSIRIVNDVAGHIMMETLYGDSLRLQQVLADFLLISINFTPNGGQVVVAGSLTKEQLGKSVHLVKLELSITHGGSGVPEVLLNQMFGNNGLESEEGISLLISRKLLKLMNGDVRYLREAGKSAFILSAELAAAHNLKA

SEQ ID NO: 10226 - protein, 333 aa, Dichanthium aristatum
TGYDRVMVYRFHEDEHGEVVAESRRDNLEPYLGLHYPATDIPQASRFLFRQNRVRMIADCHATPVRVIQDPGLSQPLCSVGSTLRAPHGCHAQYMANMGSIASLVMAVIISSGGDDEQTGRGGISSSMKLWGLVVCHHTSPRCIPFPLRYACEFLMQAFGLQLNMELQLAHQLSEKHILRTQTLLCDMLLRDSPTGIVTQSPSIMDLVKCDGAALYYHGKYYPLGVTPTESQIKDIIEWLTVCHGDSTGLSTDSLADAGYLGAAALGDAVCGMAVAYITPSDYLFWFRSHTAKEIKWGGAKHHPEDKDDGQRMHPRSSFKAFLEVVKSRSLPW

SEQ ID NO: 10227 - protein, 392 aa, Aspicarpa hirtella
DLEPVNPADVPVTAAGALKSYKLAAKAISRLQSLPSGNISLLCDVLVKEVRDLTGYDRVMVYKFHEDEHGEVVLECRRSDLESYLGLHYPATDIPQASRFLFMKNKVRMICDCLAPPVKVIQDKRLPHPLSLCGSTLRSPHGCHAQYMTNMGTIASLVMTVTVNEDDDMMDGDQQHMTKKLWGLVVCHHTSLRFVPFPLRYACEFFIQVFGVQINKEVELAAQVREKHILQIQTMLCDLLLRDAPVTIITQSPNVMDLVKCDGAALYFKNTTWLLGVTPTEEQIRGIAEWLLKYHSGNTGLSTDSLMEAGYPGASGLGDAVCGMAAVSITSRDFLFWFRSHTAKEIKWGGAKHNPDDKDDLRKMHPRSSFKAFLEVVKWRSMPWEDIEMDAI

SEQ ID NO: 10228 - protein, 376 aa, Elionurus muticus
ALSIAGAVQSQKLAVRAISRLQALPGGDVKLLCDTVVEHVRELTGYDRVMVYRFHEDEHGEVVAESRRDNLEPYLGLHYPATDIPQAPRFLFRQNRVRMIADCHATSVRVIQDPGLSQPLCLVGSTLRAPHGCHAQYMANMGSIASLVMAVIISSGGDDEQTGRGGISSSMKLWGLVVCHHTSPRCIPFPLRYACEFLMQAFGLQLNMELQLAHQLSEKHILRTQTLLCDMLLRDSPTGIVTQSPSIMDLVKCDGAALYYHGKYYPLGITPTESQIKDIIEWLTVCHGDSTGLSTDSLADAGYLGAAALGDAVCGMAVAYITPSDYLFWFRSHTAKEIKWGGAKHHPEDKDDGQRMHPRSSFKAFLEVVKSRTLPW

SEQ ID NO: 10229 - protein, 171 aa, Brassica napus
MDGGYDESGGASRYFHNLFRPELHHQLQPQPHLQTHLQPQPHSDDESDSNKDPGPPDSDPVTSGSSQGKRSRGRPPGSKNKPKPPVIVTRDSPNVLRSHVLEISSGADIVESVNTYARRRGRGVSVLSGNGAGSNVVLRQPATTHRSNGGVGAGAGGVVTLHGRLDILSMT

SEQ ID NO: 10230 - protein, 376 aa, Heteropogon contortus
ALSIAGAVQSQKLAVRAISRLQALPGGDVKLLCDTVVEHVRELTGYDRVMVYRFHEDEHGEVVAESRRDNLEPYLGLHYPATDIPQASRFLFRQNRVRMIADCHATPVRVIQDPGLSQPLCLVGSTLRAPHGCHAQYMANMGSIASLVMAVIISSGGEGEQTARGGISSAMKLWGLVVCHHTSPRCIPFPLRYACEFLMQAFGLQLNMELQLAHQLSEKHILRTQTLLCDMLLRDSPTGIVTQSPSIMDLVKCDGAALYYHGKYYPLGVTPTEAQIKDIIEWLTVCHGDSTGLSTDSLADAGYLGAVALGDAVCGMAVAYITPSDYLFWFRSHTAKEIKWGGAKHHPEDKDDGQRMHPRSSFKAFLEVVKSRSLPW

SEQ ID NO: 10231 - protein, 466 aa, Blastopirellula marina DSM 3645
MSIDPQLTAKLTDAGEQELLSYLQSADPQVAAQLAAQLAAVDLAEIAATFAKKSEAAAGPLEMASPPAIRLDDVAPRINEAEAIAAGEQLLSAGKVAALLVAGGQGTRLGFDHPKGMFPIGPVTDRMLFQIFVEKLIARGNRYNAAIPLYLMTSPATHDETVECFAANNNFGLPDSQLKIFCQGTMPAIDAESGKLLLAGPDQLALSPDGHGGTLAALVKSGCLADIQSRGLEEIYYFQVDNPLADVCEPLFLGYHRLSGSEMSTQVVAKQRPEEKVGVLVEVDGRLRLVEYSELSEELAAERDASGSLKYWAGNIAIHGLNVDFLGRMAADAESLPWHLASKKVPYCTFQGEQVDPQTPNGVKFERFIFDLLPHAKNAIVVEILPSTTFAPVKNADGAPSDTPSAARAALTAIYTSWLTEAGVAVESGVPVEISPLFALDAEELKSKADGMSPIVEPTVLGDSSE

SEQ ID NO: 10232 - protein, 235 aa, Aristolochia zollingeriana
IPQASRFLFMKNKVRMICDCYAKPVKVYQDDKLPFDLTLCGSTLRAPHSCHMQYMKNMSSVASLVMAVVVNEGEEDENPDPNQQQQQQQPKRKRLWGLVVCHNTSPRFVPFPLRYACEFLMQVFAIHVNNELELENQIREKNILRTQTLLCDMLLRDSPLSIVNRNPNIMDLVKCDGAALMYQNKVYTLGLAPTESQIRDINQWLLEDHMDSTGLSTDSLHDAGYPKALSLGDIV

SEQ ID NO: 10233 - protein, 253 aa, Zea mays
MDAGVEKCGDAAAEGGGDLYAVLGLKKECSDADLKVAYRKLAKKWHPDKCSSSSISVKHMEEAKEKFQEIQGAYSVLSDANKRLLYDVGVYDDEDDEDSMQGMGDFIGEMTQMMSQVRPMRQESFEELQQLFVDMFQSDIDSGFCNGTAKGHQVQGQAKSRTCSPRSPPTTIVKEAEVSSCNGFNKRGSSAMDSGKPPRPVECGAGQSQAGFCFGVSDTPKPRGPNANRKRNGRKQKLFPKHYVTSEDDTAGS

SEQ ID NO: 10234 - protein, 607 aa, Strobilanthes attenuata
SGKPFYAIIHRVTGGLIIDFEPVKPHEVPMTAAGALQSYKLAAKAITRLQSLPSGSMERLCDTMVQEVFELTGYDRVMIYKFHDDDHGEVFSEVTKPGLEPYSGLHYPATDIPQAARFLFMKNKVRMICDCRANHVNVVQDEKLTLDLTLCGSTLRAPHSCHLQYMENMISIASLVMSVVVNEGDEEASNSSQPEKRKRLWGLVVCHHSSPRFVPFPLRYACEFLAQVFAIHVNKELELENQMLEKNILRTQTLLCDMLMRDAPLGIVSQSPNVMDLVKCDGAVLLYKGKMYRLGLSPIDFQTRDIVSWLDEYHRDSTGLSTDSLYDAGFPGALSLGDAVCGMAAVKITDKDWLFWFRSHTAAEIRWGGAKHEPSEKDDGRKMHPRSSFKAFLEVVKTRSLPWKDYEMDAIHSLQLILRNAFKEAEGDNMEANVIHTRLSDLQIDGIQELEAVTSEMVRLIETASVPILAVDVDGLVNGWNTKIADLTGLTVDKAIGRHFIGLVEESSADIVSKMLELALQGKEERNVQFEIKTHGPGSEAGPISLVVNACASRDVKENVVGVCFIAQDITAQKTMMDKFTKIEGDYRAIVQNPNPLIPPIFGTDEF

SEQ ID NO: 10235 - protein, 108 aa, Coccidioides posadasii
MAPKTHISNAENLKKYMELDQRGKIMAEYIWIDAYGGVRSKTKTVNKVVKSADELPEWNFDGSSTGQAPGDNSDVYLRPVAIFPDPFRRGENILVLCETWDSDGSPNK

SEQ ID NO: 10236 - protein, 612 aa, Tozzia alpina
SGKPFYAIIHRVTASLIVDFEPVKPHEVPMTAAGALQSYKLASKAISRLQSLPSGSMGRLCETMAQEVFELTGYDRVMIYKFHEDDHGEVLTEITKPGLEPYVGLHYPATDIPQAARFLFMKNKVRMICDCRANHVRVIQDESLPLELTLCGSTLRAPHNCHLQYMENMNSIASLVMSVVVNEGNEEAGPGDSSQHPDKRKRLWGLVVCHNTSPRFVPFPLRYACEFLAQVFAIHVNKELELENQTLKKNILRTQTLLCDMLLRDAPLGIVSQSPNVMDLVKCDGAILLHKNQKHRLGITPSDFHIRDIVSWLDEYHRDSTGLSTDSLYDAGFPGALALGDVVCGMAAVRITDRDWLFWFRSHTASEIRWGGAKNELGEKADGRKMHPRSSFKAFLEVVKTRSLPWKDFEMDAIHSLQLILRNASSKEVEGRKDLEGVEIQARLNELQIDGVQELEAVTSEMVRLIETASVPIFAVGVDGLVNGWNTKIADLTGLPVDKAIGVHFLSLVEESSAEAVSKMLELALKGKEEQNVHFEIKTHGPNSDSSPISLIVNACTSRDVRENVVGVCFIAQDITTQKSVMDKFTRIEGDYRAIVQNPNPIIPPIFGTDEF

SEQ ID NO: 10237 - protein, 301 aa, Oryza sativa Japonica Group
MARHQLCLLTTTMLVAVVVFLPCLATATGKTGQIAVFWGRNKTEGSLKEACDTGLYTTVIISFFSVFGHGRYWTDLSGHDVSRVGADVKHCQSKNIPVLLSVGGDGYQYSLPTANSAKDVADHLWHAYLGGGRRGVFRPFGDAVLDGVDLYIDHGGPANYDVLVRRLAGYRGKPVLLTATPRCVYPDANAAAALGTGLVRRIHPRFYGDAACTNKTDGEGRRSLFDWEDWDAWTSRFPASQVYVGLPAEETAADWINPESLYYAVMQRAQTASNYGGAMLWDRGADKAYDNYYGRALKDFV

SEQ ID NO: 10238 - protein, 378 aa, Burkholderia sp. 383
MAKRDYYEVLGVAKNAGDDEIKKAYRKLAMKYHPDRNPDNKDAEEHFKEVKEAYEMLSDGQKRAAYDQYGHAGVDPNMGGAGAQGFGGFADAFGDIFGDIFGQAAGGAARGGRGGPQVYRGADLRYSMEITLEQAAHGYDTQIRVPSWVSCEVCHGSGAKPGTKPETCPTCHGQGTVRMSQGFFSIQQTCPKCHGTGTYIPEPCVHCHGSGKVKETKTLEVKIPAGIDDGMRIRSAGNGEPGINGGPPGDLYVEIHIKPHSVFERDGDDLHCQMPIPFTTAALGGEIEVPTLAGRASFPVPEGTQSGKTFRLRGKGIKGLRSSIAGDLYVHVQVETPVKLTDNQRDLLKQFEKSLAEGGARHSPQSKSWFDRVKSFFE

SEQ ID NO: 10239 - protein, 609 aa, Triphysaria pusilla
SGKPFYAIIHRVTGSMIIDFEPVKPHEVPMTAAGALQSYKLAAKAITRLQALPSGSMERLCDTMVQEVFELTGYDRVMIYKFHDDDHGEVLSEITKPGLDSYAGLHYPATDIPQAARFLFIKNKVRMICDCRANHVKVIQDDNLPFDLTLCGSTLRAPHSCHLQYMENMNSIASLVMSVVVNEGDEDGPNSSSHPDKKKRLWGLVVCHNTSPRFVPFPLRYACEFLAQVFAIHVNKEIELENQMLEKNILRTQTLLCDMLLRDAPLGIVSQSPNVMDLVKCDGAVLIHKTKKYRLGMTPSDFQIRDIVSWLDEYHRDSTGLSTDSLYDAGFPGALALGDAVCGMAAVRITDTDWLFWFRSHTASEIRWGGAKHEPDDKDDGRKMHPRSSFKAFLDVVKTRSLPWKDFEMDAIHSLQLILRNSSNKEAEKRDVDGKEIHARLNDLQLDGKRELEAVTSEMVRLIETASVPIFAVDVDGLVNGWNTKIADLTGLPVDKAIGKHFLALVEDSFAEAVNKMLGSALQGNEEQNVQFEIKTHGPKSDSNPISLIVNACASRDVKENVVGVCFIAQDITTQISMMDKFTRIEGDYRAIVQNPNQLIPPIFGSDEF

SEQ ID NO: 10240 - protein, 392 aa, Heteropterys nitida
DLEPVNPADVPVTAAGALKSYKLASKAISRLQSLLSGNISLLCDVLVKEVRDLTGYDRVMVYKFHEDEHGEVVSECRRSDLESYLGLHYPATDIPQASRFLFMKNKVRMICDCLAPPVKVIQDERLPQPLSLCGSTLRSPHGCHAQYMTNMGTIASLVMSVTINEDDDMMDGDQQQMTRKLWGLVVCHHTSPRFVPFPLRYACEFLIQVFGVQINKEVELAAQVREKHILQIQTMLCDMLLRDAPVAIITQSPNVMDLVRCDGAALYFKNKTWFLGMTPTEEQIRDIAEWLLEYHSGNTGLSTDSLMEAGYPGASVLGDAVCGMAAVSITSRDFLFWFRSHTAKEIKWGGAKHDPDDKDDLRKMHPRSSFKAFLEVVKWRSMPWEDVEMDAI

SEQ ID NO: 10241 - protein, 301 aa, Phytolacca americana
MVVKLCSPLALLVLTSLLLALPWKSSAGGIAIYWGQNGGEGTLRDTCNSGLYSYVNIGFLSTFGNGQTPQLNLAGHCDPSSGGCKQLSNSIKQCQSQGIKVMLSIGGGGGSYSIASADEGRNVANYLWDNFLGGQSSNRPLGDAILDGIDFDIEQGTDNYVTLAKTLSQHGQQSGRKVYLTAAPQCPFPDHWLNKGLKTGLFDFVWVQFYNNPQCNFDAGNPQGFKDAWNQWTSQIPAQKFFVGLPASRAAAGNGFVPSQTLINQVLPFVKGSGQKYGGVMLWDRFNDKNSGYSTRIKGSV

SEQ ID NO: 10242 - protein, 321 aa, Ralstonia eutropha JMP134
MDSDYYRVLGVRRAASQADIRNAYRRLAMRWHPDRNPDTVERAEAVFKSLQQAYAVLKDPVARAAYDAQVAQPRRNDGPPAAPDTAHNPGTPGADYVCETTIPLETAVLGGIALTRVSESPACVHCSGKGQQASSCATCEGRGSLARRFRQVPCTDCKGAGQRTRRCDACRGLGTTRVAKLLRVTVPAHTRDGTVLRARGLGGESVDGGPRGNLLCKVSIRADRVFRMDGLDLQRELKIDFVVAILGGQVPLMRFRNSLVVEVPPMTRSGALIRIAGQGLQDPKRRRSGDLVLKVMIDLPAKMRMPDERQRAVLREIARGY

SEQ ID NO: 10243 - protein, 392 aa, Heteropterys pauciflora
DLEPVNPADVPVTAAGALKSYKLASKAISRLQSLPSGNISLLCDVLVKEVRDLTGYDRVMVYKFHEDEHGEVVSECRRSDLESYLGLHYPATDIPQASRFLFMKNKVRMICDCLAPPVKVIQDERLPQPLSLCGSTLRSPHGCHAQYMTNMGTIASLVMSVTINEDDDMMDGDQQQMTRKLWGLVVCHHTSPRFVPFPLRYACEFLIQVFGVQINKEVELAAQVREKHILQIQTVLCDMLLRDAPVTIITQSPNVMDLVKCDGAALYFKNKTWLLGVTPTEGQIRDIAEWLLEYHSGNTGLSTDSLMEAGYPGATVLGDAVCGMAAVSITSRDFLFWFRSHTAKEIKWGGAKHDPDDKDDLRKMHPRSSFKAFLEVVKWRSMPWEDVEMDAI

SEQ ID NO: 10244 - protein, 392 aa, Heteropterys rhopalifolia
DLEPVNPADVPVTAAGALKSYKLASKAIARLQSLPSGNISLLCDVLVKEVRDLTGYDRVMVYKFHEDEHGEVVSECRRSDLESYLGLHYPATDIPQASRFLFMKNKVRMICDCLAPPVKVIQDERLPQPLSLCGSTLRSPHGCHAQYMTNMGTIASLDMSVTINEDDDMMDGDQQQMTRKLWGLVVCHHTSPRFVPFPLRYACEFLIQVFGVQINKEVELAAQVREKHILQIQTMLCDMLLRDAPVAIISQSPNVMDLVKCDGAALYFKNKTWLLGVTPTEEQIRDIAEWLLEYHSGNTGLSTDSLMEAGYPGASVLGDAVCGMAAVSITSRDFLFWFRSHTAKEIKWGGAKHHPDDKDDLRKMHPRSSFKAFLEVVKWRSMPWEDVEMDAI

SEQ ID NO: 10245 - protein, 276 aa, Oryza sativa Japonica Group
MGKREPAMKDSVKGRVKPESPSGIKWAQKKYTASNGCAIGRAVAKEEQTQQEPKKKEREREREEEAKHGHRWKRSESESIERREEPCPILPPPLPPPPPPPLPPPALPSCALAASPGPPLQTARGLRPDLGTLRTAEQPTLYDLLGISSEGTLDEVRAAYRRMARKYHPDVSPPDAAAENTRRFIEVQEAYETLSDPSRRATYDRALARGVCRLAFSSSRRVAPYYYQDQEDKSGWRRTWGDQIEELKRRSMTKDSEENLSWGARMRRRTETSSSE

SEQ ID NO: 10246 - protein, 392 aa, Heteropterys sanctorum
DLEPVNPADVPVTAAGALKSYKLASKAISRLQSLPSGNISLLCDVLVKEVRDLTGYDRVMVYKFHEDDHGEVVSECRRSDLESYLGLHYPATDIPQASRFLFMKNKVRMICDCLAPPVKVIQDERLPQPLSLCGSTLRSPHGCHAQYMTNMGTIASLVMSVTINDDDDMMDGDQQQMTRKLWGLVVCHHTSPRFVPFPLRYACEFLIQVFGAQINKEVELATQVREKHILQIQTMLCDMLLRDAPAAIITQSPNVMDLVKCDGASLYFKNKTWLLGVTPTEEQIRDIAEWLLEYHSGNTGLSTDSLMEAGYPGASVLGDAVCGMAAVSITSRDFLFWFRSHTAKEIKWGGAKHDPDDKDDLRKMHPRSSFKAFLEVVKWRSMPWEDVEMDAI

SEQ ID NO: 10247 - protein, 163 aa, Oryza sativa Japonica Group; identical to SEQ ID NO: 8600

SEQ ID NO: 10248 - protein, 392 aa, Heteropterys sericea
DLEPVNPADVPVTAAGALKSYKLASKAISRLQSLLSGNISLLCDVLVKEVRDLAGYDRVMVYKFHEDEHGEVVSECRRSDLESYLGLHYPATDIPQASRFLFMKDKVRMICDCLAPPVKVIQDERLPQPLSLCGSTLRSPHGCHAQYMTNMGTIASLVMSVTINEDDDMMDGDQQQMTRKLWGLVVCHHTSPRFVPFPLRYACEFLIQVFGVQINKEVELAAQVREKHILQIQTMLCDMLLRDAPVAIITQSPNVMDLVKCDGAALYFKNKTWFLGMTPTEEQIRDIAEWLLEYHSGNTGLSTDSLMEAGYPGASVLGDAVCGMAAVSITSRDFLFWFRSHTAKEIKWGGAKHDPDDKDDIRKMHPRSSFKAFLEVVKWRSMPWEDVEMDAI

SEQ ID NO: 10249 - protein, 392 aa, Gaudichaudia albida
DLEPVNPADVPVTAAGALKSYKLAAKAISRLQSLPSGNISLLCDVLVKEVRDLTGYDRVMVYKFHEDEHGEVVSECRRSDLESYLGLHYPATDIPQASRFLFMKNKVRMIYDCLAPPVKVIQDKRLPQPLSLCGSTLRSPHGCHAQYMTNMGTIASLVMSVTVNEDDDTMDGDQQHMTKKLWGLVVCHHTSPRFVPFPLRYACEFLIQVFGVQINKEVELAAQVREKHILQIQTMLCDMLLRDAPVTIITQSPNVMDLVNCDGAALYFKNKTWLLGVTPTEEQIRGIAEWLLKYHSGNTGLSTDSLMEAGYPGASGLGDAVCGMAAVSITSRDFLFWFRSHTAKEIKWGGAKHDPDDKDDLRKMHPRSSFKAFLEVVKWRSMPWEDIEMDAI

SEQ ID NO: 10250 - protein, 376 aa, Pseudoalteromonas tunicata D2
MSKRDYYEVLGVERDASERDIKKAYKRLAMKYHPDRTAGDKDLEAKFKEVKEAYEILTDSQKRKTYDQYGHAAFEQGGGHGGFGGGQGDFGDIFGDVFGDIFGGGGRRQSRQQRGADLRYNMDLSLEEAVRGKSVEIKVPTWVSCDPCDGSGAKAGSKPTTCGTCHGSGQVQMRQGFFAVQQTCPTCSGRGQIISDPCNKCHGQGRVEKTKTLSVKIPAGVDTGDRIRLSGEGEAGLNGAPAGDLYVQVSVREHAIFVRDGNNLYCEVPISFTTAALGGDVEVPTLDGRAKLKIPSECQTDKMFRLRAKGVKSVRSGAIGDLICKVVIETPVNLNERQKELLRELEESMGSNTSKNRPKEQGFFDGVKKFFDDLTK

SEQ ID NO: 10251 - protein, 1168 aa, Arabidopsis thaliana
MVSGVGGSGGGRGGEEEPSSSHTPNNRRGGEQAQSSGTKSLRPRSNTESMSKAIQQYTVDARLHAVFEQSGESGKSFDYSQSLKTTTYGSSVPEQQITAYLSRIQRGGYIQPFGCMIAVDESSFRIIGYSENAREMLGLMPQSVPTLEKPEILAMGTDVRSLFTSSSSILLERAFVAREITLLNPVWIHSKNTGKPFYAILHRIDVGVVIDLEPARTEDPALSIAGAVQSQKLAVRAISQLQSLPGGDIKLLCDTVVESVRDLTGYDRVMVYKFHEDEHGEVVAESKRDDLEPYIGLHYPATDIPQASRFLFKQNRVRMIVDCNATPVLVVQDDRLTQSMCLVGSTLRAPHGCHSQYMANMGSIASLAMAVIINGNEDDGSNVASGRSSMRLWGLVVCHHTSSRCIPFPLRYACEFLMQAFGLQLNMELQLALQMSEKRVLRTQTLLCDMLLRDSPAGIVTQSPSIMDLVKCDGAAFLYHGKYYPLGVAPSEVQIKDVVEWLLANHADSTGLSTDSLGDAGYPGAAALGDAVCGMAVAYITKRDFLFWFRSHTAKEIKWGGAKHHPEDKDDGQRMHPRSSFQAFLEVVKSRSQPWETAEMDAIHSLQLILRDSFKESEAAMNSKVVDGVVQPCRDMAGEQGIDELGAVAREMVRLIETATVPIFAVDAGGCINGWNAKIAELTGLSVEEAMGKSLVSDLIYKENEATVNKLLSRALRGDEEKNVEVKLKTFTPELQGKAVFVVVNACSSKDYLNNIVGVCFVGQDVTSQKIVMDKFINIQGDYKAIVHSPNPLIPPIFAADENTCCLEWNMAMEKLTGWSRSEVIGKMIVGEVFGSCCMLKGPDALTKFMIVLHNAIGGQDTDKFPFPFFDRNGKFVQALLTANKRVSLEGKVIGAFCFLQIPSPELQQALAVQRRQDTECFTKAKELAYICQVIKNPLSGMRFANSLLEATDLNEDQKQLLETSVSCEKQISRIVGDMDLESIEDGSFVLKREEFFLGSVINAIVSQAMFLLRDRGLQLIRDIPEEIKSIEVFGDQIRIQQLLAEFLLSIIRYAPSQEWVEIHLSQVSKQMADGFAAIRTEFRMACPGEGLPPELVRDMFHSSRWTSPEGLGLSVCRKILKLMNGEVQYIRESERSYFLIILELPVPRKRPLSTASGSGDMMLMMPY

SEQ ID NO: 10252 - protein, 392 aa, Gallardoa fischeri
DLEPVNPADVPVTAAGALKSYKLAAKAISRLQSLPSGNISLLCDVLVKEVRDLTGYDRVMVYKFHEDEHGEVVSECRRSDLESYLGLHYPATDIPQASRFLFMKNKVRMICDCLAPPVKVIQDEQLPQPLSLCGSTLRSPHGCHAQYMTNMGTIASLGMSVTVNEDDDMMDGDQHQMTRKLWGLVVCHHTSPRFVPFPLRYACEFLIQVCGVQINKEVELAAQVRKKHILQIQTMLCDMLLRDAPVAIITQSPNVMDLVKCDGAALYFKNKIWLLGVTPTEEQIRDIAEWLLKYHSGNTGLSTDSLMEAGYPGASALGDAVCGMAAVSITSRDLLFWFRSHTAKEIKWGGAKHDPDDKDDLRKMHPRSSFKAFLEVVKWRSKPWKDVEMDAI

SEQ ID NO: 10253 - protein, 376 aa, Hyparrhenia hirta
ALSIAGAVQSQKLAVRAISRLQALPGGDVKLLCGTVVEHVRELTGYDRVMVYKFHEDEHGEVVAESKRDNLEPYLGLHYPATDIPQASRFLFRQNRVRMIADCHATPVRVIQDPGLSQPLCLVGSTLRAPHGCHAQYMANMGSIASLVMAVIISSGGDDEQTGRGGISSAMKLWGLVVCHHSSPRCIPFPLRYACEFLMQAFGLQLNMELQLAHQLSEKHILRTQTLLCDMLLRDSPTGIVTQSPSIMDLVKCDGAALYYHGKYYPLGVTPTESQIKDIIEWLTVCHGDSTGLSTDNLADAGYLGAAVLGDAVCGMAVAYITPSDYLFWFRSHTAKEIKWGGAKHHPEDKDDGQRMHPRSSFKAFLEVVKSRSLPW

SEQ ID NO: 10254 - protein, 196 aa, Solanum lycopersicum
QAPGEDSEVILYPQAIFKDPFRRGNNILVMCDAYTPAGEPIPTNKRHAAAKVFSHPDVAAEETWYGIEQEYTLLQREVNWPLGWPIGGFPGPQGPYYCGTGADKAFGRDIVDAHYKACLYAGINISGINGEVMPGQWEFQVGPSVGISAGDEVWVARYILERIAEIAGVVVSFDPKPIPGDWNGAGAHTNYSTKSM

SEQ ID NO: 10255 - protein, 392 aa, Peixotoa glabra
DLEPVNPADVPVTAAGALKSYKLAAKAISRLQSLPSGNISLLCDVLVKEVRDLTGYDRVMVYKFHEDEHGEVVSECRRSDLESYLGLHYPATDIPQASRFLFMKNKVRMICDCLAPPVQVIQDERLPQPLSLCGSTLRSPHGCHAQYMTNMGTIASLVMSVTVNEDDDTMDGDQQQMTRKLWGLVVCHHTSPRFVPFPLRYACEFLIQVFGVQITKEVELAAQVRKNHTLQIQTMLCDMLLRDAPVAIITQSPNVMDLVKCDGAALYFKNKTWLLGVTPTEEQIRDIAEWLLKYHSGNTGLSTDSLMEAGYPGASTLGDAVCGMAAVSITSRDFLFWFRSHTAKEIKWGGAKHDPDDKDDLRKMHPRSSFKAFLEVVKWRSMPWEDVEMDAI

SEQ ID NO: 10256 - protein, 376 aa, Ischaemum afrum
  misc_feature (261)..(261): Xaa can be any naturally occurring amino acid
ALSIAGAVQSQKLAVRAISRLQALPGGDVKLLCDTVVEHVRELTGYDRVMVYRFHEDEHGEVVAESRRDSLEPYLGLHYPATDIPQASRFLFRQNRVRMIADCHATPVRVVQDPGLSQPLCLVGSTLRAPHGCHAQYMANMGSIASLVMAVIISSGGDDEQTGRGGISSAMKLWGLVVCHHTSPRCIPFPLRYACEFLMQAFGLQLNMELQLAHQLSEKHILRTQTLLCDMLLRDSPTGIVTQSPSIMDLVKCDGAALYYXGKYYPLGVTPTESQIKDIIEWLTVCHGDSTGLSTDSLADAGYLGAAALGDAVCGMAVAYITPSDYLFWFRSHTAKEIKWGGAKHHPEDKDDGQRMHPRSSFKAFLEVVKSRSLPW

SEQ ID NO: 10257 - protein, 203 aa, Brassica napus
MDGNKDDAARCVRIAEEAIASGDKERALRFIKMAKRLNPSLSTDELATACENLDSVSENPSLSDENHKAVDGDKLEPKTHENKKKVYTEENVELVRSIKRNNDYYTILGLEKSCSVEEIRKAYRKLSLKVHPDKNKAPGSEEAFKKVSKAFTCLSDGNSRSQYDQVGFVDEFDHIQRQSNRSRPRRKRYNTTRSDFFEDEFDP

SEQ ID NO: 10258 - protein, 392 aa, Ryssopterys timorensis
DLEPVNPADVPVTAAGALKSYKLAAKAISRLQSLPSGNISLLCDVLVKEVRDLTGYDRVMVYKFHEDEHGEVVSECRRSDLESYLGLHYPATDIPQASRFLFMKNKVRMICDCLAPPVKVLQDERLPQPLSLCGSTLRSPHGCHAQYMTNMGTIASLVMSVTINEDDDMMDGDQQQMTRKLWGLVVCHHNSPQFVPFPLRYACEFLIQVFGVQINKEVELAAQVREKHILQIQTMLCDMLLRDAPVAIITQSPNVMDLVKCDGAALYFKNKTWLLGVTPTEEQIRDIAQWLLEYHSGNTGLSTGSLMEAGYSGASALGDAVCGMAAVSITLRDFLFWFRSHTAKEVKWGGAKHDPDDKDDLRKMHPRSSFKAFLEVVKWRSMPWEDIEMDAI

SEQ ID NO: 10259 - protein, 299 aa, Glycine max; identical to SEQ ID NO: 9752

SEQ ID NO: 10260 - protein, 323 aa, Microstegium nudum
ALSIAGAVQSQKLAVRAISRLQALPGGDVKLLCDTVVEHVRELTGYDRVMVYRFHEDEHGEVVAESRRDNLEPYLGLHYPATDIPQASRFLFRQNRVRMIADCHATPVRVIQDPGLSQPLCLVGSTLRAPHGCHAQYMANMGSIASLVMAVIISSGGDDEQTGRGGISSAMKLWGLVVCHHTSPRCIPFPLRYACEFLMQAFGLQLNMELQLAHQLSEKHILRTQTLLCDMLLRDSPTGIVTQSPSIMDLVKCDGAALYYHGKYYPLGVTPTESQIKDIIEWLTVCHGDSTGLSTDSLADAGYLGAAALGDAVCGMAVAYITP

SEQ ID NO: 10261 - protein, 378 aa, Burkholderia vietnamiensis G4
MAKRDYYEVLGVAKNASDDEIKKAYRKLAMKYHPDRNPDNKDAEEHFKEAKEAYEMLSDGQKRAAYDQYGHAGVDPNMAGAGGQGFGGFADAFGDIFGDIFGQAAGGAARGGRGGPQVYRGADLRYSMEITLEQAAHGYDTQIRVPSWVSCEVCHGSGAKPGTKPETCPTCHGQGTVRMSQGFFSIQQTCPKCHGTGTYIPEPCAHCHGSGKVKETKTLEVKIPAGIDDGMRIRSAGNGEPGINGGPPGDLYVEIHIKPHAVFERDGDDLHCQMPIPFTTAALGGEIEVPTLAGRASFPVPEGTQSGKTFRLRGKGIKGLRSSIAGDLYVHVQVETPVKLTDQQRDLLKQFEKSLAEGGARHSPQSKSWFDRMKSFFE

SEQ ID NO: 10262 - protein, 373 aa, Paspalum simplex
ALFVAGGLQAHKLAVRAISRLQALPGGDVKLLCDTVVELVRDLTGYDRVMVYRFHEDEHGEVVAESRRENLEPYLGLHYPATDIPQASRFLFRQNRVRMIDDCHATPVRVIQDPGLSQPLCLVGSTLRAPHGCHAQYMATWVQLHRLLWQSSFGGDDEQTRGGISSAMKLWGLVVCHHTSPRFIPFSLRYACEFLMQAFGLQLNMELQLARQLSEKHILRTQTLLCDMLLRDSPTGIVTQSPSIMDLVKCDGAALYYHGKYYPWGVTPTESQIKDIIEWLTVCHGDSTGLSTDSLADAGYLGAAALGDAVCGMAVAYITPSDYLFWFRSHTAKEIKWGGAKHHPEDKDDGQRMHPRSSFKAFLEVVKSRSLPW

SEQ ID NO: 10263 - protein, 392 aa, Sphedamnocarpus sp. Davis 03-01
DLEPVNPADVPVTAAGALKSYKLAAKAISRLQSLPSGNISVLCDVLVKEVRDLTGYDRVMVYKFHEDEHGEVVSECRRSDLESYLGLHYPATDIPQASRFLFIKNKVRMICDCLAPPVKVIQDERLPQPLSLCGSTLRSPHGCHSQYMTNMGTIASLVMPVTINEDDDTMDGDQQQMTRKLWGLVVCHHTSPRFVPFPLRYACEFLIQVFGVQINKEVELAAQVREKHILQIQTMLCDMLLRDAPVAIITQSPNEMDLAKSDGTDLYYKNKTWLLGVTPTEEQIRDIAEWLLQYHSGNTGLSTDSLMEAGYPGASALGDSVCGMAAVSITSRDFLFWFRSHTAKEIKWGGAKHDPDDKDDLRKMHPRSSFKAFLEVVKWRSMPWEDVEMDAI

SEQ ID NO: 10264 - protein, 298 aa, Glycine max
MKTPNKASLILFPLLFLSLFKHSHAAGIAIYWGQNGGEGTLAEACNTRNYQYVNIAFLSTFGNGQTPQLNLAGHCDPNNNGCTGLSSDIKTCQDLGIKVLLSLGGGAGSYSLSSADDATQLANYLWQNFLGGQTGSGPLGNVILDGIDFDIESGGSDHYDDLARALNSFSSQRKVYLSAAPQCIIPDAHLDRAIQTGLFDYVWVQFYNNPSCQYSSGNTNNLINSWNQWITVPASQIFMGLPASEAAAPSGGFVPADVLTSQVLPVIKQSSKYGGVMLWNRFNDVQNGYSNAIIGSVN

SEQ ID NO: 10265 - protein, 177 aa, Zea mays; identical to SEQ ID NO: 10097

SEQ ID NO: 10266 - protein, 246 aa, Oryza sativa Japonica Group
MVKLTMVARVTDGLPLAEGLDDGRDQKDADFYKQQAKLLFKNLSKGQHEASRMSIETGPYFFQYPYVLYIIEGRVCYLTMCDRSYPKKLAFQYLEDLKNEFERVNGSQIETAARPYAFIKFDTFIQKTKKLYLDTRTQRNLAKLNDELYEVHQIMTRNVQEVLGVGEKLDQVTEMSTRLTSDTRMYADKAKDLNRQFTIYGQLALIRKYAPVAIVIGVVLMLFWLKNKIWDREFTDQCAIYKPLKN

SEQ ID NO: 10267 - protein, 333 aa, Phacelurus digitatus
TGYDRVMVYRFHEDEHGEVVAESRRDNLEPYLGLHYPATDIPQASRFLFRQNRVRMIADCHATPVRVIQDPGLSQPLCLVGSTLRAPHGCHAQYMANMGSIASLVMAVIISSGGDDEQTGRGGISSAMKLWGLVVCHHTSPRCIPFPLRYACEFLMQAFGLQLNMELQLAHQLSEKHILRTQTLLCDMLLRDSPTGIVTQSPSIMDLVKCDGAALYYHGKYYPLGVTPTESQIKDIIEWLTVCHGDSTGLSTDSLADAGYLGAAALGDAVCGMAVAYITPSGYLFWFRSHTAKEIKWGGAKHHPEDKDDGQRMHPRSSFKAFLEVVKSRSLPW

SEQ ID NO: 10268 - protein, 218 aa, Gibberella zeae PH-1
MISSTQISRLDGEYCLMLCASVDDEQTESTLVETKQNVRQVLRKLTRNSESQASIETPNHTLHYLIDSDIVFLAICAPSYPRKLAFTYLADLAREFTTNYPASQVHNPALRPYAFMEFDTFISKTKTTYADSRATANLDKLNDELRDVTKVMTKNIEDLLYRGDNLERMGEISSRLRDDSKKYRRAAVRINWELLLKQYGPFGALGFIIIFFLYWRFF

SEQ ID NO: 10269 - protein, 553 aa, Aspergillus fumigatus; identical to SEQ ID NO: 6732

SEQ ID NO: 10270 - protein, 138 aa, Oryza sativa
  misc_feature (23)..(23): Xaa can be any naturally occurring amino acid
  misc_feature (34)..(34): Xaa can be any naturally occurring amino acid
  misc_feature (55)..(55): Xaa can be any naturally occurring amino acid
  misc_feature (69)..(69): Xaa can be any naturally occurring amino acid
  misc_feature (80)..(80): Xaa can be any naturally occurring amino acid
MDASAGSGNGSGGAGARASGCCXYSMLGIRNNAXSDTDVRADYGMLDMKCATGQXVRDDGEDNRRCQRXIQEAYSDLYDXEKRARYDAGLFNRLNDNYHNVSDFMYEMQAMMDNVKYDRRDTLDDLLNTLRDLVSFDY

SEQ ID NO: 10271 - protein, 1164 aa, Zea mays
MASGSRATPTRSPSSARPEAPRHAHHHHHSQSSGGSTSRAGGGAAATESVSKAVAQYTLDARLHAVFEQSGASGRSFDYSQSLRAPPTPSSEQQIAAYLSRIQRGGHIQPFGCTLAVADDSSFRLLAFSENSPDLLDLSPHHSVPSLDSSAPPHVSLGADARLLFSPSSAVLLERAFAAREISLLNPIWIHSRVSSKPFYAILHRIDVGVVIDLEPARTEDPALSIAGAVQSQKLAVRAISRLQALPGGDVKLLCDTVVEHVRELTGYDRVMVYRFHEDEHGEVVAESRRDNLEPYLGLHYPATDIPQASRFLFRQNRVRMIADCHATPVRVIQDPGLSQPLCLVGSTLRAPHGCHAQYMANMGSIASLVMAVIISSGGDDEQTGRGGISSAMKLWGLVVCHHTSPRCIPFPLRYACEFLMQAFGLQLNMELQLAHQLSEKHILRTQTLLCDMLLRDSPTGIVTQSPSIMDLVKCDGAALYYHGKYYPLGVTPTESQIKDIIEWLTVFHGDSTGLSTDSLADAGYLGAAALGEAVCGMAVAYITPSDYLFWFRSHTAKEIKWGGAKHHPEDKDDGQRMHPRSSFKAFLEVVKSRSLPWENAEMDAIHSLQLILRDSFRDAAEGTNNSKAIVNGQVQLRELELRGINELSSVAREMVRLIETATVPIFAVDTDGCINGWNAKIAELTGLSVEEAMGKSLVNDLIFKESEATVEKLLSRALRGEEDKNVEIKLKTFGSEQSKGPIFVVVNACSSRDYTQNIVGVCFVGQDVTGQKVVMDKFVNIQGDYKAIVHNPNPLIPPIFASDENTSCSEWNTAMEKLTGWSRGEVVGKFLIGEVFGNCCRLKGPDALTKFMVIIHNAIGGQDYEKFPFSFFDKNGKYVQALLTANTRSKMDGKSIGAFCFLQIASTEIQQAFEIQRQQEKKCYARMKELAYICQEIKNPLSGIRFTNSLLQMTDLNDDQRQFLETSSACEKQMSKIVKDASLQSIEDGSLVLEQSEFSLGDVMNAVVSQAMLLLRERDLQLIRDIPDEIKDASAYGDQCRIQQVLADFLLSMVRSAPSENGWVEIQVRPNVKQNSDGTNTELFIFRFACPGEGLPADVVQDMFSNSQWSTQEGVGLSTCRKILKLMGGEVQYIRESERSFFLIVLELPQPRLAAGRENQLIC

SEQ ID NO: 10272 - protein, 234 aa, Asarum yakusimense
IPQAARFLFMKNKVRMICDCRAKSVKVYQDEHLSFDLTLCGSTLRAPHSCHLQYMENMSSIASLVMAVVINEGEEDDDGPDSTQQQAQPKRKRLWGLVVCHNTTPRFVPFPLRYACEFLMQVFAIHVNKELELENQIREKNILRTQTLLCDMLLRDAPLGIVTQSPNIMDLIKCDGAALLYENNVYRLGATPTESQLHEIVQWLSEHHMDSTGLSTDSLHEAGYPKALSLGDIV

SEQ ID NO: 10273 - protein, 234 aa, Saruma henryi
IPQAARFLFMKNKVRMICDCRAKSVKVYQDEHLSFDLTLCGSTLRAPHSCHLQYMGNMSSIASLVMAVVINEGEEDDDGPDSTQQQAQPKRKRLWGLVVCHNTTPRFVPFPLRYACEFLMQVFAIHVNKELELENQIREKNILRTQTLLCDMLLRDAPLGIVTQSPNIMDLIKCDGAALLYENKVYRLGVTPTESQLHEIVQWLSEHHMDSTGLSTDSLHEAGYPKALSLGDIV

SEQ ID NO: 10274 - protein, 607 aa, Glechoma hederacea
SGKPFYAIIHRVTGSLIIDFEPVKPHEVPMTAAGALQSYKLAAKAITRLQALPSGSIERLCDTMSQEVFELTGYDRVMIYKFHEDDHGEVFTEIRKPGLEPYVGLHYPATDIPQAARFLFMKNKVRMICDCRANHVKVVQDENLPLELTLCGSTLRAPHSCHLQYMENMNSIASLVMSIVVNEGEEEGSDSTHPDKRKRLWGLVVCHHTSPRFVPFPLRYACEFLTQVFAIHVNKELELENQMLEKNILRTQTLLCDMLLRDAPLGIVSQSPNVMDLVKCDGAALLYKNKKYRLGMTPGDFQIRDVVSWLDEYHRDSTGLSTDSLYDAGFPGALALGDAVCGMAAVKITDKDWLFWFRSHTAAEVRWGGAKHEPDEKDDGRKMHPRSSFKAFLEVVKTRSLPWKDYEMDAIHSLQLILRNSYKEDEDTDTYAKAIHTRLSDLQIEGIQELEAVTSEMVRLIETASVPILAVDVDGMVNGWYTKIADLTGLPVDKAIGCHFLSLVEESSADAVSSMLELALKGEEERNVQFEIKTHGERSESGPISLVVNACASRDIKESVVGVCFIAQDITAQKSMMDKFTRIEGDYKAIVQNPNPLIPPIFGTDEF

SEQ ID NO: 10275 - protein, 617 aa, Hyobanche atropurpurea
SGKPFYAIAHRVTGSLVIDFEPVKPQEVPMTAAGALQSYKLAARAIARLQALPSGSLERLCETMAQEVFELTGYDRVMVYRFHDDDHGEVFAEITRPGLEPYVGLHYPATDIPQAARFLFLKSKVRMICDCRAAHVKVVQDEGLSSDLTLCGSTLRAPHSCHLCYMENMNSIASLVMSVIVNEGTDEESSTSSSSHPDKRKRLWGLVVCHHTSPRFVPFPLRYACEFLSQVFAIHVSKELELLNQTLEKNILKTQTVLCDMLLRGNPLAVVTQSPTVMDLIKCDGAVLLYKGKKHRLGVTPSDPHIWDIVLWLDEYHRDSTGTSTDSLLDAGFPGAVALGDAFCGMAAVRITGHDWLFWFRSHTEAEVRWGGAKHEMGGEDDDRKMHPRSSFKAFLEVVKARSVPWRDFEMDAIHSLQLILRNACEKEEEEEERRRKDMVVAGEIQARLNKLHIDGARDMEAVTSEMVRLIETALVPILAIGVDGLVNGWNAKIADLTGLPVDGAIGRHFLALVGEASADTFSRMLELALQGQEERNVQFEIKTHGPRTDFGPISLVVNACASRDVKDNVVGVCFIAQDVTTVRSMMDKFTRIEGNYRALVQNPNPLIPPIFGSDEF

SEQ ID NO: 10276 - protein, 279 aa, Oryza sativa Japonica Group
MGLLSLLLVVVSCLAAPATADWYGPLAVYWGRHKDYEGSLREACDTGRYNTVIITFYSVFGYVKGRYGLDISGHPVAAVGADIKHCQSKGVQVLLSIGGQGGGYSLPSSQSAADVADNLWNAYLGGRRAGVPRPFGDAAVDGIDFFIDQGGADHYDELARQLHGRGVALTATVRCSYPDSRLQKALATGLLGRIHVRIFGDNQCTMLPLDAWEKWAAAYPRSKVWLALVASWEQDEVGYMFQKDLYYGVLQFILNKPNYGGIAIWDRYYDKKANYSGEG

SEQ ID NO: 10277 - protein, 374 aa, Wolinella succinogenes DSM 1740
MEEFDYYEILEIERSASGEEIKKAYRKMAMKYHPDRNEGSSEAEEMFKRVNEAYQVLSDEGKRQLYDRYGKQGLESQGYSGFSGRGFEDVFDDLGSIFDSVFGGGFSSSSRKRSGPKYNLDLAMELDLSFKEAIFGCKKEIKIRYKDACPDCKGTGAKEGKIETCPDCGGRGQVFIRQGFMTFAQTCPKCGGSGERIKEKCPKCNGKGHENKEENLEVSIPEGVDTDNRIRVSRKGHVGKNGERGDLYLVVRVEEDEHFMRHGNDIYLHVPLFFSTVPLGTTLKIPSLRGELELKIPPNTKDKEQFVFKNEGVKDVHSAKKGNLIAQVKIVYPAKINDEQRELLEKLSRSFGVEGTPHEKGFEGVFEKIKGWFS

SEQ ID NO: 10278 - protein, 424 aa, Shewanella oneidensis MR-1
MSLRLKKLQKIVPYSPLKSLKIWHLFCVVRLCSIVVTSMTAGKTPTHFTTQPLNRVLGETSGAFADLGTFLPLVLGLIALNQFSPQGIFLGFGVFAILSALFYRRPMPVQPMKVIAALVIAQGLTPGMLQASAMLMGIILLILAFSGAITWLAKQLSQAVSVGIQLAIGLQLMWMGAKMMSDFWLLGLGAFALLFASKFLPLRYLAMPLVIAAGMIWQANSQTDMATSLSIPALSASLHLAWPTLNEWSSAAILLVLPQLALTLTNAVIATSVMAQEKFPEDAAKLTPKNLAISSGLANLLLAPFGAAAMCHGAGGLAVQYHFGARTHLAPLIFGGTCLVIALFWDSQMAWLLGLIPVAILGSLLSIGGLQLAWSKRLIDGKPFCIFVILSTAVTCLAINAAAGLAVGIILEQGRRTWAMLAMR

SEQ ID NO: 10279 - protein, 1121 aa, Ceratodon purpureus
MSAPKKTYSSTTSAKSKHSVRVAQTTADAALEAVYEMSGDSGDSFDYSKSVGQSAESVPAGAVTAYLQRMQRGGLIQTFGCMVAVEEPNFCVIAYSENASEFLDLMPQAVPSMGEMDVLGIGTDIRTLFTPSSGAALEKAAATQDISLLNPITVHCRRSGKPLYAIAHRIDIGIVIDFEAVKMNDVSVSAAGALQSHKLAAKAITRLQALPGGDIGLLCDTVVEEVRELTGYDRVMAYKFHEDEHGEVVAEIRRMDLEPYLGLHYPATDIPQASRFLFMKNRVRVIADCCASPVKLIQDPDIKQPVSLAGSTLRAPHGCHAQYMGNMGSIASLVMAVIINDNEEDSRGAIQRGRKLWGLVVCHHTSPRTVPFPLRSACEFLMQVFGMQLNMEVELAAQLREKHILRTQTLLCDMLLRDAPIGIVSQTPNIMDLVKCDGAALYYGKRFWLLGTTPTENQIKDIAEWLLEYHKDSTGLSTDSLADRNYPGAHLLGDAVCGMAAAKITAKDFLFWFRSHTAKEVKWGGAKHDPAEKDDGRKMHPRSSFKAFLEVVKRRSLPWEDVEMDAIHSLQLILRGSFQDIDDSDTKTMIHARLNDLKLHGMDELSVVANEMVRLIETATAPILAVDSTGMINGWNAKIAHVTGLPVSEAMGRSLVKDLVLDESVVVVERLLYLASQGEEEQNVEIKLKTFGTQTEKEAVILIVNACSSRDVSDSVVGVCFVGQDVTGQKMFMDKFTRIQGDYKTIVKNPHPLIPPIFGGDEYGYCFEWNPAMEALTGWKHDELVGKLLVGEIFGMEMMCCRLKSQDSMTKFMISLNNAMDGTNTDKFSFSFCNREGKFVEALLSTNKRTNADGVITGVFCFLQIASSELQQALTVQRATEKVAIAKLKELAYIRQEIKNPLCGITFTRQLLEDTDLSDDQKQFLDTSAVCEQQLQKVLNDMDLESIEDGYLELDTAEFEMGTVMDAVISQGMTTSREKGLQIIRETPREISTMRLFGDQIRLQQVLSDFLINAIRFTPSSEGWVKIKVVPTRKRLGGNVHVMHLEFRVSHPGGGLPDELVLEMYDRGKGMTQEGLGLNMCRKLVRLMNGDVQYVRENAQCYFVVYVELPMAQRDDAASQM

SEQ ID NO: 10280 - protein, 212 aa, Brandisia hancei
DYEMDATHSLQLILRNASSKETEEKDRDGREIHARLNDLQIDGVQELEAVTSEMVRLIENASVPIFAVDVDGLVNGWNTKIADLTCLPVDKAIGRHFLALVEDSSADAVSKMLELALQGREERNVQFEIKTHGQRSESGPISLIVNACASRDVKENVVGVCFIAQDITTQKSMMDKFTRIEGDYRAIVQNPNPLIPPIFGTDEFGWCSEWNN

SEQ ID NO: 10281 - protein, 298 aa, Psophocarpus tetragonolobus
MESLKKASLVLFPILVLSLFNHSNAAGIAVYWGQNGGEGSLADTCNTGNYEFVNIAFLSTFGSGQTPQLNLAGHCDPSSNGCTGFSSEIQTCQNRGIKVLLSLGGSAGTYSLNSADDATQLANYLWDNFLGGQSGSRPLGDAVLDGVDFDIESGGSNHYDDLARALNSLSSQKKVYLSAAPQCIIPDQHLDAAIQTGLFDYVWVQFYNNPSCQYSNGGTTNLINSWNQWITVPASLVFMGLPASDAAAPSGGFVSTDVLTSQVLPVIKQSSKYGGVMLWDRFNDVQTGYSAAIIGSIN

SEQ ID NO: 10282 - protein, 347 aa, Oryza sativa Japonica Group
MAAPRWIGPLLLLLLHFVAAVAGKSYYDVLQVPKGASEDQIKRSYRKLALKYHPDKNPNNEEANKRFAEINNAYEILTDQEKRKIYDRYGEEGLKQFQAQGGRGGGGGMNIQDIFSSFFGGGGGGMEEEEEQIIKGDDVIVELDASLEDLYMGGSLKVWREKNVIKPAPGKRRCNCRNEVYHRQIGPGMYQQMTEQVCDQCANVKYVREGDFLTVDIEKGMQDGQEVSFFEEGEPKIDGEPGDLKFRIRTAPHERFRREGNDLHTTVTISLLQALVGFEKTIKHLDNHMVEIGTKGITKPKEVRKFKGEGMPLYQSNKKGDLYVTFEVLFPKTLTDDQKSKLKSILT

SEQ ID NO: 10283 - protein, 378 aa, Epifagus virginiana
VPMTAAGALQSYKLAAKAITRLQALRGGSMERLCDTMVQEVFELTGYDRVMIYKFHDDDHGEVSAEITKPGLEPYVGLHYPATDIPQAARFLFMKNKVRMICDCRANHVKVVQDENLPFDLTLCGSTLRAPHSCHLQYMENMNSIASLVMSVVVNEGNEDEPNSSSGPEKRKMLWGFLVCHNTSPRFVPFPLRYACEFLVQVFAIHVNKELELKNQMLEKNILRTQTLLCDLLLRDAPLGIVSQSPNVMDLVKCVGAILLYKNTKYRLGLTPSDFQIGDIVSWLDEYHRDSTGLSTDSLYDAGFPGALALGDALCGMAAVRITDKDWLFWFRSHTAAEIQWGGMKHEPDEKDDGSKMHPRSSFKAFLEVVKTRSLPWK

SEQ ID NO: 10284 - protein, 506 aa, Schizosaccharomyces pombe
MDLAPRPLGRQHSKSQSAFAFDNTATSIAASTMKNELNHLASTVKDPLAKKAFQKEMDNFFSLFSRYLQEDARGSEINWDLVESPKPEQVVEYDTITEAGGLSRDYLNKLAVLKLNGGLGTTMGCVGPKSIIEVRDGNSFLDLSVRQIEHLNRKYNVNVPFVLMNSFNTDEATAKVIKKYEAHKIDILTFNQSRYPRVHKETLLPVPHTADSAIDEWYPPGHGDVFEALTNSGIIDTLIAQGKEYLFVSNIDNLGAVVDLNILNHMVETNAEYLMELTNKTKADVKGGTLIDYDGNVRLLEIAQVPPQHVEEFKSIKKFKYFNTNNLWFHLPSVKRVVNNHELSMEIIPNKKTIKHKGENINIIQLETAAGAAIRHFKNAHGVNVPRRRFLPVKTCSDLLLVKSDLYSINHGQVEMNPRRFGGTAPLVKLGAHFKKVADFSAHIPSIPKILELDHLTITGDVNIGRNVTLKGTVIIVASDANRIDIPNGSVLENCVITGNLNILEH

SEQ ID NO: 10285 - protein, 170 aa, Chrysanthemum x morifolium
MAQREQERTQEARRKLRAPENHAVRQQLADFPGNPATQKPLPELLLGGHGRTTSSAGLSLPSPVLDKRSRQAVRRRWLSLRLLSHRLWRRWPPRSRRRRRRSAKTSAVNRCSRCRKRVGLTGFRCRCGHLFCGEHRYSDRHGCSYDYKSAARDAIARDNPVVRAAKIVRF

SEQ ID NO: 10286 - protein, 102 aa, Zea mays
  misc_feature (5)..(5): Xaa can be any naturally occurring amino acid
HPDRXASDPGAAGEAKRRFQRIQEAYSVLSDKGKKAMYDAGLFDPLNDDDQDFSDFMQEMLVMMDNVKNEKPDTLEDLQKMPPDVARRTRVAPHPQPQQGGR

SEQ ID NO: 10287 - protein, 392 aa, Tristellateia madagascariensis
DLEPVNPADVPVTAAGALKSYKLAAKAISRLQSLPSGNISLLCDVLVKEVRDLTGYDRVMVYKFHEDEHGEVVSECRRSDLESYLGLHYPATDIPQASRFLFMKNKVRMICDCLAPPVKVIQDERLPQPLSLCGSTLRSPHGCHAQYMANMGTIASLVMSVTINEDDDTMDGDQQQMARKLWGLVVCHHTSPRFVPFPLRYACEFLIQVFGVQINKELELAAQVREKHILRIQTMLCDMLLRDAPVGIITQSPNVMDLVKCDGAALFYKNKFWLLGITPTEAQIRDIAEWLLEYHSGNTGLSTDSLMEAGYPGASVLGDAVCGMASVSITSRDFLFWFRSHTAKEIKWGGAKHDPDDKDDGRKMHPRSSFKAFLEVVKWRSLPWEDVEMDAI

SEQ ID NO: 10288 - protein, 366 aa, uncultured haloarchaeon
MSTKKTTTTATPSEKLFEIAESMYDQLQTTQIPEIERPTRTKSNIEYDEDTEVWVYGDRTSTTSGKSVDGAKKLFKLAYVVEFLTDQLEQDKSSTLRELYYLSESWNEDHAQFADQSESNSLIEELEIVSDARREEFHMRPEESGATLIGPLKIKEQTRRGDRLIHCQADVGEGGYQIPNNPDTIEFLETDAQFVLAVETGGMRDRLVENGFDEEYNAIIVHLKGQPARATRRIIKRFNTELDLPVAVFTDGDPWSYRIYASVSYGSIKSAHLSEYLATPDAQYVGITPEDITKYNLPSDILSDSDINALESELEDPRFSTEYWEKQIKLQLKIGQKAEQQALASRGLDYVTDSYLPEKLAQHGFL

SEQ ID NO: 10289 - protein, 392 aa, Tristellateia africana
DLEPVNPADVPVTAAGALKSYKLAAKAISRLQSLPSGNISLLCDVLVKEVRDLTGYDRVMVYKFHEDEHGEVVSECRRSDLESYLGLHYPATDIPQASRFLFMKNKVRMICDCLAPQVKVIQDERLPQPLSLCGSTLRSPHGCHAQYMANMGTIASLVMSVTINEDDDTMDGDQQQMARKLWGLVVCHHTSPQFVPFPLRYACEFLIQVFGVQINKEIELAAQVREKHILRIQTMLCDMLLRDAPVGIITQSPNVMDLVKCDGAALFYKNKFWLLGITPTEAQIRDIAEWLLEYHSGNTGLSTDSLMEAGYPGASVLGDTVCGMASVSITSRDFLFWFRSHTAKEIKWGGAKHDPDDKDDGRKMHPRSSFKVFLEVVKWRSLPWEDMEMDAI

SEQ ID NO: 10290 - protein, 367 aa, uncultured marine bacterium 583
MAQRDYYEVLGVKKGANEAEIKKAYKRLAMKYHPDRNAGDKASAEKKFKEVRKAYDVISDPQKRSAYDQFGHAGVEQQGAGGFGGGNPFGAGGFGDIFGDIFGGGNTKPDNRGPDLRYDLEIDLRQAAEGDTVKIRVPKNDTCDTCSGTGAKPGTSVKTCGNCHGSGQVQMQQGFFAIQRPCNQCHGTGEKIDSPCRTCSGQGIVRKQKTLSVKIPAGVDTGNRIRLSNEGEAGLRSGPSGDLYVQIHVKDHQIFQREGNDLYCEVPIDFATATLGGSIEVPTLDGKLKINIPSGTQTSKLFRLRGKGMPAMRYNGSGDLLCQVKLETPVNLNSKQKQLLKDFSSSCNAKQYPESNSFFGKMKSFFE

SEQ ID NO: 10291 - protein, 376 aa, Saccharum officinarum
  misc_feature (131)..(147): Xaa can be any naturally occurring amino acid
ALSIAGAVQSQKLAVRAISRLQALPGGDVKLLCDTVVEHVRELTGYDRVMVYRFHEDEHGEVVAESRRDNLEPYLGLHYPATDIPQASRFLFRQNRVRMIANCHATPVRVIQDPGLLQPLCLVGSTLRAPXXXXXXXXXXXXXXXXXVMAVIISSGGDDEQTGRGGISSAMKLWGLVVCHHTSPRCIPLPLRYACEFLMQAFGLQLNMELQLAHQLSEKHILRTQTLLCDMLLRDSPTGIVTQSPSIMDLVKCDGAALYYHGKYYPLGVTPTESQIKDIIEWLTVCHGDSTGLSTDSLADASYLGAAALGDAVCGMAVAYITPSDYLFWFRSHTAKEIKWGGAKHHPEDKDDGQRMHPRSSFKAFLEVVKSRSLPW

SEQ ID NO: 10292 - protein, 583 aa, Candida albicans SC5314
MLSFKSLLAAAVVASSALASASNQVALYWGQNGAGGQERLAQYCQETDVDIVLLSFLNLFPDPLNVNFANQCGNTFESGLLHCSQIGADIKTCQSLGKTVLLSLGGGVGDYGFSDVASATKFADTLWNKFGAGEDPERPFDDAVVDGFDFDIEHGGATGYPELATALRGKFAKDTSKNYFLSAAPQCPYPDASLGDLLSKVPLDFAFIQFYNNYCSINGQFNYDTWSKFADSAPNKNIKLFVGVPATSNIAGYVDTSKLSSAIEEIKCDSHFAGVSLWDASGAWLNTDEKGENFVVQVKNVLNQNACVAPSSSATTQSTTTTSSAVTQSTTTTSAAITQSATTTSAAVTTKSNQIVTSSSSSSSSIFYGNSTTESSTGIATGTVLPTGSNENAATTGSGSNTKLAISTVTDVQKTVITITSCSEHKCVATPVTTGVVVVTDIDTVYTTYCPLTNSQVYVPVQTVVCTEETCVPSPTSTAQKPKASTTIKGVEKGQTTSYPVVGTTEGVKKIVTTSAQTVGSSTKYVTIELTSTITPVTYPTSVASNGTNTTVPVFTFEGGAAVANSLNSVWFPVPFLLAAFAF

SEQ ID NO: 10293 - protein, 186 aa, Zea mays
MGNHYQTLGVRQDATKAEVKAAFRRSALRDHPDRHAGSTDAAARADAASRFRQASDAYYVLSDDRRRAEYDLRLRGSTSSYARTSSSGWASSSASYGYGHGGGSWRRTPPGAGAGAGASVGSIDWEFLLKAVTRRGFLINLGLASVLLSGATFLDWTILEIWKMNNTGKSFEDAMEKVGKTQEGDR

SEQ ID NO: 10294 - protein, 432 aa, Nicotiana attenuata
MAQILAPSAQWQMRMTKSSTDANPLTSKMWSSVVLKQNKRLAVKSSAKFRVFALQSDSGTVNRVEQLLNLDVTPYTDKIIAEYIWIGGSGIDMRSKSRTISKPVKHASELPKWNYDGSSTGQAPGEDSEVILYPQAIFKDPFRGGNNILVICDAYTPAGEPIPTNKRHKAAQIFSDSKVVSEVPWFGIEQEYTLLQQNVKWPLGWPVGGYPGPQGPYYCGAGADKSFGRDISDAHYKACLYAGINISGTNGEVMPGQWEFQVGPSVGIEAGDHIWCARYILERITEQAGVVLSLDPKPIEGDWNGAGCHTNYSTLSMREEGGFEVIKKAILNLSLRHKEHISAYGEGNERRLTGKHETASIDKFSWGVANRGASIRVGRDTEKQGKGYLEDRRPASNMDPYVVTGLLAETTILWEPTLEAEALAAQKLALNV

SEQ ID NO: 10295 - protein, 392 aa, Heladena multiflora
DLEPVNPFDVPVTAAGALKSYKLAAKAISRLQSLPSGNISLLCDVLVKEVRDLTGYDRVMVYKFHEDEHGEVVSECRRSDLESYLGLHYPATDIPQASRFLFMKNKVRMICDCLAPPVKVIQDERLPQPLSLCGSTLRSPHGCHAQYMANMGTIASLVMSVTINEDDDTMDGDQQQMARKLWGLVVCHHTSTQFVPFPLRYACEFLIQVFGVQINKEVELAAQAREKHILQIQTTLCDMLLRDAPVAIITQSPNVMDLVKCDGAALYYKNKFRLLGVTPTEAQIRDIAEWLLEYHSGNTGLSTDSLMEAGYPGASVLGDAVCGMAAVSITSRDFLFWFRSHTAKEIKWGGAKHDPDDKDDGRKMHPRSSFKAFLEVVKWRSLPWEDMEMDAI

SEQ ID NO: 10296 - protein, 383 aa, Lactobacillus sakei
MAEKRDYYDVLGVGRDASDDEIKKAYRKLSKKYHPDINKAPDAEAKFKEVTEAYEALSDPQKRAAYDQYGHAGMNGGFGGGAGAGQGFGGFGGGAEGFGGFDDIFSSFFGGGARQQPNGPRQGSDLQYRMDLKFEEAVFGKETKISYSREAECHTCHGSGAKPGTSAETCHKCHGAGQIQVERQTPLGRMMSRETCDVCGGTGKEIKSKCDTCHGTGREEERHTVKVKVPAGVEDGQQMRLQGQGEAGSNGGPYGDLFIVFRVAPSDEFERDGAQIFVEVPISFVQAALGDEIEVNTVHGPVKLKIPAGTQTNTVFRLRGKGAPKLHGTGNGDQKVTVNVVTPKSLNSKQRDALKAFAVASGDSVNPQDNNLFDKILNKKHKK

SEQ ID NO: 10297 - protein, 332 aa, Schizachyrium scoparium
GYDRVMVYRFHEDEHGEVVAESKRDNLDPYLGLHYPATDIPQASRFLFRQNRVRMIADCHATPVRVIQDPGLSQPLCLVGSTLRAPHGCHAQYMANMGSIASLVMAVIISSGGDDEQTGRGGISSAMKLWGLVVCHHTSPRCIPFPLRYACEFLMQAFGLQLNMELQLAHQLSEKHILRTQTLLCDMLLRDSPTGIVTQSPSIMDLVKCDGAALYYHGKYYPLGITPTESQIKDIIEWLTVCHGDSTGLSTDSLADAGYLGAAALGDAVCGMAVAYITPSDYLFWFRSHTAKEIKWGGAKHHPEDKDDGQRMHPRSSFKAFLEVVKSRSLPW

SEQ ID NO: 10298 - protein, 493 aa, Saccharomyces cerevisiae
MTVFSGVNKIEFEGTFEGIGKDVVMSQMIRALQKHFPSIRDKNYEFSLFLHIFQRYVLENTSITHDLVCDKIRLPIIDEVVELDDIKNYGLLEGKLLSKLAILKLTGKANPIIGKESPLFEVKNGMSSLDVIVRQTQNLNVRYNSDVPLIFMTSLETESQVSNFLEEHYSSSKVRWKTVVQSSFPQIDKDRLLPIDLQINSHENDFWYPCGTGNLTDTLYFSGELDKLIAQGKEILFVSNVDNLGATGDLNILNFIINEKIEYLVEVVERTANVSNTGVLATYKGKLRSVYYNCLSNESASTCRIVNTNNIWIDLKKLKVLIESNSLNLPIHSSESKITHKNEEIECLQFKTQLVDCIAFFPNSRVLKVSRDRFLPLRTCKDLFLLKSTLYDLDSNGTFNLYPLKFGLLPSIDLGDEFATYETFKIGVPDIPNILELEHLTVMGNVFFGRNITLKGTVIIICDENDVITVPDGSILENVTIWHKSQLEDMNGY

SEQ ID NO: 10299 - protein, 188 aa, Prunus armeniaca
YPRLGVEDFSPFPSKGQTGKDGWYPPGHGDVFPSLKNSGKLDLLLSQGKEYVFVANSDNLGAVVDLKILNHLIHKKNEYCMEVTPKTLADVKGGTLISYEGRVQLLEIAQVPDAHVNEFKSIEKFKIFNTNNLWVNLNAIKRLVEADALKMEIIPNPKEVDGVKVLQLETAAGAAIRFFNHAIGTNVP

SEQ ID NO: 10300 - protein, 1168 aa, Arabidopsis thaliana
MVSGVGGSGGGRGGEEEPSSSHTPNNRRGGEQAQSSGTKSLRPRSNTESMSKAIQQYTVDARLHAVFEQSGESGKSFDYSQSLKTTTYGSSVPEQQITAYLSRIQRGGYIQPFGCMIAVDESSFRIIGYSENAREMLGLMPQSVPTLEKPEILAMGTDVRSLFTSSSSILLERAFVAREITLLNPVWIHSKNTGKPFYAILHRIDVGVVIDLEPARTEDPALSIAGAVQSQKLAVRAISQLQALPGGDIKLLCDTVVESVRDLTGYDRVMVYKFHEDEHGEVVAESKRDDLEPYIGLHYPATDIPQASRFLFKQNRVRMIVDCNATPVLVVQDDRLTQSMCLVGSTLRAPHGCHSQYMANMGSIASLAMAVIINGNEDDGSNVASGRSSMRLWGLVVCHHTSSRCIPFPLRYACEFLMQAFGLQLNMELQLALQMSEKRVLRTQTLLCDMLLRDSPAGIVTQSPSIMDLVKCDGAAFLYHGKYYPLGVAPSEVQIKDVVEWLLANHADSTGLSTDSLGDAGYPGAAALGDAVCGMAVAYITKRDFLFWFRSHTAKEIKWGGAKHHPEDKDDGQRMHPRSSFQAFLEVVKSRSQPWETAEMDAIHSLQLILRDSFKESEAAMNSKVVDGVVQPCRDMAGEQGIDELGAVAREMVRLIETATVPIFAVDAGGCINGWNAKIAELTGLSVEEAMGKSLVSDLIYKENEATVNKLLSRALRGDEEKNVEVKLKTFSPELQGKAVFVVVNACSSKDYLNNIVGVCFVGQDVTSQKIVMDKFINIQGDYKAIVHSPNPLIPPIFAADENTCCLEWNMAMEKLTGWSRSEVIGKMIVGEVFGSCCMLKGPDALTKFMIVLHNAIGGQDTDKFPFPFFDRNGKFVQALLTANKRVSLEGKVIGAFCFLQIPSPELQQALAVQRRQDTECFTKAKELAYICQVIKNPLSGMRLANSLLEATDLNEDQKQLLETSVSCEKQISRIVGDMDLESIEDGSFVLKREEFFLGSVINAIVSQAMFLLRDRGLQLIRDIPEEIKSIEVFGDQIRIQQLLAEFLLSIIRYAPSQEWVEIHLSQVSKQMADGFAAIRTEFRMACPGEGLPPELVRDMFHSSRWTSPEGLGLSVCRKILKLMNGEVQYIRESERSYFLIILELPVPRKRPLSTASGSGDMMLMMPY

SEQ ID NO: 10301 - protein, 384 aa, Bunchosia armeniaca
DVPVTAAGALKSYKLAAKAISRLQSLPSGNISLQCDVLVKEVRDLIGYDRVMVYKFHDDEHGEVVSECCRSDLESYLGLHYPATDIPQASRFLFMKNKVRMICDCLAPPVKVIQDERLPQPLSLCGSTLRSPHGCHAQYMENMGTIASLVMSVTINEDDDMMDGDQQQMARTLWGLVVCHHTSPRFVPFPLRYACEFLIQVFGVQINKEVELAAQVREKQILRIQTMLCDMLLRDAPVAIITQSPNVMDLVKCDGAALYYKNKFWLLGVTPTEAQIRDIAEWLLEYHSGNTGLSTDSLMEAGYPGASVLGDAVCGMAAVSITSRDFLFWFRSHTAKEIKWGGAKHDPDDKDDGRKMHPRSSFKAFLEVVKWRSLPWEDIEMDAI

SEQ ID NO: 10302 - protein, 228 aa, Picea rubens
NYDGSSTGQAQGHDSEVILYPQAIFPDPFRRGKHILVICDTYSPNGTALPSNKRAAAEKIFSTKAVSDEEPWYGLEQEYTLLQKDVKWPLGWPIGGYPGPQGPYYCGVGADKAWGRDIVDAHYKACLYAGINVSGTNGEVMPGQWEFQVGPSVGISAADELWCARYIMERITEKEGVVLSFDPKPIEGDWNGAGCHTNYSTKSTRKEGGFEVIKKAIEKLRLRHKEHI

SEQ ID NO: 10303 - protein, 376 aa, Tripsacum dactyloides
ALSIAGAVQSQKLAVRAISRLQALPGGDVKLLCDTVVEHVRELTGYDRVMVYRFHEDEHGEVVAESRRDNLEPYLGLHYPATDIPQASRFLFRQNRVRMIADCHATPVRVIQDPGLSQPLCLVGSTLRAPHGCHAQYMANMGSIASLVMAVIISSGGDDEQTGRGGISSAMKLWGLVVCHHTSPRCIPFPLRYACEFLMQAFGLQLNMELQLAHQLSEKHILRTQTLLCDMLLRDSPTGIVTQSPSIMDLVKCDGAALYYHGKYYPLGVTPTESQIKDIIEWLTVCHGDSTGLSTDSLADAGYLGAAALGDAVCGMAVAYITPSDYLFWFRSHTAKEIKWGGAKHHPEDKDDGQRMHPRSSFKAFLEVVKSRSLPW

SEQ ID NO: 10304 - protein, 304 aa, Triticum aestivum
MAPLAARRPACLLALLSVAAALFLTPTALAAGGKTGQVTVFWGRNKAEGSLREACDSGMYTMVTMSLLDVFGANGKYHLDLSGHDLSSVGADIKHCQSKGVPVSLSIGGYGTGYSLPSNRSALDLFDHLWNSYFGGSKPSVPRPFGDAWLDGVDLFLEHGTPADRYDVLALELAKHNIRGGPGKPLHLTATVRCGYPPAAHVGRALATGIFERAHVRTYESDKWCNQNLGWEGSWDKWTAAYPATRFYVGLTADDKSHQWVHPKNVYYGVAPVAQKKDNYGGIMLWDRYFDKQTNYSSLIKYYA

SEQ ID NO: 10305 - protein, 228 aa, Picea rubens
NYDGSSTGQAPGKDSEVIIYPQAIFRDPFRRGKNILVICDTYTPAGEPIPTNKRANAAKIFSHPDVVAEEPWFGIEQEYTLLQKDVQWPLGWPIGGYPGPQGPYYCGTGADKAYGRDIVDAHYKACLYAGINISGINGEVMPGQWEFQVGPTVGISSGDQVWAARYILERITEVAGVVLSFDPKPIQGDWNGAGAHTNYSTKSMREEGGIKVIKKAIEKLGLRHKEHI

SEQ ID NO: 10306 - protein, 470 aa, Arabidopsis thaliana
  misc_feature (33)..(33): Xaa can be any naturally occurring amino acid
MAATTENLPQLKSAVDGLTEMSESEKSGFISLXVSRYLSGEAQHIEWSKIQTPTDEIVVPYEKMTPVSQDVAETKNLLDKLVVLKLNGGLGTTMGCTGPKSVIEVRDGLTFLDLIVIQIENLNNKYGCKVPLVLMNSFNTHDDTHKIVEKYTNSNVDIHTFNQSKYPRVVADEFVPWPSKGKTDKEGWYPPGHGDVFPALMNSGKLDTFLSQGKEYVFVANSDNLGAIVDLTILKHLIQNKNEYCMEVTPKTLADVKGGTLISYEGKVQLLEIAQVPDEHVNEFKSIEKFKIFNTNNLWVNLKAIKKLVEADALKMEIIPNPKEVDGVKVLQLETAAGAAIRFFDNAIGVNVPRSRFLPVKASSDLLLVQSDLYTLVDGFVTRNKARTNPSNPSIELGPEFKKVATFLSRFKSIPSIVELDSLKVSGDVWFGSSIVLKGKVTVAAKSGVKLEIPDRAVVENKNINGPEDL

SEQ ID NO: 10307 - protein, 157 aa, Arachis hypogaea
MSLLSDLINLNLSESGTKKIIAEYIWIGGSGMDIRSKARTISGPVSDPSKLPKWNYDGSSTGQAPGEDSEVILYPQAIFKDPFRRGENILVICDAYTPAGEPIPTNKRHNAAKIFSHPDVASEEPWYGIEQEYTLLQKDINWPLGWANWVATLGPQG

SEQ ID NO: 10308 - protein, 232 aa, Thottea tomentosa
IPQAARFLFMKNKVRMICDCNTKPVKVYQDEKLPFDLTLCGSTLRAPHSCHLQYMRNMGSIASLVMAVVINEGEDDEDGSNEQQPQPTRKKLWGLVVCHNTTPRFVPFPLRYACEFLMQVFAIHVNKEFELENQIREKNILRTQTLLCDMLLRDSPMGIVSRSPNIMDLVKCDGAALVYQNKVYPLGLAPTESQINDIAQWLSECHMDSTGLSTDSLQDAGYPKALSLGDIV

SEQ ID NO: 10309 - protein, 392 aa, Thryallis longifolia
DLEPVNPADVPVTAAGALKSYKLAAKAISRLQSLPSGNISLLCDVIVKEVRDLTGYDRVMVYKFHEDEHGEVVSECRRSDLESYLGLHYPATDIPQASRFLFMKNKVRMICDCLAPPVKVIQDERLPQPLSLCGSTLRSPHGCHAQYMANMGTIASLVMSVTINEDDDMMDGDQQQMARKLWGLVVCHHTSPRFVPFPLRYACEFLIQVFGVQINKEVEFAAQVSEKHILRIQTMLCDMLLRDAPVAIITQSPSVMDLVKCDGAALYYKNRFWLLGVTPTEAQIRDIAEWLLEYHSGNTGLSTDSLLEAGYPGASVLGDAVCGMAAVSITSRDFLFWFRSHTAKEIKWGGAKHDPDDKDDGRKMHPRSSFKAFLEVVKWRSLPWEDVEMDAI

SEQ ID NO: 10310 - protein, 376 aa, Tristachya superba
ALSIAGAVQSQKLAVRAISRLQALPGGDVKLLCDTVVEHVRELTGYDRVMVYRFHEDEHGEVVAECRRDNLEPYLGLHYPATDIPQASRFLSRQNRVRMIADCHATPVRVIQDPGLSQPLCLVGSTLRAPHGCHAQYMANMGSIASLVMAVIISSGGDDEQTARGGISSSMKLWGLVVCHHTSPRFIPFPLRYACEFLMQAFGLQLNMELQLAHQLSEKHILRTQTLLCDMLLRDSPTGIVTQSPSIMDLVKCDGAALYYHGKYYPLGVTPTESQIKDIIEWLTVCHGDSTGLSTDSLADAGYHGATALGDAVCGMAVTYITPSDYLFWFRSHTAKEIKWGGAKHHPEDKDDGQRMHPRSSFKAFLEVVKSRSLPW

SEQ ID NO: 10311 - protein, 305 aa, Oryza sativa Japonica Group
MMTSRMFSAMQMLIMVVVALAGLAAGTRAGDIAIYWGQNGNEGTLAQTCATGNYRFVIVAFLPVFGKGQTPVLNLAGHCDPASNGCTGVGADIKSCQSLGIKVMFSIGGGVGNYGLSSRDDAKQVAAYLWNNYLGGTSPSRPLGDAVMDGIDFDIESGGGMYWDDLARYLKAYSRQGSSKKPVYLTAAPQCPFPDASLGVALSTGLFDYVWVQFYNNPPCQYSSSNGVGNLASAWKQWTSIPAGRVFLGLPVAAEAAGSGFVETSDLVSKVLPVVKKSPKYGGIMLWSRYYDGLTGYSDKVKSSV

SEQ ID NO: 10312 - protein, 416 aa, Candida albicans
MILNLIILLAISIVASASNIAAYWGQNAGGDQQTLGDYCSSSPASIIILSFLDGFPNLLLNFANQCSGTFSSGLAHCSQIGSDIKSCQQQGKTILLSLGGATGNYGFSSDSEAVQFAGTLWNKFGGGKDSERPFDDAIVDGFDFDIENKDQTGYAALATQLRKYFSTGTKSYYLSAAPQCPYPDESVGDLMSQVDLDFAFIQFYNNYCSLNQQFNWNSWSNYARGKSIKLYLGLPGSSSSAGSGFVGLSTVQRVVASIKGDLSFGGISIWDISSAENGGYLNQLYQALSGSGSPAAPSNSYQPNTPLTRTYGGSTATASAYISVGFTAGATHGSTTTNDLLAWIDSLFGSSQSSVQQYATPVQSVTATPQPVAATTTSAPKPTASRSIGLVGLMEQPPPRRYKLCTQLSQQIKQYM

SEQ ID NO: 10313 - protein, 303 aa, Ipomoea trifida
KLCRLFTILDSCYAIYRFYVAEVLLALEYLHMLGVVYRDLKPENILVREDGHIMLSDFDLSLRCAVNPKLLKSSSPVGQPPKKMSSPCSDSSCIEPFCLHPSWQVSCFTPRFLSAAAKTRKLKADIAAQVTPLPQLVVEPTSARSNSFVGTHEYLAPEIIKGEGHGSAVDWWTFGIFMYELLYGRTPFKGTTNEDTLGNVVSQCLKFPETPMISSHARDLIRRLLQKEPENRLGSSKGATEIKNHSFFEGLNWALIRCATPPEMPRIFDLGNLISDTNSQKKQGGKCQKEGTSGEENIEFEMF

SEQ ID NO: 10314 - protein, 460 aa, Absidia zychae; identical to SEQ ID NO: 6757

SEQ ID NO: 10315 - protein, 376 aa, Urochloa mutica
ALSIAGAVQSQKLAVRAISRLQALPGGDVKLLCDTVVEHVRELTGYDRVMVYRFHEDEHGEVVAECRRDNLEPYLGLHYPATDIPQASRFLFRQNRVRMIADCHATPVRVIQDPGLSQPLCLVGSTLRAPHGCHAQYMANMGSIASLVMAVIISSGGDDEQTARGGISSSMKLWGLVVCHHTSPRFIPFPLRYACEFLMQAFGLQLNMELQLAHQLSEKHILRTQTLLCDMLLRDSPTGIVTQSPSIMDLVKCDGAALYYHGKYYPLGVTPTESQIKDIIEWLTVCHGDSTGLSTDSLADAGYHGATALGDAVCGMAVAYITPSDYLFWFRSHTAKEIKWGGAKHHPEDKDDGQRMHPRSSFKAFLEVVKSRSLPW

SEQ ID NO: 10316 - protein, 596 aa, Hyobanche glabrata
PYEVPMTAAGALQSYKLAAKGIARLQAMPSGSLERLCETMAQEVFELTGYDRVMVYRFHDDNHGEVFTEITRPGLEPYAGLHYPATDIPQAARFLFMKNKVRMICDCRAAHVKVVQEESLSSDLTLCGSTLRAPHSCHLRYMENMNSIASLVMSVVVNEGTDEESSASSSSSSSSSHPYRRKQLWGLVVCHHTSPRFVPFPLRYACEFLSQVFAIHISKELELLNQTLEKNILKTQTVLCDMLLRGNPLSIVTRSPTVMDLVKCDGAVLLYKGKNHRLGLAPSDLQIRDIVSWLDEYHRDSTGTSTGSLLDAGFPGAGLLGNAFCGMAAVRITGRDWLFWFRSHTAAEVRWGGAKHEKGDEDDGRRMHPRSSFKAFLEVVKARSVQWRDFEMDAIHSLQLILRNACEKEEEEDRRKDMVVAREIQARLNELHIDGAKEMETVTSEMVRLIETASVPILAVGVDGLVNGWNTKIADLTGLPVDGAIGRHFLALVEEASVDVVRRMLELALQGQEEQNVQFEIKTHGPRTESNPISLIVNPCASRDVKDNVVGVCFIAQDVTTERSMIDKFTRIEGDYQAIVQNPNPLIPPFFGSDEF

SEQ ID NO: 10317 - protein, 618 aa, Hyobanche rubra
SGKPFYAIAHRVTGSLVIDFEPVKPQEVPMTAAGALQSYKLAAKAIARLQALPSGSLERLCETMAQEVFELTGYDRVMVYRFHDDDHGEVFAEITRPGLEPYVGLHYPATDIPQAARFLFLKNKVRMICDCRAAHVKVVQDEGLSSDLTLCGSILRAPHSCHLCYMENMNSIASLVMSVIVNEGTDEESSTSSSSHPDKRKRLWGLVVCHHTSPRFVPFPLRYACEFLSQVFAIHVSKELELLNQTLEKNILKTQTVLCDMLLRGNPLAVVTQSPTVMDLIKCDGAVLLYKGKKHRLGVTPSDPHIWDIVLWLDEYHRDSTGTSTDSLLDAGFPGAVALGDAFCGMAAVRITGHDWLFWFRSHTEAEVQWGGAKHEMGGEDDDRKMHPRSSFKAFLEVVKARSVPWRDFEMDAIHSLQLILRNAYEKEEEEEEERRRKDMVVAGEIQARLNELHIDGARDMEAVTSEMVRLIETALVPILAIGVDGLVNGWNAKIADLTGLPVDGAIGKHFLALVEEASADTFSRMLELALQGQEERNVQFEIKTHGPRTDFGPISLVVNACASRDVKDNVVGVCFIAQDVTTVRSMMDKFTRIEGNYRAIVQNPNPLIPPIFGSDEF

SEQ ID NO: 10318 - protein, 594 aa, Hyobanche sanguinea
PYEVPMTAAGALQSYKLAAKGIARLQAMPSGSLERLCETMAQEVFELTGYDRVMVYRFHDDNHGEVFTEITRPGLEPYAGLHYPATDIPQAARFLFMKNKVRMICDCRAAHVKVVQEESLSSDLTLCGSTLRAPHSCHLRYMENMNSIASLVMSVVVNEGTDEESSASSSSSSSHPYRRKQLWGLVVCHHTSPRFVPFPLRYACEFLSQVFAIHISKELELLNQTLEKNILKTQTVLCDMLLRGNPLSIVTRSPTVMDLVKCDGAVLLYKGKNHRLGLAPSDLQIRDIVSWLDEYHRDSTGTSTDSLLDAGFPGAGLLGNAFCGMAAVRITGRDWLFWFRSHTAAEVRWGGAKHEKGDEDDGRRMHPRSSFKAFLEVVKARSMQWRDFEMDAIHSLQLILRNACEKEEEEDRRKDMVVAREIQARLNELHIDGAKEMETVTSEMVRLIETASVPILAVGVDGLVNGWNTKIADLTGLPVDGAIGRHFLALVEEASVDVVRRMLELALQGQEEQNVQFEIKTHGPRTESNPISLIVNPCASRDVKDNVVGVCFIAQDVTTERSMIDKFTRIEGDYQAIVQNPNPLIPPFFGSDEF

SEQ ID NO: 10319 - protein, 66 aa, Triticum aestivum
MGSVDYYEILNVDRSATDDDLRRAYRQLAMRWHPDKNPTGDKDSEAKFKDITQAYNVLSDASKRAV

SEQ ID NO: 10320 - protein, 884 aa, Oryza sativa Japonica Group
MAFSSEAWKSSATAGHGDGDGDGDRTPPPTPPLPTPLLPPTLAPLQRSLVFGRVEGEAMSSEARESSATAVDRTPPPTPPSPPPPPPPPPTNGTLTPPPSSAPSGGRATSSEARESPHATSVDDGGRAPPPPPLPRPTSARATPATTPSADGSSSSSSSTSGGDEDKDSFMHLVSRYLIREEKEMIDWNKVERPTPEMVVPYDSLVQAPRDIPEIRNLLNKLAVLKLNGGLGTTMECVAPKCTIEVRSGLTFLDLAIMQTEFLNKKYGCSVPILLMNSFNTSLVNKIVEKYTNIEIHTFNQNKYPRIITEKFLPLSSEGSTGSHCWYPPGHGDVFFSLCKSGILDTMLSQRTWALQSILVSKYEYNILINVSWLASEIESLTSTEILNHLIHNKNEYCMEVTPKTSADVKGGSLICYEGLRRVNLKAIKRLVKAEALKMEIIPNLKEVDGVKVLQLEKEAGSAIQCFEKAIGVTVPRSRFLAVKNTSDLFLILSDLYIVMDGTVTRNPARDNSTNPLIDLGPEFRKVDSFLDRFKSIPSIVALDSLKISGDVWFGSRITLKGEVTIAAQLGLKLDILDGSVFDNKHSTHSSGAIKYTMKLDEGADCASIDSALNRLNPGSTLILKKDDFYRYIDPIQARNRAMFHSESSKPSSSNNELLQDNGTPFTPNDNSDRIQPLPLAPFSSSLGSSSLLPLYHSRARRAPYWYTRFIFVNPRGALHSQFRWLWGRIKFSSAKDLAIFYGIYHIVLYGIDCIITATLKDNWFAKLVQGKLWLIILVFHQFKLLSRRRLRWGERRRRTLRSIHQDIQSYLDNYSDSDMWHLIVHSVARVISNVLEDVNRKYMKNHYLGFLAIHSTVFAIEVIGSYAVELNYDIEHYAEPPEL

SEQ ID NO: 10321 - protein, 608 aa, Lamium purpureum
SGKPFYAIIHRVTGSLIIDFEPVKPHEVPMTAAGALQSYKLAAKAINRLQSLPSGSIERLCDTMVQEVFELTGYDRVMVYKFHEDDHGEVFTEITKPGLEPYVGLHYPATDIPQAARFLFMKNKVRMICDCRATHVKVIQDGNLPIDLTLCGSTLRAPHSCHLQYMENMNSIASLVMSVVVNEGDEEGSGSDSPPEKRKRLWGLVVCHHTTPRFVPFPLRYACEFLAQVFAIHVNKEFELESQMLEKNILRTQTLLCDMLLRDAPLGIVSQSPNVMDLVKCDGAALLYKGKKYRLGMTPTDFQIRDVVSWLDEYHRDSTGLSTDSLYDAGFPGALALGDAICGMAAVKITDKDWLFWFRSHTASEVRWGGAKHEPGEKDDGRKMHPRSSFKAFLEVVKTRSIPWKDYEMDAIHSLQLILRNAFKESGGTDVEARAIHMKLSDLQIDGIQELEAVTSEMVRLIETASVPILAVDVDGLVNGWNTKIADLTGLSVDKAIGRHFLDLVEDSSAHTVNQMLKLALEGNEEHNVQFELKNHGEMTEAGPISLVVNACASRDVKESVVGVCFIAQDITAQKSMMDKFTRIEGDYRAIVQNPNPLIPPIFGTDEF

SEQ ID NO: 10322 - protein, 1236 aa, Schizosaccharomyces pombe
MRLISSLLLLVYSARLALSLNLTNQTAVLGYWGSNLAGKMGDRDQKRLSSYCQNTTYDAIILSSVIDFNVDGWPVYDFSNLCSDSDTFSGSELKKCPQIETDIQVCQENGIKVLLSIGGYNGNFSLNNDDDGTNFAFQVWNIFGSGEDSYRPFGKAVVDGFDLEVNKGTNTAYSAFAKRMLEIYASDPRRKYYISAAPTCMVPDHTLTKAISENSFDFLSIHTFNSSTGEGCSGSRNSTFDAWVEYAEDSAYNTNTSLFYGVVGHQNGSNGFISPKNLTRDLLNYKANSTLFGGVTIWDTSLAAMSYDNSSETFVEAIHKILDTKSKHSSSKSSHDSSQGLESTSSIALNPTSSISSTSSSSSTSSAISTISQDHTKTVTSVSDEPTTITASGATSVTTTTKTDFDTVTTTIVSTSTLISASDSTSIIVSSYVSTVTQPASTRVQTTTVSSISTSVKQPTASVASSSVSVPSSSSVQPQSSTPISSSSSASSPQSTLSTSSEVVSEVSSTLLSGSSAIPSTSSSTPSSSIISSPMTSVLSSSSSIPTSSSSDFSSSITTISSGISSSSIPSTFSSVSSILSSSTSSPSSTSLSISSSSTSSTFSSASTSSPSSISSSISSSSTILSSPTPSTSSLMISSSSIISGSSSILSSSISTIPISSSLSTYSSSVIPSSSTLVSSSSSLIVSSSPVASSSSSPIPSSSSLVSTYSASLSNITHSSLSLTAMSSSSAIPTSVNSSTLITASSSNTLLSSITSSSAIVSSTTVSNISSNLPSATASSQSQLTNSSTLATSLYLSSSSSRTISTSSTNEYNTSFHAPTVSSTTSSSSTTSLAANKGVNSNSITSLNLESTSSVTSTAYTTDSVTSTTALTSQGPSSSVVSSSLSSTTSLSTSIPVTSSVAPAVTSTGSETSSVVGSGTDSATSSSWTAETSSSAITSSVAASVTPTSSSSASSWSSSSEVDPSTAASATGSSTSSIATASVSGSSTSSVATASATDSSTSSIAAASVTGSSTSSVATASVTDSSTSSVATASATDSSTSSIAVASVTGSSTSSVATASATDSSTSSVATASITGSLSSSIATASVTGSPTSSVTAVSSTSSVEGTASSTIAAAASAATLSSDAASGSSTVTSSATASSSSSAATTADSSVTTDTPSNDFNANVDTAGLWYVSALSSYSVPAGFAWTTIDGFSVVMPSANAYKKRSLPIKATANPALNGAGTWKTIHTSATTTAA

SEQ ID NO: 10323 - protein, 254 aa, Lathraea clandestina
WFRSHTAAEIRWGGAKPEPGDMDDGRNMNPRSSFKAFLEVVKARCLPLKDYEMDAIHSLQLVLRNASTKKRDAGKDLEGVETQAKLSMFKVDGALELEAVTSEMVRLIETALVPIFAIGMDGLVNGWNAKIADLTGLSVTKAMGVHFLALVEDSSADAVSKMLELALKGKEEQNVHFEIKTHGPNSESGPISLIVNACAGRDVWGNVVGVCFVAQDITTQKRAMDQFTRIEGDYRAIVQNPNSLIPPIFGTNEF

SEQ ID NO: 10324 - protein, 213 aa, Frankia sp. ACN14a
MSKAEFIQAEYIWIDGTEPEPLMRSKTRIIKKGKEPEIWGFDGSSTNQAPGSNSDCVLRPVFVTPDPIRGGDNILVLCEVELTDFTPHPTNTRAATRAVAEKYADMSPMFGIEQEYTFFKDGRPYGWPEVGYPAPQGPYYCGVGGSKMPGREIVERHTQACLDAGLAIEGTNAEVMMGQWEFQIGVLPAPAIGDQIWLGRWLLHRIAEDYGVE

SEQ ID NO: 10325 - protein, 585 aa, Zea mays
  misc_feature (461)..(461): Xaa can be any naturally occurring amino acid
  misc_feature (552)..(552): Xaa can be any naturally occurring amino acid
MASAAAGTPKRCYYEVLGLSRDCSPTDIKLAFRRLALSLHPDKQPPGSDLAAATAAFQELQHAHSVLSDPQERAYYDSHRSQILFSDPASAGAKSASIVPDLFAFFSSSAFSGFSDTGRGFYKVYGDVFDKVFAQELAYARRMGVPDPAAPPVIGNLDSPYAQVTAFYSYWLGFGSVMDFGWAAEWDAARGESRRVRRLMEEDNKKAMRKARREYNDAVRGLAAFCKKRDKRVVDMVLKKKLEEERRKAEEKERKKEEDKRKKERAMACQEPEWARAEEVEEGLYDEDEEEEMRAKKEELYCVACNKKFKSDKQWKNHEQSKKHRDKVSELRMAFREEESLKEAEEGEGDWNEVDVGFDFKPTQESDDESAFSDAAEELAEEFEEGLEVHDKENGDKDFDSAEQEVGSYDEASVLEAMLSSCKNRKGGYVAPPEEALSGTAEDDDHHRSSEVNNAKRKGRXRRAAKKEQDESNYAGNEHHGKCEVQPEGSVHGNDVDDIMEGPSSSNVNNGSVSKGDKQNGENTNPKKNKKGTKKKPTVSTDQKSMSKADQXSTSKGKKQKPRMVYNKLVVWEEKPSVLLAPVAF

SEQ ID NO: 10326 - protein, 74 aa, Glycine max
  misc_feature (51)..(51): Xaa can be any naturally occurring amino acid
  misc_feature (55)..(55): Xaa can be any naturally occurring amino acid
DGFVIRNKARENPENPSIELGPEFKKVSNFLSRYITVPSNGHHASLKVANXYSSXASFILKGTIIIVSKPGVKL

SEQ ID NO: 10327 - protein, 299 aa, Arabidopsis thaliana; identical to SEQ ID NO: 9056

SEQ ID NO: 10328 - protein, 403 aa, Hordeum brevisubulatum
MKGGLTDQIKREISVMKLVKHPNIVQMYEVMATKTKIYFVLEHVKGGELFNKVQRGRLKEDAARKYFQQLICAVDFCHSRGVYHRDLKPENLLLDENSNLKVSDFGLSTISECRRLDGLLHTSCGTPAYVAPEVINRKGYDGAKADIWSCGVILFVLLAGYLPFQDKNLMNMYKKIGKAEFKCPSWFSSDIRRLLLRILDPNPSTRISIERIMEHPWFRKGLDAKLLRYNLQAKDAVPAADMTVTSDSPSSSNSAIEGKEQEAKKLSNLNAFDIISLSNGLDLSGMFEDNDKKRESKFTSTNSASTIVSKIEDIAKGMRLKLVKKDGGMLKMEGSKPGRKGVMSIDAEIFEVTPDFHLVELKKTNGDTLEYQRVLNQEMRPALKDIVWAWQGEPQPQPQQQPC

SEQ ID NO: 10329 - protein, 390 aa, Echinopterys eglandulosa
DLEPVNPADVPVTAAGSLKSYKLAAKAISRLQSLPSGNISLLCDVLVKEVRELTGYDRVMVYKFLEDEHGDVVSECRRSDLESYLGLHYPATDIPQASRFLFMKNKVRMICDCLAPPVKVIQDERLPQPLSLCGSALRSPHGCHAQYMMGTIASLVMSVTINEDDDTMDGDQQQMARKLWGLVVCHHTSPRFVPFPLRYACEFLIQVFGVQINKEVGLAGQVREKHILRIQTMLCDMLLRDAPVAIITQSPNVMDLVMCDGAALYYKNKFWLLGVTPTEAQIRDIAEWLLKYHSQNTGLSTDSLMEAGYPGASVLGDAVCGMAAVSLTSKDFLFWFRSHTAEGIKWGGATHDPDDKDDGRKMHPRLSFKAFLEVVKWRSLPWEDVEMDAI

SEQ ID NO: 10330 - protein, 348 aa, Vitis vinifera
MGSKLEGPSAPAVRRDPYEVLSVSRDSTDQEIKTAYRKLALKYHPDKNASNPEASELFKEVAYSYNILSDPEKRRQYDSAGFEALDSDSMDMEIDLSNLGTVNTMFAALFSKLGVPIKTTVSANVLEEALNGTVTVRPLPVGTSVSGKVDKQCAHFFGVTINEEQAQAGIVVRVTSSSQSKFKLLYFEQDANGGYGLALQEDSEKTGKVTSAGMYFLHFQVYRMDSTLNALAMAKDPEAAFFKRLEGLQPCEVSELKAGTHIFAVYGDNFFKTASYTIEALCAKSYEDTTEKLKDIEAQILRKRTELRQFETEYRKALARFQEVTNRYGQEKQCVDELLKQRDSIHYS

SEQ ID NO: 10331 - protein, 392 aa, Dicella nucifera
DLEPVNPADVPVTAAGALKSYNLASKAISRLQSLPSGNISLLCDVLVKEVRDLTGYDRVMVYKFHEDEHGDVVSECRRSDLESYLGLHYPATDIPQASRFLFMKNKVRMICDCLAPPVKVIQDERLPQPLSLCGSTLRSPHGCHAQYMTNMGTIASLVMSVTINEEDETMDGDQQQMTRKLWGLVVCHHTSPRFVPFPLRYACEFLIQVFGVQINKEVELAAQVRENHILQIQTMLCDMLLRDAPVAIITQSPNVMDLVKCDGAALYFKNKTWLLGVTPTEKQIRDIAEWLLEYHSGNTGLSTDSLMEAGYPGASVLGDAVCGMAAVSITSRDFLFWFRSHTAKEIKWGGAKHDPDDKDDGRKMHPRSSFKAFLEVVKWRSIPWEDIEMDAI

SEQ ID NO: 10332 - protein, 392 aa, Heteropterys thyrsoidea
DLEPVNPADVPVTAAGALKSYKLASKAISRLQSLPSGNISLLCDVLVKEVRDLTGYDRVMVYKFHEDEHGEVVSECRRSDLESYLGLHYPATDIPQASRFLFMKNKVRMICDCLAPPVKVIQDERLPQPLSLCGSTLRSPHGCHAQYMTNMGTIASLVMSVTINEDDDMMDGDQQQMTRKLWGLVVCHHTSPRFVPFPLRYACEFLIQVFGVQINKEVELAAQVREKHILQIQTMLCDMLLRDAPVAIITQSPNVMDLVECDGAALYFKNKTWLLGVTPTEEQIRDIAEWLLEYHSGNTGLSTDSLMEAGYPGASVLGDAVCGMAAVSITSRDFLFWFRSHTAKEIKWGGAKHDPDDKDDLRKMHPRSSFKAFLEVVKWRSMPWEDVEMDAI

SEQ ID NO: 10333 - protein, 389 aa, Sulfolobus shibatae
MSSEFISKVDKEARRKAANILRDKFLNLVEQLKKGEPLVMEIPMRTLSNAIYDEKRKLLLLGEKKLRRNFLDLNEAKRFMQTVLMASIIYDALVSDEYPTIRDLYYRGKHSLLLKSIEGNKIVSEENTWDEQKESDSVIVDIEVFTSLLREEMLILSKEKGKVVGNLRIRSGNDVIDLSKTGHGAYAIEPTPDLIDFIDVDAEFVLVVEKDAVFQQLHRAGFWKQYKSILITSAGQPDRATRRFVRRLNEELKLPVYILTDADPYGWYIFSVFRIGSISLSYESERLATPDAKFLGVSMGDIFGNSRKKPYLSEAERKNYIIKAKDADIKRAEEIKNYEWFKTKAWQEEINTFLQRKAKLEIEAMASKGLKFLAFQYIPEKITNKDYIA

SEQ ID NO: 10334 - protein, 374 aa, Pediococcus pentosaceus ATCC 25745
MAANKDYYDILGVSKDASDDEIKKAYRKLSKKYHPDINKAPDAEQKFKDVNEAYEVLGDSQKRAQYDQFGSADPNAGFGGGGFGGQGGFSDFGGGFEDIFGSFFGGGQRQSPNQPRQGEDLQYQMSLKFEEAIFGKKTTIKYSREALCKTCGGSGAKEGTSPVTCHKCNGTGTIQVTQNTPLGRMVRQQTCDVCNGTGKEIKEKCPTCGGTGHTSQQHEVKVSVPAGVEDGQQMRLQGQGEAGFNGGPYGDLYIIFQVQPSDMYERDGSEIYYNQTISFVQAALGDEIEVPTVHGKVKLKVPAGTQTGTNFRLKGKGAPRLRGNGTGDQHVKVKVTVPKKLNSGQKEALKQFAKASGEEPSGHGKSGFFDKFMN

SEQ ID NO: 10335 - protein, 382 aa, Ehrlichia canis str. Jake
MSKSDYYELLGVSKNATSEEIKKAYRKMALKYHPDTNPGNKEAEEKFKELSEAYDVLIDQDKRAAYDKYGHNAFDGAAGRGGFDFNSGFSGDFSDIFNDLFGGGFGSRGGRGSSRRSEGAAGSDLRFDVEITLEDSFNGKKVPISYVTYVKCSSCSGSGSEGSAKSVQCNTCHGAGSVRTQQGFFTIERTCHVCNGEGEIIQNKCKKCSGSGRVRDEVNLLVTIPKGIESGNKIRLNGKGEAGYRGARSGDLYVYSNIQKHKFFTRSGPDLYCTVPIKMTLAALGGHIEMPSIDGTWTKVKVPEGSQSGDKLRLKEKGMPVINSSKRGDMYIQITVETPVKLTKKQKELLQKFDDEPNVDCNPQSTGFFQKVKSFWKDIRSN

SEQ ID NO: 10336 - protein, 381 aa, Heteropterys leona
ETPAGALKSYKLASKAISRLQSLPSGNISLLCDVLVKEVRDLTGYDRVMVYKFHEDEHGEVVSECRRSDLESYLGLHYPATDIPQASRFLFMKNKVRMICDCLAPPVKVIQDETLPQPLSLCGSTLRSPHGCHAQYMTNMGTIASLVMSVTINEDDDMMDGDQQQMTRKLWGLVVCHHASPRFVPFPLRYACEFLIQVFGVQITKEVELAAQVREKHILQIQTMLCDMLLRDAPVAIITQSPNVMDLVKCDGAALYFKNKTWLLGVTPTEEQIRDIAEWLLEYHGGNTGVSTDSLMEAGYPGASILGDAVCGMAAVSITSRDFLFWFRCHTAKEIKWGGAKHDPDDKDDLRKMHPRSSFKAFLEVVKWRSMPWEDIEMDAI

SEQ ID NO: 10337 - protein, 472 aa, Triticum aestivum
  misc_feature (458)..(458): Xaa can be any naturally occurring amino acid
MAAAALANGDVRAGGGGAVPRPTNPMVTPLLTDLYQFSMAYAYWKAGKHLDRAVFDLYFRKSPFAGEFTVFGGLEECIRFIANFKFKEEEINFLRTALPTCEDGFFEYLSSIDCSDVEVYAIPEGSAVFPKVPLMIIEGPVAVVQLLETPFLSLVNYASLVTTNAARHRLVAGKPKNLLEFGLRRAQGPDGGISASRYSYMGGFDATSNVAAGRLFGIPIRGTHSHAFVSSFLGLDEIIDKALSSSDGSNKCENFVSLVQNWLVKIQDASSLRGSFGETNQSELAAFTSYALAFPNSFLALVDTYDVMRSGVPNFCAVALALNDMGYKAVGIRLDSGDLAYLSIETRKFFCAIEKEFGVVGFGKTNITASNDLNEETIDALNKQGHEVDSFGIGTYLVTCYAQAALGCVFKLVEINKQPRIKLSEDVTKVSIPCKKRCYRLYGKEGYPLVDIMTGQDXQAKGGEKICVLNLQ

SEQ ID NO: 10338 - protein, 335 aa, Arabidopsis thaliana; identical to SEQ ID NO: 459

SEQ ID NO: 10339 - protein, 392 aa, Tetrapterys microphylla
DLEPVNPADVPVTAAGALKSYKLAAKAISRLQSLPSGNISLLCDVLVKEVRDLTGYDRVMVYKFHEDEHGEVVSECRRSDLESYLGLHYPATDIPQASRFLFMKNKVRMICDCLAPPVKVIQGERLPQPLSLCGSTLRSPHGCHAQYMTNMGTIASLVMSVTINEDDDMMDGDQQQMTRKLWGLVVCHHTSPRFVPFPLRYACEFLIQVFGVQINKEVELAAQVREKHILQIQTMLCDMLLRDAPVAIITQSPNVMDLVKCDGAALYFKNKTWLLGVTPTEEQIRDIAEWLLEYHSGNTGLSTDSLMEAGYPGASVLGDVVCGMAAVSITSRDFLFWFRSHTANEIKWGGAKHDPDDKDDGRKMHPRSSFKAFLEVVKWRSMPWEDVEMDAI

SEQ ID NO: 10340 - protein, 523 aa, Coccidioides immitis RS
MTSPLPPDPYAALGVSKDASTAEIKTAYRKLVLKCHPDKVKDESLRSQKQDEFQRVQEAYELLSDDTKRAKYDQKARMAEMRKEAMEKGGPSASFGHRTAGYDVRNGRVYEERVPRYYEEEMAFADEQWSSSSKYDGYEKRQTTKDSDEKKKKSRSSESKREPTKTRDDRAGRSSRAKNRDKERRRELSDKYSHTATDFPEPKIKRESRSKHPNPRPREYSDHWESSKHDSLQNDARRYIERTRNDVAAERERRSSGSPWTFSSVFRDAHHVDSPRRSSARPRASRNGSVDIIEPSPKRTHSSRTIPSLTTATSAPPNIKIPPTLGMSPPTRSSTYHVREKRDPPPIRRAETLPLGVSSRHGDPIVTKSSKLKDLYDSGYSSSSPGTPKISPPKSSKHVVVDEDDDFPRHRTVLVDPPYPSHRRTHSTSPPQREPVPFMMRPLPKSKRSKSRDIHARHDSIPKLRTSRDGLFAEITDDYYPRFSDERARYSPKIRQEDSYHEIYPRSYRSDPRSHTRKESCAY

SEQ ID NO: 10341 - protein, 356 aa, Hevea brasiliensis
MSLLSDLINLNLSDTTDKIIAEYIWIGGSGMDMRSKARTLSGPVSDPSKLPKWNYDGSSTGQAPGEDSEVILYPQAIFKDPFRRGNNILVMCDAYTPAGEPIPTNKRHAAAKIFSHPDVVAEEPWYGIEQEYTLLQRDVKWPIGWPLGGYPGPQGPYYCSIGADKSFGRDVVDSHYKSCLYAGINISGINGEVMPGQWEFQVGPAVGISAGDELWVARYILERITEIAGVVLSFDPKPIQGDWNGAGAHTNYSTKSMRHDGGYEVIKKAIEKLGLRHKEHIAAYGEGNERRLTGRHETADINTFLWGVANRGASIRVGRDTEKQGKGYFEDRRPASNMDPYVVTSMIAETTILWKP

SEQ ID NO: 10342 - protein, 135 aa, Glycine max
MYYVKEAAHVDPMFVADNTNPKDYYKVLEVEYDATDENIKLNYRRLALKWHPDKHGGDSAVTAKFQEINEAYNVLSDPTKRLDYDLTGICEIEKYSLQEYLARFKSMILTCNGLGINQTDRWSQQLIENFESLDK

SEQ ID NO: 10343 - protein, 346 aa, Saccharomyces cerevisiae
MAEASIEKTQILQKYLELDQRGRIIAEYVWIDGTGNLRSKGRTLGHDSDIYLKPVAYYPDPFRRGDNIVVLAACYNNDGTPNKFNHRHEAAKLFAAHKDEEIWFGLEQEYTLFDMYDDVYGWPKGGYPAPQGPYYCGVGAGKVYARDMIEAHYRACLYAGLEISGINAEVMPSQWEFQVGPCTGIDMGDQLWMARYFLHRVAEEFGIKISFHPKPLKGDWNGAGCHTNVSTKEMRQPGGMKYIEQAIEKLSKRHAEHIKLYGSDNDMRLTGRHETASMTAFSSGVANRGSSIRIPRSVAKEGYGYFEDRRPASNIDPYLVTGIMCETVCGAIDNADMTKEFERESS

SEQ ID NO: 10344 - protein, 346 aa, Glomus intraradices
TETLAKYLSLDQGGKVQAEYIWIDGDSGLRSKTRTLDFKPADVSEISEWNFDGSSTNQAPGGDSDVLLRPVAIFKDPFRGGDNILVLNECFNNDGTPNRTNHRRSCAKVMKTYTDQHPWFGIEQEYTLFESDGSVLGWPKGGFPGPQGPYYCSVGANVAFGRDVVEAHYRACLYAGVNISGINAEVMPGQWEFQVGPCEGIDMGDHLWITRFLLQRVAEDFGIIVSFHPKPIKGDWNGAGCHTNYSTQAMREEGGIKAIHAAIDKMAARHADHITVYGEDNDQRLTGRHETGHISQFSYGVANRGASIRIPRHVAAEGKGYLEDRRPASNIDPYRVTQIIVESSLA

SEQ ID NO: 10345 - protein, 1164 aa, Arabidopsis thaliana
MVSGGGSKTSGGEAASSGHRRSRHTSAAEQAQSSANKALRSQNQQPQNHGGGTESTNKAIQQYTVDARLHAVFEQSGESGKSFDYSQSLKTAPYDSSVPEQQITAYLSRIQRGGYTQPFGCLIAVEESTFTIIGYSENAREMLGLMSQSVPSIEDKSEVLTIGTDLRSLFKSSSYLLLERAFVAREITLLNPIWIHSNNTGKPFYAILHRVDVGILIDLEPARTEDPALSIAGAVQSQKLAVRAISHLQSLPSGDIKLLCDTVVESVRDLTGYDRVMVYKFHEDEHGEVVAESKRNDLEPYIGLHYPATDIPQASRFLFKQNRVRMIVDCYASPVRVVQDDRLTQFICLVGSTLRAPHGCHAQYMTNMGSIASLAMAVIINGNEEDGNGVNTGGRNSMRLWGLVVCHHTSARCIPFPLRYACEFFMQAFGLQLNMELQLALQVSEKRVLRMQTLLCDMLLRDSPAGIVTQRPSIMDLVKCNGAAFLYQGKYYPLGVTPTDSQINDIVEWLVANHSDSTGLSTDSLGDAGYPRAAALGDAVCGMAVACITKRDFLFWFRSHTEKEIKWGGAKHHPEDKDDGQRMNPRSSFQTFLEVVKSRCQPWETAEMDAIHSLQLILRDSFKESEAMDSKAAAAGAVQPHGDDMVQQGMQEIGAVAREMVRLIETATVPIFAVDIDGCINGWNAKIAELTGLSVEDAMGKSLVRELIYKEYKETVDRLLSCALKGDEGKNVEVKLKTFGSELQGKAMFVVVNACSSKDYLNNIVGVCFVGQDVTGHKIVMDKFINIQGDYKAIIHSPNPLIPPIFAADENTCCLEWNTAMEKLTGWPRSEVIGKLLVREVFGSYCRLKGPDALTKFMIVLHNAIGGQDTDKFPFPFFDRKGEFIQALLTLNKRVSIDGKIIGAFCFLQIPSPELQQALEVQRRQESEYFSRRKELAYIFQVIKNPLSGLRFTNSLLEDMDLNEDQKQLLETSVSCEKQISKIVGDMDVKSIDDGSFLLERTEFFIGNVTNAVVSQVMLVVRERNLQLIRNIPTEVKSMAVYGDQIRLQQVLAEFLLSIVRYAPMEGSVELHLCPTLNQMADGFSAVRLEFRMACAGEGVPPEKVQDMFHSSRWTSPEGLGLSVCRKILKLMNGGVQYIREFERSYFLIVIELPVPLMMMMPSS

SEQ ID NO: 10346 - protein, 388 aa, Lathraea clandestina
PVKPYELPMTAAGALQSYKLASKAISRLQSLSCESIERLCETMVQEVFELTGYDRVMTYKFHGDDHGEVFTEITKPGLEPYVGLHYPATDIPQAARFLFMKNKVRMICDCRANHVRVIQDENLPMDLTLCGSTLRAPHICHLQYMENMNSIASLVMSIVVNEGNEESAPDETSQQLDKRKRLWGLVVCHNTSPRFVPFPLRYACEFLAQVFAIHVNKELELENQMLEKNILRTQTLLCDMLLRDAPLGIVSQSPNVMDLVKCDGSILLHKNQKYRLGITPGDFQIRDIVSWLDEYHHDSTGLSTGSLYDAGFPGALALGDVVCGMAAVRITDRDWLFWFRSHTASEIRWGGSKHELGERDDGRKMHPRSSFKAFLEVVKTRSLPWKDS

SEQ ID NO: 10347 - protein, 612 aa, Lathraea clandestina
SGKPFYAIIHRVTASLIIDFEPVKPHGVPTTAAGALQSYKLASKSIARLQSLPSGSIEWLCETMVQEVFQLTGYDRVMTYKFHEDDHGEVLTEITKPGLEPYVGLHYPATDIPQAARFLFMKNKVRMICDCRANHVRVIQDENLPIDLTLCGSTLRAPHSCHLQYMENMNSIASLVMSVVVNEGNEDAAPGETSQQLDKRKRLWGLVVCHNTTPRFVPFPLRYACEFLAQVFAIHLNKELELENQMLQKNILRTQTLLCDMLLCDAPLGIVSQSPNVMDLVKCDGSILLHKNQKYRLGITPTDFQIRDIVSWLDEYHRDSTGLSTDSLYDAGFPGALDLGDVVCGMAAVRITDRDWLFWFRSHTASEVRWSGAKHELGERDDGRKMHPRSSFKAFLEVVKTRSLPWKDFEMDAIHSLQLILRKASSKEMEERKDLEGVEIQARLNELQIDGVQELEAVTSEIVRLIETASVPIFAVGVDGLVNGWNTKIADFTGLPVDKAIGVHFLSLVEESSAEAVSKMLELALEGKEEQNVHFEIKTHSPNSDSSPISLIVNACASRDVRENVVGVCFIAQDITTQKSVMDKFTRIEGDYRAIVQNPNPVIPPIFGTDEF

SEQ ID NO: 10348 - protein, 207 aa, Glycine max
MADEGNKSNNFYSILGLKKECTELELKNAYRKLAKKWHPDRCSATGNSELVEEAKKKFQEIREAYSVLSDANKRLMYDVGVYDSDDDENGMGDFLDEMLTMMSQTKSNENGEESFEELQQLFEDMFEADIGLDGGPSLASSDCSTSSAYMTYSESSSSNKHNSSEMNFGKAENSSVFDAGYQNFCFGTGEPTPRYKEEKGGNSRRRR

SEQ ID NO: 10349 - protein, 382 aa, Lathraea clandestina
PYEVPTMAAGALQSYKIAAKAITRLQALPSGSGSMERLCDTMAHEVFELTGYDRVMIYKFHEEDDHGEVLTEITKPGLDPFLGLHYPATDVPLAARVLFMKHKVRMICDCRAKHVRVVQGPVDLTLCGSTLRAPHSCHVHYMENMGSMASLVMSVVLNDERVRTGGESSQQPDKRKRMWGLVVCHHVSPRFIAFPVRYACKFLAQVFATLVNKEIDLENQMVQKNVLRTHTILCDMLLRDAPLGIISQSPNVMDLVRCVGAILLYKNQNHRLGLTPNDFQICDLVSWLNEFHRDSECISTDSLYNAGFPGALTLGDAVCGMVAIRISDRDWLFWFQSHTAAEIRWGGAKPEPGDMDDGRNMNPRSSFKAFLEVVKTRCLPLK

SEQ ID NO: 10350 - protein, 274 aa, Oryza sativa Japonica Group; identical to SEQ ID NO: 2896

SEQ ID NO: 10351 - protein, 173 aa, Oryza sativa Japonica Group
MLEGGNFSNQETLYEVLSVRKDATYDEIRAAYKSAVLNTHPDKAQMALNPLVSSSERNEFLSVQKAWEILRYPKSRAEYDKQLQSSRQNLEIVATEIEIDDMIVESTADSVELLYPCRCGDYFSITSRELGQIGISVREDGEMELHTSDSVPSSVVLGCGSCSLKARLVTNKT

SEQ ID NO: 10352 - protein, 198 aa, Bradyrhizobium genosp. alpha bv. genistearum
PTPNLRGKTQIKEFASFPTLEQLPLWGFDGSSTQQAEGHSSDCVLKPVAVFPDGARTNGVLVMCEVMMPDGKTPHASNKRATILDDSGAWFGFEQEYFFYKDGRPLGFPTSGYPAPQGPYYTGVGFSNVGDVARKIVEEHLDLCLAAGINHEGINAEVAKGQWEFQIFGKGSKKAADEMWMARYLMLRLTEKYGIDIE

SEQ ID NO: 10353 - protein, 321 aa, Oryza sativa Japonica Group; identical to SEQ ID NO: 2898

SEQ ID NO: 10354 - protein, 198 aa, Bradyrhizobium canariense bv. genistearum
PTPNLRGKTQIKEFASFPTLEQLPLWGFDGSSTQQAEGHSSDCVLKPVAVFPDGARTNGVLVMCEVMMPDGKTPHPTNKRATILDDSGAWFGFEQEYFFYKDGRPLGFPASGYPAPQGPYYTGVGFSNVGDVARKIVEEHLDLCLAAGINHEGINAEVAKGQWEFQIFGKGSKKAADEMWMARYLMLRLTEKYGIDIE

SEQ ID NO: 10355 - protein, 1171 aa, Oryza sativa Indica Group; identical to SEQ ID NO: 6991

SEQ ID NO: 10356 - protein, 198 aa, Bradyrhizobium canariense bv. genistearum
PTPNLRGKTQIKEFASFPTLEQLPLWGFDGSSTQQAEGHSSDCVLKPVAVFPDGARTNGVLVMCEVMMPDGKTPHSTNKRATILDDSGAWFGFEQEYFFYKDGRPLGFPASGYPAPQGPYYTGVGFSNVGDVARKIVEEHLDLCLAAGINHEGINAEVAKGQWEFQIFGKGSKKAADEMWMARYLMLRLTEKYGIDIE

SEQ ID NO: 10357 - protein, 1132 aa, Physcomitrella patens
MSTPKKTYSSTSSAKSKAHSVRVAQTTADAALQAVFEKSGDSGDSFDYSKSVSKSTAESLPSGAVTAYLQRMQRGGLTQSFGCMIAVEGTGFRVIAYSENAPEILDLVPQAVPSVGEMDTLRIGTDVRTLFTASSVASLEKAAEAQEMSLLNPITVNCRRSGKQLYAIAHRIDIGIVIDFEAVKTDDHLVSAAGALQSHKLAAKAITRLQALPGGNIGLLCDTVVEEVRELTGYDRVMAYRFHEDEHGEVVAEIRRADLEPYLGLHYPGTDIPQASRFLFMKNKVRIIADCSAPPVKVIQDPTLRQPVSLAGSTLRSPHGCHAQYMGNMGSIASLVMAVIINDNEEDSHGSVQRGRKLWGLVVCHHTSPRTVPFPLRSACGFLMQVFGLQLNMEVESAAQLREKHILRTQTLLCDMLLRDAPIGIVSQIPNIMDLVKCDGAALYYGKPFWLLGTTPTESQIKDIAEWLLEYHKDSTGLSTDSLADANYPAAHLLGDAVCGMAAAKITAKDFLFWFRSHTAKEIKWGGAKHDPGENHDGRKMHPRSSFKAFLEVVKRRSLPWEDVEMDAIHSLQLILRGSFQDIADSDTKTMIHARLNDLKLHDMDELSVVANEMVRLIETATAPILAVDSNGMINGWNAKIAQVTGLPVSEAHGRSLVKDLVTDESVAVVERLLYLALRGEEEQNVEIKLKTFGTQTEKGVVILIVDACSSIHVSENVVGVCFVGQDVTGQKMFMDKFTRIQGDYKTIVQNPHPLIPPIFGADEFGYCFEWNPAMEGLTGWKKDEVVGKLLVGEIFGMQMMCCRMKSQDAMTKFMIALNTAMDGQSTDKFTFSFFDREGKYVDVLLSTNKRTNADGVITGVFCFLQIASSELQQALKVQRATEKVAVAKLKELAYIVREIKNPLCGLTFTRQLLEDTDLSDDQQQFLDTSAVCEQQLQKSLNDMDLESIEDGYLELDTAEFEMGTVMNAVISQGMTTSREKGLQIFRETPREINTMRLLGDQIRLQQVLSDFLLNTVRFTPSPEGWVKIKVVPTRKRLGGSVHVVHLEFRVSHPGAGLPEELVLEMYDRGKGMTQEGLGLNMCRKLVRLMNGDVHYVREAMQCYFVVNVELPMAQRDDASSQCRSLYSYLLA

SEQ ID NO: 10358 - protein, 113 aa, Drosera tokaiensis
MPGQWEFQVGPSVGISAGNELWVARYILERITEIAGVVLSLDPKPIEGDWNGAGAHTNNSTKSMREEGGYEVIKKAIEKLGLRHKEHIAAYGEGNERRLTGHHETANINTFLW

SEQ ID NO: 10359 - protein, 453 aa, Triticum aestivum
MASSASDPLLPGEPPHRRRFLPPSIRLKTSVWSELGGAVGDLGTYIPIVLALSLASHLDLGTTLIFTALYNFASGVLFGIPMPVQPMKSIAAVALSSAHLTVPQIMGAGIAVAAILLFLGATGLMTRLYRVLPLPVVRGVQLSQGLSFAFTAVKYIRYDQDFSRSSSASTSVERPLLGLDGLLLALAALLFILLTTGSGDDDDAINAADGRATARRRSCGRVPAALIVFAVGLVLCFVRDPSIFRGLRFGPAPLGLVKITWEDFKIGFWQAAVPQLPLSVLNSVIAVCKLSSDLFPEQAELSPARVSVSVGLMNLIGCWFGAMPCCHGAGGLAGQYRFGGRSGASVVFLAIGKLALGLVFGNSFVTILGKFPIGILGVMLLFSGVELAMASRDMGSKEESFVMLVCAGVSLTGSSAALGFIAGVVLHLLLRLREVDCGELVGRLRARRYPWLL

SEQ ID NO: 10360 - protein, 148 aa, Zea mays
LRLTTTSIKLSEDVMKVSIPCKKKCYRLYGKEGYPLVDIMTGEDEPGPKIGERLLCRHPFNESKRAYVVPQHVEELLKCYWPGNSSNSREELPSIHEIRTRCIHHLDRMRPDHMRRLNPTPYKVSVSAKLYDFIHFLWLNEAPVGELQ

SEQ ID NO: 10361 - protein, 246 aa, Zea mays
  misc_feature (216)..(216): Xaa can be any naturally occurring amino acid
  misc_feature (236)..(236): Xaa can be any naturally occurring amino acid
DMGYKAVGIRLDSGDLAYLSVEARKFFHAVEKEFVVVGFGKTSITASNDLNEETIDALNKQGHEVDAFGIGTYLVTCYAQAALGCVFKLVEINKQPRIKLSEDVMKVSIPCKKKCYRLYGKEGYPLVDIMTGEDEPGPKIGERLLCRHPFNESKRAYVVPQHVEELLKCYWPGNSSNSREELPSIHEIRTRCIHHLDRMRPDHMRRLNPTPYKVSXVSAKLYDFIHFLWLNEAPVXRTAMMKMKWR

SEQ ID NO: 10362 - protein, 424 aa, Adiantum capillus-veneris
DLEPYLGLHYPATDIPQASRFLFMKNRVRMICDCRAIPVKVIQDRELRQPLSLAGSTLRAPHGCHSQYMANMGSAASLVMAVLVNDNEEGSSSRSHKPKPRKLWGLVVCHHTNPRAVAFSLRSACEFLMQVFGLQLNMEVELAAQMREKHILRTQTLLCDMLLRDAPIGIVSESPNIMDLVKCDGAALYYGKKFWLLGTTPTEPQIRDLAEWLLDVHRDSTGLSTDSLADAGYPGAAALGDAVCGMAAAKITSRDFLFWFRSHTAKEIKWGGAKHDPEDRDDGRKMHPRSSFKAFLEVVKRRSLPWEDVEMDAIHSLQLILRGSFQDIDDSDTKTMIHARLNDLKLQGMDELSTVANEMVRLIETATAPIFAVDAGGFINGWNAKIAELTGLSVEEAMNRSLVGDLVVEDSAEIVERLLCLALQ

SEQ ID NO: 10363 - protein, 392 aa, Mascagnia anisopetala
DLEPVNPADVPVTAAGALKSYKLAAKAISRLQSLPSGNISLLCDVLVKEVRDLTGYDRVMVYKFHEDEHGEVVSECRRSDLESYLGLHYPATDIPQASRFLFMKNKVRMICDCLAPPVKVIQDERLPQPLSLCGSTLRSPHGCHAQYMTNMGTIASLVMSVTINEDDDMMDGDQQQMTRKLWGLVVCHHTSPRFVPFPLRYACEFLIQVFGVQINKEVELAAQVREKHILQIQTMLCDMLLRDAPVAIITQSPNVMDLVKCDGAALYFKNKTWLLGVTPTEEQIRDIAEWLLDYHSGNTGLSTDSLMEAGYPGASVLGDAVCGMAAVSISSRDFLFWFRSHTAKEIKWGGAKHDPDVKDDGRKMHPRSSFKAFLEVVKWRSMPWEDIEMDAI

SEQ ID NO: 10364 - protein, 284 aa, Echinacea angustifolia
PKSQITPYRVVIIIRLVILGLFFHYRITNPVGSSYGLWLTSVICEIWFAISWVLDQFPKWYPINRITFTDELSARFEKEGEPSQLAAVDFFVSTVDPLKEPPLITANTVLSILAVDYPVEKASCYVSDDGAAMLSFESLVETAEFARKWVPFCKKFSIEPRAPEFYFSQKIDYLKDKVQPSFVKERRAMKRDYEEYKVRVNALVAKAQKTLEEGWTMQDGTPWPGNNTRDHPGMIQVFLGNSGAHDIEGNELPRLVYVSREKRPGYQHHKKAGAENALVRVSAV

SEQ ID NO: 10365 - protein, 513 aa, Gibberella zeae PH-1
MANIIKSALPTHLKPNTGDEQGNERRHGKTRSHMAFENTSTNVAAAQMRNALTNLAETLFETEMDNFFALFRRYLNDKAKGNAVDWDRIAPPAQGQVVDYDDLANTESVQFLNKLAVLKLNGGLGTSMGCVGPKSVIEVRDGMSFLDLSVRQIEYLNRTYDVNVPFILMNSFNTNDDTAAIIKKYEGHNVDILTFNQSRYPRVYKDSLLPVPKDNDSPINEWYPPGHGDVFESLYNSGILDKLLERGIEIVFLSNVDNLGAVVDLRILQHMMETDSEYIMELTNKTKADVKGGTIIDYEGSVRLLEIAQVPKEHVNEFKSIKKFKYFNTNNIWLNLKAIKRVVENDELEMEIIPNGKTIPGDKKGESDISIVQLETAVGAAIRHFNNAHGVNVPRRRFLPVKTCSDLMLVKSDLYTLKHGQLQMSAARFGDAPLIKLGGDFKKVSDFQKRIPSIPKVLELDHLTITGAVNLGRGVTLKGTVIIVATEGSTIDVPPGSILENVVVQGSLRLLEH

SEQ ID NO: 10366 - protein, 392 aa, Mascagnia chasei
DLEPVNPADVPVTAAGALKSYKLASKAISRLQSLPSGNISLLCDVLVKEVRDLTGYDRVMVYKFHEDEHGEVVSECRRSDLESYLGLHYPATDIPQASRFLFMKNKVRMICDCLAPPVEVIQDERLAQPLSLCGSTLRSPHGCHAHYMTNMGTIASLVMAVTINEDDDMMDGDQQQMTRKLWGLVVCHHTSPRFVPFPLRYACEFLIQVFGVQIHKEVELAAQVREKHILQIQTMLCDMLLRDAPVAIIMQSPNVMDLVKCDGAALYFKKKTWLLGVTPTEEQIRDIAEWLLEYHSGNTGLSTDSLMEAGYPGSSALGDAVCGMAAVSITSRDFLFWFRSHTAKEIKWGGAKHDPDVKDDGRKMHPRSSFKAFLEVVKWRSMPWEDIEMDAI

SEQ ID NO: 10367 - protein, 284 aa, Echinacea angustifolia
PKSQITPYRVVIIIRLVILGLFFHYRITNPVESSYGLWLTSVICEIWFAISWVLDQFPKWYPINRITFTDELSARFEKEGEPSQLAAVDFFVSTVDPLKEPPLITANTVLSILAVDYPVDKVSCYVSDDGAAMLSFESLVETAEFARRWVPFCKKFPIEPRAPEFYFSQKIDYLKDKVQPSFVKERRAMKRDYEEYKVRVNALVAKALKTPEEGWTMQDGTPWPGNNTRDHPGMIQVFLGSSGAVDIEGNELPRLVYVSREKRPGYQHHKKAGAENALVRVSAV

SEQ ID NO: 10368 - protein, 175 aa, Zea mays
MEHKEAGCQAPEGPILCINNCGFFGSAATMNMCSKCHKEMITKQDQAKLAASSIDSIVNGSDAVMEPVVAGSNTVVAVAQVELQTMNVQQPADVAGPSEGVAAAISKGGKVGPNRCSACRKRVGLTGFNCRCGNLYCALHRYSDKHDCKFDYRTAARDAIAKANPVVKADKLDKI

SEQ ID NO: 10369 - protein, 392 aa, Mascagnia bracteosa
DLEPVNPADVPVTAAGALKSYKLAAKAISRLQSLPSGNISLLCDVLVKEVRDLTRYDRVMVYKFHEDEHGEVVSECRRSDLESYHGLHYPATDIPQASRFLFMKNKVRMICDCLAPPVKVIQDKRLPQPLSLCGSTLRSPHGCHAQYMTNMGTIASLVMSVTVNEEDDMMDGDQQQMTRKLWGLVVCHHTSPRFVPFPLRYACEFLIQVFGVQINKEVELAAQVREKHILQIQTMLCDMLLRDAPVAIITQSPNVMDLVKCDGAALYFKNKTWLLGVTPTEEQIRDIAEWLLEYHSGNTGLSTDSLMEAGYPGASVLGDAVCGMAAVSITSRDFLFWFRSHTAKEIKWGGAKHDPDDKDDGRKMHPRSSFKAFLEVVKWRSMPWDDVEMDAI

SEQ ID NO: 10370 - protein, 379 aa, Ralstonia eutropha JMP134
MAKRDYYEVLGVGKNASDDEIKKAYRKLAMKYHPDRNPDSKESEEKFKEVKEAYEMLSDAEKKAAYDQYGHAGVDPNMAGGFGGGQGYGGFAEAFGDIFGDIFGQQAGGGRRGGGGPQAYRGADLRYSMEISLEQAAHGHEAQIRVPHWDDCDHCHGNGAEPGSSVETCPTCHGAGQVRVSQGFFSMQQTCPKCHGSGKFIPKPCTKCHGQGKLKSQKTLEVKIPAGIDEGMRIRSSGNGEPGINGGPPGDLYVEVHIKAHPVFERDGDDLHCQMPISFATAALGGDLEVPTLNGKATFPVPEATQSGKTFRLRGKGIKGVRSGYPGDLYVHVNVETPVKLTEAQKDMLRQFDRSVHEGGSRHSPQEQSWLDKVKSFFS

SEQ ID NO: 10371 - protein, 374 aa, Tripterygium regelii
ALSIAGAVQSQKLAVLAISQLQSLQGGDIKLLCDTVVESVRDLTGYDRVMVYKFHEDEHGEVVAESKRPDLEPYIGLHYPATDIPQASRFLFKQNRVRTIVDCHALPVRVIQDDGLMQPLCLVGSTLRAPHGCHAQYMKNMGSMASLAMAVVINGNDEEVIGERNTTRLWALVVCHHTSARCIPFPFRYACEFLMQAFGLQLNMELQLAAQLMEKHVLKTRTLLCDMLLRDPPTGIVTQSPSIMDLVKCDGAALHYQGNYYPLGVTPTEAQIKDIVGWLLDFHGDSTGLSTDSLADAGYPEAALLGDAVCGMAVAYITNRDFLFWFRSHTAKEIKWGGAKHHPEDKDDGQRMHPRSSFKAFLEVVKSRSLPWEN

SEQ ID NO: 10372 - protein, 393 aa, Mascagnia stannea
VIEPVNPADVPVTAAGALKSYKLAAKAISRLQSLPSGNISLLCDVLVKEVRDLTGYDRVMVYKFHEDEHGEVVSECRRSDLESYLGLHYPATDIPQASRFLFMKNKVRMICDCLAPPVEVIQDERLPQPLSLCGSTLRSPHGCHAQYMTNMGTIASLVMSVTINEDDDMMDGDQQQQMTRKLWGLVVCHHTSPRFVPFPLRYACEFLIQVFGVQINKEVELAAQVREKHILQIQTMLCDMLLRDAPVAIITQSPNVMDLVKCDGAALYFKNKTWLLGVTPTEEQIRDIAEWLLEYHSGNTGLSTDSLMEAGYPGASVLGDGVCGMAAVSITSRDFLFWFRSHTAKEIKWGGAKHDPGDKDDGRKMHPRSSFKAFLEVVKWRSMPWEDVEMDAI

SEQ ID NO: 10373 - protein, 368 aa, Acinetobacter sp. ADP1
MAKRDYYEVLGVSKTASDDEIKKAYRKLAMKYHPDRNPDNAEAEDKFKEASEAYEVLSDSEKRSMYDRMGHNAFEGGGGGGFGGFSAEDIFSQFGDIFGGAFGGGGRQQQRQRRGSDLRYVMELSLEEAVRGVKKTITFTAPAPCEVCDGKGSKNPNDVETCRTCHGTGQVRMQQGFFSVQQTCGTCRGQGKIIKNPCQSCHGSGVADRQQTLEVTIPAGVDNGDRVRLSGKGEAVRDGQAGDLYVEVVVREHEIFQRDGADLYMDVPVSIADAALGKEIEIPTLEGRVSLKIPEGTQTGKLFRLRGKGVRPVRSSMVGDLLCRVVVETPVNLTSRQRELFKELQATLDGDEHSSSPKKKSFFDRLFD

SEQ ID NO: 10374 - protein, 392 aa, Hiptage benghalensis
DLEPVNPADVPVTAAGALKSYKLASKAISRLQSLPSGNISLLCDVLVKEVRDLTGYDRVMVYKFHEDEHGEVVSECRRSDLGSYLGLHYPATDIPQASRFLFMKNKVRMICDCLAPPVKVIQDERLPQPLSLCGSTLRSPHGCHAQYMTDMGTIASLVMSVTINEDDDMMDGDQQQMARKLWGLVVCHHTSPRFVPFPLRYACEFLIQVFGVQINKEVELAAQVREKHILQIQTMLCDMLLRDAPVAIITQSPNVMDLVKRDGAALYFKNKTWLLGVTPTEEQIRDIAEWLLEYHSGNTGLSTDSLMEAGYPGASVLGDAVCGMAAVSITSRDFLFWFRSHTAKEIKWGGAKHDPDDKDDGRKMHPRSSFKAFLEVVKWRSMPWEDVEMDAI

SEQ ID NO: 10375 - protein, 371 aa, Tripterygium regelii
ALSIAGAVQSQKLAVLAISQLQSLQGGDIKLLCDTVVESVRDLTGYDRVMVYKFHEDEHGEVVAESKRPDLEPYIGLHYPATDIPQASRFLFKQNRVRTIVDCHALPVRVIQDDGLMQPLCLVGSTLRAPHGCHAQYMENMGSMASLAMAVVINGNDEKVIGGRNTTRLWGLVVCHHTSARCIPFPLRYACEFLMQAFGLQLNMELQLAAQLMEKHVLKTRTLLCDMLLRDSPTGIVTQSPSIMDLVKCDGAALHYQGNYYPLGVTPTEAQIKDIVGWLLDFHGDSTGLSTDSLADAGYPEAALLGDAVCGMAVAYITNRDFLFWFRSHTAKEIKWGGAKHHPEDKDDGQRMHPRSSFKAFLEVVKSRSLP

SEQ ID NO: 10376 - protein, 86 aa, Triticum aestivum
CSDAELRSAYRKLAMKWHPDKCGSGSSGGSEAAKARFQKIQAAYAVLSDPNKRILYDVGAYDSDGDGDDEGGEILGDILEAMHTPP

SEQ ID NO: 10377 - protein, 354 aa, Suillus bovinus
MAYQYHNDLLAPYLALSQGDKVQAEYVWIDGDGGLRSKTMTMTKKTTDIGQLRIWDFDGSSTNQAPGGDSDVYLRPAAIFKDPFRGGDNILVLAETFNNDGTPNRTNHRHHTKKVMDLAKDSVPWFGLEQEYTLFDADGTPFGWPKGGFPGPQGPYYCGAGTGKVFARDLIEAHYRACLYAGVNISGINAEVMPSQWEFQVGPCEGISMGDHLWMARYLLVRIAEQWGIKVSFHPKPLAGDWNGAGCHTNYSTKVMREPGGMKYIDEAIEKLSKRHAEHIAVYGEDNDLRLTGRHETGHIGDFSSGVANRGASIRVPRHVAAQGYGYLEDRRPASNIDPYRVTGIIVETTVLDK

SEQ ID NO: 10378 - protein, 374 aa, Tripterygium regelii
ALSIAGAVQSQKLAVLAISQLQSLQGGDIKLLCDTVVESVRDLTGYDRVMVYKFHEDEHGEVVAESKRPDLEPYIELHYPATDIPQASRFLFKQNRVRTIVDCHALPVRVIQDDGLMQPLCLVGSTLRAPHGCHAQYMENMGSMASLAMAVVINGNDEEVIGGRNTTRLWGLVVCHHTSARCIPFPLRYACEFLMQAFGLQLNMELQLAAQLMEKHVLKTRTLLCDMLLRDSPTGIVTQSPSIMDLVKCDGAALHYQGNYYPLGVTPTEAQIKDIVGWLLDFHGDSTGLSTDSLADAGYPEAALLGDAVCGMAVAYITNRDFLFWFRSHTAKEIKWGGAKHHPGDKDDGQRMHPRSSFKAFLEVVKSRSLPWEN

SEQ ID NO: 10379 - protein, 110 aa, Arachis hypogaea
MLLDKNVIHETHYKVLNVKEDSSYEEIRASYRSAILSLHPDKLLKSSDASGSNQTSGDRFLKVQKAWEVLGDSSSRLFYDSELRSSRRDVSTVDVAEDLSLEDMMAEDDG

SEQ ID NO: 10380 - protein, 211 aa, Arabidopsis thaliana
MVDHYQVLGVTRNATKKEVKDAFRRLAIKYHPDKHAQSPEHVRHNATVRFKLVSEAYEVLNDDLKRASYNAGSDSDCFRRTSGSYSNPYGNRGGRAQGSGYGYGYGYSTRNRQASSFSSGFDSTFRYLTTRAFLLNLALAGGLYFAFTAIDTSGETLWKMRNSGVSIIFSINDRVKLLAVLIILHSCLFLSCDIHTLVFLTGVFFLLMDAF

SEQ ID NO: 10381 - protein, 89 aa, Oryza sativa
  misc_feature (25)..(25): Xaa can be any naturally occurring amino acid
  misc_feature (62)..(62): Xaa can be any naturally occurring amino acid
  misc_feature (71)..(71): Xaa can be any naturally occurring amino acid
GNPARTKPTDPSIELGPKFKKGGWXLGPSKSIFSIVGLAPLKVSGHVGLASSIPLKARVTIXAQPGGKLEXIPDGAVIENKDFKGPRDL

SEQ ID NO: 10382 - protein, 54 aa, Nicotiana sylvestris
VICDAYTPAGEPIPSNKRHKAAQIFSDSKVVSEVPWFGIEQEYTLLQQNVKWPL

SEQ ID NO: 10383 - protein, 54 aa, Nicotiana clevelandii
VICDAYTPAGEPIPTNKRHKAAQIFSDPKVVSQVPWFGIEQEYTLLQQNVKWPL

SEQ ID NO: 10384 - protein, 609 aa, Lindenbergia philippensis
SGKPFYAIIHRVTGSLVIDFEPVKPHEVPMTAAGALQSYKLAAKAITRLQSLPSGSMERLCDTMVQEVFELTGYDRVMIYKFHDDDRGEVLTEITKPGLEPYVGLHYPATDIPQAARFLFMKNKVRMICDCRAINVKVVQDGNLPFDLTLCGSTLRAPHSCHLQYMENMNSIASLVMSVVVNEGDEEASTPDSSLHPDKRKRLWGLVVCHNTTPRFVPFPLRYACEFLAQVFAIHINKEVELENQMLEKNILKTQTLLCDMLLRDAPLGIVNQSPNIMDLVKCDGAMMLYKNQKYRFGLAPNDFQIRDLVSWLDAYHGDSTGLSTDSLYDAGFPGALALGDAVCGMAAVRITDKDWLFWFRSHTAAEIRWGGAKHERGEKDDGRKMHPRSSFKAFLEVVKTRSLPWKDYEMDAIHSLQLILRNASREADKKDLEGMEIHARLNDLQIDGIQELEVTSEMVRLIETASVPIFAVDGDGLVNGWNTKIADLAGLPVEKAIGMHFLDLVEDSSADTVGKMLKLAIQGVEERNVQFEIKTHGPRSDSTPISLVVNACASKDVKENVVGVCFIAQDITTEKSVMDKFTRIEGDYRAIIQNPNPLIPPIFGIDEF

SEQ ID NO: 10385 - protein, 184 aa, Glycine max
MQCYGLTVPGSVPTVSPVFLRPNRPIIATRIAFPKATLNKNQGFVVELSFYELLGIPESVSVTEIKNAYKQLARKYHPDVSPPGRVEEYTKRFIQVQEAYETLSDPSRRAMYDKDMARGINLAFNARRRYNYHDQVVEQKSEWKVRWKSQLSELKRRSNSKDVGGNMSWAARMRQQRDELSNES

SEQ ID NO: 10386 - protein, 54 aa, Nicotiana clevelandii
VICDAYTPAGEPIPTNKRHKAAQIFSDSKVVSEVPWFGIEQEYTLLQQNVKWPL

SEQ ID NO: 10387 - protein, 199 aa, Oryza sativa Japonica Group
MVKLTMIARVTDDLPLVEGLDDGRDLKDADFYKQQAKLLFKNLSKGQHEASRMSIETGPYLFHYIIEGRVCYLTMCDCSYPKKLAFQYLEDLKNEFERVNGNQIETAARPYAFIKFDTFIQKTKKLYLDTRTQRNLAKLNDELYEVHQIMTRNFQEVLGVGEKLDHEFAFAPYLCYAASFIIVFSTMDLSMISVHMRLT

SEQ ID NO: 10388 - protein, 76 aa, Nicotiana corymbosa
GNNILVICDAYTPAGEPIPTNKRHKAAQIFSDSKVVSEVPWFGIEQEYTLLQQNVKWPLGWPVGGYPGPQGPYYCG

SEQ ID NO: 10389 - protein, 345 aa, Triticum aestivum
MGVDYYKVLGVDRGASDDDLKKAYRKLAMRWHPDKNPTTKKEAEAKFKQISEAYEVLSDFQKRTIYDQLGEEGLKGQPPPGAGGPGASSFYPGGGQSTSFHFNPRSADDIFAEFFGFSGPSFLGGMPGGSMRGEPRSYGGGVFSNEYLAKRFAEGSAGNMPRPSHKPAPIENQLSVTLADLYKGVAKKMKISREVIETSGRVSQVEEILTIDVKPGWKKGTKITFPEKGNESPSMMPADIVFIIEEKPHDVFTREGNDLVMTQKISLVEALTGYTVQLTTLDGRSLSRQVNSVIHPSYEEVIPGEGMPIPKEPCKKGNLRVKFSIKFPSRLTSDQKAGIKRLLGS

SEQ ID NO: 10390 - protein, 198 aa, Bradyrhizobium canariense bv. genistearum
PTPNLRGKTQIKEFASFPTLEQLPLWGFDGSSTQQAEGHSSDCVLKPIAVFPDGARTNGVLVMCEVMMPDGKTPHSTNKRATILDDSGAWFGFEQEYFFYKDGRPLGFPASGYPAPQGPYYTGVGFSNVGDVARKIVEEHLDLCLAAGINHEGINAEVAKGQWEFQIFGKGSKKAADEMWMARYLMLRLTEKYGIDIE

SEQ ID NO: 10391 - protein, 1151 aa, Populus trichocarpa
MASQSQRQSNQRQHQNQAAQSSGTSNMRQHHHATESVSKAIAQYTVDAQLHAVFEQSGGSGKSFDYSQSVRTTSQSVPEEQITAYLSKIQRGGHIQPFGCMIAVDEGSFRVIAYSENAKEMLGLTPQSVPSLDKQEILSDGTDVRTLFRPSSSAMLEKAFGAREIILLNPIWIHSKNSGKPFYAILHRIDVGIVIDLEPARTEDPALSIAGAVQSQKLAVRSISQLQSLPGGDIKLLCDTVVESVRELTGYDRVMVYKFHEDEHGEVVAENKRADLEPYIGLHYPSTDIPQASRFLFKQNRVRMIVDCHATPVRVIQDEALMQPLCLVGSTLRAPHGCHAQYMANMGSIASLAMAVIINGNEEEAIGGRNSTRLWGLVVCHHTSARCIPFPLRYACEFLMQAFGLQLNMELQLASQLSEKHVLRTQTLLCDMLLRDSPTGIVTQSPSIMDLVKCDGAALYYQGQYYPLGVTPTEAQIKDIVEWLLALHGDSTGLSTDSLADAGYPGAASLGNAVCGMAVAYITKRDFLFWFRSHTAKEIKWGGAKHHPEDKDDGQRMHPRSSFKAFLEVVKSRSLLWENAEMDAIHSLQLILRDSFRDVEATNSKAVVHAQLEDTELQGMDELSSVAREMVRLIETATAPIFAVDVDGCINGWNAKVAELTGLSVDKAMGKSLVHDLVYKEYEETVDKLLHRALRGEEDKNVEIKLRTFGSEHQKKALFVVVNACSSKDYMNNIVGVCFVGQDVTGQKVVMDKYVHIQGDYKAIVHSPNPLIPPIFASDENTCCLEWNTAMEKFTGWSRGEVIGKMLVGEVFGSCCQLKGSDALTKFMIALHNAIGGQDTDKLPFSFFDRNGKYVQALLTANKRVNMEGEIVGAFCFLQIASNELQQALKVQRQQEKKCSARMKELAYICQEIRNPLSGLRFTNSLLENTDLTEDQKQFLETSAACEKQILKITRDVDLESIENGLLELEKAEFLFGSVINAVVSQAMLLLRERNLQLLRDIPEEIKTLVVYGDQARIQQVLADFLLNMVRYAPSSAGWVEIHVCPTLKQISDGHTLVHMEFKYALLNSFACLPPELVQDMFHSSRWVTQEGLGLSMCRKILKLMNGEVQYIRESERCYFLVILEVPMPNKCERYNCKKCCRLGCLVCNVY

SEQ ID NO: 10392 - protein, 428 aa, Brassica napus; identical to SEQ ID NO: 9432

SEQ ID NO: 10393 - protein, 1146 aa, Populus trichocarpa
MASQSQRQSNQPVHNQAQSSGTSNMRQHHHATESVSKAIAQYTVDAQLHAVFEQSGGTGRSFDYSKSVRTTNQSVPEQQITAYLSKIQRGGHIQPFGCMIAADEQSFRVIAYSENAKDMLGLTPQSVPSLEKQEILFVGADVRILFRPSSAVLLEKAFGAREITLLNPIWIHSKNSGKPFYAILHRIDVGIVIDLEPARTEDPALSIAGAVQSQKLAVRAISQLQSLPGGDIKLLCDTVVDSVRELTGYDRVMVYKFHEDEHGEVVAENKRVDLEPYIGLHYPSTDIPQASRFLFKQNRVRMIVDCHAIPVRVIQDEALMQPLCLVGSTLRAPHGCHAQYMENMGSIASLAMAVIIYGNDEEAIGGRNSMRLWGLVVCHHTSARCIPFPLRYACEFLMQAFGLQLNMELQLASQLLEKHVLRTQTLLCDMLLRDSPTGIVTQSPSIMDLVKCDGAALYYQGQYYPLGVTPTETQIKDIVEWLLTLHGDPTGLSTDSLADAGYPGAAFLGDAVCGMAVAYIAERDFLFWFRSHTAKEVKWGGAKHHPEDKDDGQRMHPRSSFKAFLEVVKSRSLPWENAEMDAIHSLQLILRDSFRDAEATNSKAVVHTQLKDMELQGMDELSSVAREMVRLIETATAPIFAVDVDGRINGWNAKVAELTGLSVEEAMGKSLVHDLVYKEYEEIVDKLIHRAVKGEEDKNVEIKLRTFCSEHQKKAVFVVVNACSSKDYMDNIVGVCFVGQDITGQKVVMDKYVLIQGDYKAIVHSPNPSIPPIFASDENTCCLEWNTAMEKLTGWSRGEVVGKMLVGEVFGSCCRLKGPDALTKFMIALHNAIGGIDTDKLPFSFFDRNEKNVQTLLTANKRVNMEGDIIGAFCFLQIASPELQQTLKVQKQQEKKSFARMKELAYICQEIKNPLSGIHFTNSLLENTDLTEDQQQFLETSAACEKQILKIIRDIDLESIENGSLELEKAEFLLGSVINAVVSQAMLLLRERNLQLLRDIPEEIKTLAVYGDQARIQQVLADFLLNMVRYAPSSAGWVEIHVCPTLKQISDGHTLVHTEFKYLERVLQTRMLGLQHPLRSFLNFKLTLVMLHREGMVPKIQFQGLSVCQGRLIWLSYPENTTVTLYPLTIWFLLLYRRQSRSITHT

SEQ ID NO: 10394 - protein, 370 aa, Debaryomyces hansenii CBS767
MVSITEQTAILAKYLDLSQNGKVLAEYVWIDADGNSRSKCKTLDKKPSSVEDLPEWNFDGSSTGQAPGHDSDVYLRPVAFYADPFRKGDNIIVLTECWNNDGTPNKFNHRHESAKLMKAHADEEVWFGLEQEYTLFDQFDQPYAWPKGGFPAPQGPYYCGVGTGKVYARDLIEAHYRACLHAGVDISGINAEVMPSQWEFQVGPCEGIQMGDELWIARYLLQRVAEEFGVKVSFHPKPLKGEWNGAGCHTNVSTKSMRLPGGMKSIEVALSKLAKRHKEHMLLYGADNDQRLTGRHETASIEGFSSGVANRGASVRIPRSVAKEGYGYFEDRRPASNIDPYLVTGIMVETICGSIPDADMFKEYARESSD

SEQ ID NO: 10395 - protein, 284 aa, Lactuca sativa
PKSQITPYRVVIIIRLVILGLFFHYRITNPVESSYGLWLTSVICEIWFAISWVLDQFPKWYPTNRITFTDELSARFKKEGEPSQLAAVDFFVSTVDPLKEPPLITANTVLSILAVDYPVEKVSCYVSDDGAAMLSFESLVETAEFARKWVPFCKKFSIEPRAPEFYFSQKIDYLKDKVQPSFVKGRRAMKRDYEEYKVRVNALVAKAQKTPEEGWTMQDGTPWPGNNTRDHPGMIQVFLGNSGAHDIEGNELPRLVYVPREKRLGYQHHKKAGAENALVRVSAV

SEQ ID NO: 10396 - protein, 432 aa, Glycine max; identical to SEQ ID NO: 7653

SEQ ID NO: 10397 - protein, 371 aa, Bacillus cereus ATCC 10987
MSKRDYYEVLGLSKGASKDEIKKAYRRLAKKYHPDVSKEENAIEKFKEVQEAYEVLSDDQKRAQYDQFGHAGANQGFGGFGGGGDFGGGFGFEDIFSSFFGGGGGRRRDPNAPRQGADLQYQVTLDFEEAIFGKELNVEIPVEDPCDTCKGSGAKPGTSKETCKHCSGSGQVSVEQNTPFGRIVNRQACGHCSGTGQIIKEKCTTCHGSGKVRKRKKINVKIPAGIDNGQQIRVSGKGEAGVNGGPAGDLYVVVHVRNHEFFEREGDHIICEMPLTFAQMALGDEVEVPTVHGKVKLKIPAGTQTGTEFRLKGKGAPNVRGYGQGDQYVVVRVVVPTKLTSQQKDLLREFAGQEEQDDSLFGKLKRAFKGE

SEQ ID NO: 10398 - protein, 284 aa, Lactuca sativa
PKSQITPYRVVIIIRLVILGLFFHYRITNPVESSYGLWLTSVICEIWFAISWVLDQFPKWYPINRITFTDELSARFEREGEPSQLAAVDFFVSTVDPLKEPPLITANTVLSILAVDYPVEKVSCYVSDDGAAMLSFESLVETAEFARKWVPFCKKFSIEPRAPEFYFSQKIDYLKDKVQPSFVKERRAMKRDYEEYKVRVNALVAKAQKTLEEGWTMQDGTPWPGNNTRDHPGMIQVFLGNSGAHDIEGNELPRLVYVSREKRPGYQHHKKAGAENALVRVSAV

SEQ ID NO: 10399 - protein, 296 aa, Legionella pneumophila subsp. pneumophila str. Philadelphia 1
MDKDYYKIMGVSQDASEKDIKMAYRKLARKYHPDISKEPDAEERFKEMAEAYEVLKDPKKRSEYDQYLKYKEFNPQSDGFTGRRTQEQPFQEFHFDSDFFETLFGHSRYQQQPMTGQNYHGKITISLEEAYHGAVKNLQVPVEQGTETKIQTLKVKIPAGVKSGQQIRLAGQGGSGSGGGARGDLYLTVEVMKHPIFDVMENDIYLTLPVTPWEAALGATVVIPTLAGKIDLKIPPGSQGGQKLRIKNRGLPGSPPGNQYVLLKIITPPAQTEEAKALYKKMAEVMPYNPRKTMGV

SEQ ID NO: 10400 - protein, 284 aa, Jacobaea maritima
PKSQITPYRVVIIVRLVILGLFFHYRITNPVESSYGLWLTSVICEIWFAISWVLDQFPKWYPINRITFTDELSARFEKEGEPSQLAAVDFFVSTVDPLKEPPLITANTVLSILAVDYPVDKVSCYVSDDGAAMLSFESLVETAEFARKWVPFCKKFSIEPRAPEFYFSQKIDYLKDKVQPSFVKERRAMKRDYEEYKVRVNALVAKAQKTPEEGWTMQDGTPWPGNNTRDHPGMIQVFLGNSGAHDIEGNEPPRLVYVSREKRPGYQHHKKAGAENALVRVSAV

SEQ ID NO: 10401 - protein, 372 aa, Photorhabdus luminescens subsp. laumondii TTO1
MAKRDYYEVLGVSKTASEKEIKKAYKRLAMKYHPDRNQGDKEAESQFKEVKEAYEILTDDQKRAAYDQYGHAAFEQGGMGGGGADFSDIFGDVFGDIFGGGRRQQRPSRGADLRYSMELTLEEAVRGVTKEIRIPTLETCDICHGSGAKAGTSPVTCSTCQGAGQVHMRQGFFTVQQPCPHCHGRGQIIKDSCHKCHGHGRVERYKTLSVKIPAGVDTGDRVRLSGEGEAGAKGAPAGDLYVQVQVKSHHIFERQESNLYCEVPVNFAMAALGGEIEVPTLDGRVKLKIPAETQTGKMFRMKGKGVKSVRGGVQGDLLCRVVVETPVKLNERQKELLRELGESFGGAGEETNSPRSKSFFDGVKKFFDDLTK

SEQ ID NO: 10402 - protein, 102 aa, Zea mays
IEGSKSQTLTDEGVEPHETGAKTAEEREETKKLQEKHAALKPNGGNGTTKGCTGTKNDKEVRNGHTKPDPMENQKETQNKKKGSKDPKPPKKRGNTHDDTQK

SEQ ID NO: 10403 - protein, 392 aa, Callaeum septentrionale
DLEPVNPADVPVTAAGALKSYKLAAKAISRLQSLPSGNISLLCDVLVKEVRDLTGYDRVMVYKFHEDEHGEVVSECRRSDLESYLGLHYPATDIPQASRFLFMKNKVRMICDCLAPPVKVIQDERLPQPLSLCGSTLRSPHGCHAQYMTNMGTIASLVMSVTINEDDDMMDGDQQQMTRKLWGLVVCHHTSPRFVPFPLRYACEFLIQVFGVQINKEVELAAQVREKHILQIQTMLCDMLLRDAPVAIITQSPNVMDLVKCDGTALYFKNKTWLLGVTPTEEQIRDIAEWLLEYHSGNTGLSTDSLMEAGYPGASVLGDAVCGMAAVSITSRDFLFWFRSHTAKEIKWGGAKHDPDEKDDGRKMHPRSSFKAFLEVVKWRSMPWEDIEMDAI

SEQ ID NO: 10404 - protein, 284 aa, Jacobaea maritima
PKSQITPYRVVTIVRLVILGLFFHYRITNPVESSYGLWLTSVICEIWFAISWVLDQFPKWYPINRITFTDELSARFEKEGEPSQLAAVDFFVSTVDPLKEPPLITANTVLSILAVDYPVDKVSCYVSDDGAAMLSFESLVETAEFARKWVPFCKKFSIEPRAPEFYFSQKIDYLKDKVQPSFVKERRAMKRDYEEYKVRVNALVAKAQKTPEEGWTMQDGTPWPGNNTRDHPGMIQVFLGNSGAHGIEGNELPRLVYVSREKRPGYQHHKKAGAENALVRVSAV

SEQ ID NO: 10405 - protein, 244 aa, Arabidopsis thaliana; identical to SEQ ID NO: 7790

SEQ ID NO: 10406 - protein, 371 aa, Tripterygium regelii
ALSIAGAVQSQKLAVLAISQLQSLQGGDIKLLCDTVVESVRDLTGYDRVMVYKFHEDEHGEVVAESKRPDLEPYIGLHYPATDIPQASRFLFKQNRVRTIVDCHALPVRVIQDDGLMQPLCLVGSTLRAPHGCHAQYMENMGSMASLAMAVVINGNDEEVIGGRNTTRLWGLVVCHHTSARCIPFPLRYACEFLMQAFGLQLNMELQLAAQLMEKHVLKTRTLLCDMLLRDSPTGIVTQSPSIMDLVKCDGAALHYQGNYYPLGVTPTEAQIKDIVGWLLDFHGDSTGLSTDSLADAGYPEAALLGDAVCGMAVAYITNRDFLFWFRSHTAKEIKWGGAKHHPEDKDDGQRMHPRSSFKAFLEVVKSRSLP

SEQ ID NO: 10407 - protein, 392 aa, Mascagnia hippocrateoides
DLEPVNPADVPVTAAGALKSYKLAAKAISRLQSLPSGNISLLCDVLVKEVRDLTGYDRVMVYKFHEDEHGEVVSECRRSDLESYLGLHYPATDIPQASRFLFMKNKVRMICDCLAPPVKVIQDERLPQPLSLCGSTLRSPHGCHAQYMTNMGTIASLVMSVTINEDDDMMDGDQQQMTRKLWGLVVCHHASPRFVPFPLRYACEFLIQVFGVQINKEVELAAQVREKHILQIQTMLCDMLLRDAPVAIITQSPNVMDLVKCDGAALYFKNKIWLLGVTPTEEQIRDIAEWLLEYHSGNTGLSTDSLMEAGYPGASVLGDAVCGMAAVSITSRDFLFWFRSHTAKEVKWGGAKHDPHDKDDGRKMHPRSSFKAFLEVVKWRSMPWEDIEMDAI

SEQ ID NO: 10408 - protein, 284 aa, Jacobaea maritima
PKSQITPYRVVIIVRLVILGLFFHYRITNPVESSYGLWLTSVICEIWFAISWVLDQFPKWYPINRITFTDELSARFEKEGEPSQLAAVDFFVSTVDPLKEPPLITANTVLSILAVDYPVDKVTCYVSDDGAAMLSFESLVETAEFARKWVPFCKKFSIEPRAPEFYFSQKIDYLKDKVQPSFVKERRAMKRDYEEYKVRVNALVAKAQKTPEEGWTMQDGTPWPGNNTRDHPGMIQVFLGNSGAHDIEGNELPRLVYVSREKRPGYQHHKKAGAENALVRVSAV

SEQ ID NO: 10409 - protein, 360 aa, Wimmeria acuminata
AVQSQKLAVRAISQLQSLPGGDIKLLCDTVVESVRHLTGYDRVMVYKFHEDEHGEVVAERKRPDLEPYIGLHYPATDIPQASRFLFKQNRVRTIVDCHASPVRVIQDDGLMQPLCLVGSTLRAPHGCHAQYMENMGSIASLAMAVIINGNDEEVIGVRNATRLWGLVVCHHTSARCIPFPLRYACEFLMQAFGLQLNMDLQLAAQLSEKHVWKTRTLLCDMLLRDSPAGIVTQSPSIMDLVKCDGAALYYQGNYYPLGVTPTEAQITDIVGWLLDFHGDSTGLSTDSLADAGYPGAALLGDAVCGMAVAYITNRDFLFWFRSHTAKEIKWGGAKHHPEDRDDGQRMHPRSSFQAFLEVVK

SEQ ID NO: 10410 - protein, 392 aa, Hiraea fagifolia
DLEPVDPADVPVTAAGALKSYKLAAKAISRLQSLPSGNISLLCDVLVKEVRDLTGYDRVMVYKFHEDEHGEVVSECRRPDLESYLGLHYPATDIPQASRFLFMKNKVRMICDCLAPPVKVIQDKRLPQPLSLCGSTLRSPHGCHAQYMTNMRTIASLVMSVTINEDDDTMDGDQQQMTGKLWGLVVCHHTSPRFVPFPLRYACEFLIQVFGVQINKEVELAAQVREKHILQIQTMLCDMLLRDAPVAIITQSPNVMDLVKCDGAALYFKNKIWLLGVTPKEEQIRDIAEWLLEYHSGNTGLSTDSLMEAGYPGASVLGDAVCGMAAVSITSRDFLFWFRSHTAKEIKWGGAKHDPGDKDDGRKMHPRSSFKAFLEVVKWRSMPWEDVEMDAI

SEQ ID NO: 10411 - protein, 219 aa, Picea sitchensis
MVKLTMIARVTDGLPLAEGLDDGREQRDVEFYKQQAKSLFKKLSQGQNEPSRMSIESGPYVFHYIIESRVCYLTMCDRSYPKKLAFQYLEDLKNEFEKGNHSQIETVARPYAFIKFDTFIQKTRKLYLDTHTQRNLAKLNDDLYEVQQIMTRNIKEVLGVGEKLDQVSEMSSRLSSESRIYAHKAKDLSRQALIKKWAPVAIVLGVVLVMLLMRSYIWQ

SEQ ID NO: 10412 - protein, 392 aa, Ectopopterys soejartoi
DLEPVNPADVPVTAAGALKSYKLAAKAISRLQSLPSGNISLLCDVLVKEVRDLTGYDRVMVYKFHEDEHGEVVSECRRSDLESYLGLHYPATDIPQASRFLFMKNKVRMICDCMAPPVEVIQDERLPQPLSLCGSTLRSPHGCHAQYMTNMGTTASLVMSVTINEDDHMMDGDQQQMTKKLWGLVVCHHTNPRFVPFPLRDACEFLIQVFGVQINKEVELAAQVREKHILQIQTMLCDMLLRDAPVAIITQSPNVMDLVKCDGAALYFKNKTWLLGVTPTEEQIRDIAEWLLEYHSGNTGLSTDSLMEAGYPGASALGDAVCGMAAVSITSRDFLFWFRSHTAKEIKWGGAKHDPDDKDDGRKMHPRSSFKAFLEVVKWRSMPWEDVEMDAI

SEQ ID NO: 10413 - protein, 374 aa, Wimmeria concolor
ALSIAGAVQSQKLAVRAISQLQSLPGGDIKLLCDTVVESVRHLTGYDRVMVYKFHEDEHGEVVAERKRPDLEPYIGLHYPATDIPQASRFLFKQNRVRTIVDCHASPVRVIQDDGLMQPLCLVGSTLRAPHGCHAQYMENMGSIASLAMAVIINGNDEEVIGVRNATRLWGLVVCHHTSARCIPFPLRYAWEFLMQAFGLQLNMELQLAAQLSEKHVWKTRTLLCDMLLRDSPTGIVTQSPSIMDLVKCDGAALYYQGNYYPLGVTPTEAQITDIVGWLLDFHGDSTGLSTDSLADAGYPGAALLGDAVCGMAVAYITNRDFLFWFRSHTAKEIKWGGAKHHPEDRDDGQRMHPRSSFQAFLEVVKSRSLPWEN

SEQ ID NO: 10414 - protein, 293 aa, Oryza sativa Japonica Group
MAGMDPTGGGGGGGVAAHYLHMLRAQQHQPLSPAGDVKAERSMLSPDESPGADADLGSDHPTSSAMVAAEDSGGGSAPTRSTPTSSRSPREPTSSSASASSGRRRGRGVSVLSGGGAVANVALRQPGASPPGSLVATMRGQFEILSLTGTVLPPPAPPSASGLTVFLSGGQGQVVGGSVAGQLIAAGPVFLMAASFANAVYERLPLDGEDPEAEAAAATPPGDAAQPTGPPPPQQQPTASQSSEVTAGDGGGGGGLGMYLGGHVGSYQQQQQQLPGPGDNFGSWSGSIRPPPF

SEQ ID NO: 10415 - protein, 378 aa, Magnetococcus sp. MC-1
MSKDLYEILGVSKGANDAEIKAAYRKLAMKLHPDRNPGNDAAEAQFKEVNAAYEVLKDPQKRTIYDQYGHAGLGQGGPGGPGGFGGQGGAGFGDIFEEFFGDIFGGGRQTRGGGRSGARQGEDYRYDLRVTLEEVARGVEKRVRIPSMSTCDTCHGSGARSGSKPTTCTTCGGAGQIRTQQGFFQVQRACHVCHGKGQIISDPCPDCGGAGRQKKEKTLTVKIPPGVDTGTRIRLSGEGGAGIQGGPAGDLYIITEVEPHSMFERYGVDLLCVVPITFPQAALGAKLEVPTLNGKARITLPAGSQTGKRLVLRSKGLPHLNRPGMLGDLVVEVRVETPVKLTTKQKELLEEFDRCGDPDSQPDSVGFFDKVKEFLGGN

SEQ ID NO: 10416 - protein, 374 aa, Zinowiewia concinna
ALSIAGAVQSQKLAVRAISQLQSLPGGDIKLLCDTVVETVRVLTGYDRVMVYKFHEDEHGEVVAESKRPDLEPYIGLHYPATDIPQASRFLFKQNRVRMIVDCHATPVSVIQDAGLMQPLCLVGSTLRAPHGCHAQYMENMGSIASLAMAVIINGNDEEGIGGRNTTRLWGLVVCHHTTARCIPFPLRYACEFLLQALGLQLNMELQLAAQLSEKHVLRTQTLLCDMLLRDSHTGIVTQSPSIMDLVKCDGAALYYQGKYYPLEVTPTEAQIKDIVEWVLAFHGDSTGLSTDSLADAGYPGAASLGDAVCGMAVAYITDRDFLFWFRSNTAKEIKWGGAKHHPEDKDDGQRMHPRSSFKAFLEVVKSRSLPWEN

SEQ ID NO: 10417 - protein, 392 aa, Stigmaphyllon paralias
DLEPVNPADVPVTAAGALKSYKLAAKAISRLQSLPSGNISLLCDVLVKEVRDLTGYDRVMVYKFHEDEHGEVVSECRRSDLESYLGLHYPATDIPQASRFLFMKNKVRMICDCLAPPVKVIQDERLPQPLSLCGSTLRSPHGCHAQYMTNMGTIASLVMSVTINEDDDTMDGDQQQMTRKLWGLVVCHHTSPRFVPFPLRYACEFLIQVFGVQINKEVELAAQIREKHILQIQTMLCDMLLRDAPVAIITQSPNVMDLVKCDGAALYFKNKTWLLGVTPTEEQIRDIAQWLLEYHSGNTGLSTDSLMEAGYPGASALRDAVCGMAAVSITSRDFLFWFRSHTAKEVKWGGAKHEPDDKDDLRKMHPRSSFKAFLEVVKWRSMPWEDVEMDAI

SEQ ID NO: 10418 - protein, 371 aa, Bacillus anthracis str. Ames
MSKRDYYEVLGLSKGASKDEIKKAYRRLAKKYHPDVSKEENAIEKFKEVQEAYEVLSDDQKRAQYDQFGHAGANQGFGGFGGGGDFGGGFGFEDIFSSFFGGGGGRRRDPNAPRQGADLQYQVTLEFEEAIFGKELNVEIPVEDPCDTCKGSGAKPGTSKETCKHCSGSGQVSVEQNTPFGRIVNRQACSHCSGTGQMIKEKCTTCHGSGKVRKRKKINVKIPAGIDNGQQIRVSGKGEAGVNGGPAGDLYVVVHVRSHEFFEREGDHIICEMPLTFAQMALGAEVEVPTVHGKVKLKIPAGTQTGTEFRLKGKGAPNVRGYGQGDQYVVVRVVVPTKLTSHQKDLLREFAGQEEQDDSLFGKLKRAFKGE

SEQ ID NO: 10419 - protein, 374 aa, Zinowiewia concinna
ALSIAGAVQSQKLAVRAISQLQSLPGGDIKLLCDTVVETVRVLTGYDRVMVYKFHEDEHGEVVAESKRPDLEPYIGLHYPATDIPQASRFLFKQNRVRMIVDCHATPVSVIQDAGLMQPLCLVGSTLRAPHGCHAQYMENMGSIASLAMAVIINGNDEEGIGGRNTTRLWGLVVCHHTTARCIPFPLRYACEFLLQALGLQLNMELQLAAQLSEKHVLRTQTLLCDMLLRDSHTGIVTQSPSIMDLVKCDGAALYYQGKYYPLEVTPTEAQIKDIVEWLLAFHGDSTGLSTDSLADAGYPGAASLGDAVCGMAVAYITDRDFLFWFRSNTAKEIKWGGAKHHPEDKDDGQRMHPRSSFKAFLEVVKSRSLPWEN

SEQ ID NO: 10420 - protein, 1118 aa, Cyrtosia septentrionalis
  misc_feature (1003)..(1003): Xaa can be any naturally occurring amino acid
MSFSRPSQSSSASSRSRQSARIIAQTTVDAKLDAEFDAMGTCFDYSQSIRAPPDEQRSEKVTAYLQHIQRGKLIQPFGCLLALDEKTFKVLAFSENAPEMLTMVSFTVPSVGDHPTIVIGTDVRNLFTSPSTAALQKALGFAEVSLLNPILVHCKSSGRPFYAIVHRVTGCLIVDFEPVKPNDVPMTAAGALQSYKLAAKAISKLQSLPSGSMEKLCNTVIEEVFELTGYDRVMVYKFHEDDHGEVFAEITKPGLESYFGLHYPATDIPQAARFLFMKNKVRMICDCHAKHVKVYQDKKLPFDISFCGSTLRAPHSCHLQYMENMNSIASLVMAVVVNEGEEDGGNEAEENSPPHRRKRLWGLVVCHNESPRFVPFPLRYACEFLMQVFAIHVNKEFELENLVKEKKIMRTQTMLCDMLLREFVPLGIITQTPNIMDLVKCDGAAFLYQDKIWRLGVTPSEPQIYDIVHWLSACHMDSTGLSTDNLHEAGYPGISSLGDVVCGMAVARITSKDMLFWFRSPAAASIRWGGAKHDAADKDDGRRMHPRSSFKAFLEVAKVRSLPWGDHEMNAIHSLQLILRDTLNGIENKAIIDPQLNELKLEGMVEVVTNEMVRLIETATVPILAVDADGLINGWNMKIAQLTGLSDDEARGKHLLTIVEDSSIDVVKRMLLLALQGIEEQNVQFQVKTSGVRRDDGPLILVVNACVSRDIHSNVVGACFVAQDVTGQKFILDKFTKIEGDYKAIVQNPCPLIPPIFGTDEFGWCSEWNLAMTKLSGWKRDEVMDKMLLGEVFGINTSCCRMKSQDALVNFSILISNAFSGQETEKSPFSFMNRSGKHVDCLLSVSRKVDVEGNLTGIFCFVLATGHELQQSQPLVQQETVKRMKALAYIRNEIRNPLSGIMYTRKMLVGTNLDEEQSLLLSTGAKCHNQLNRILEDLNLEDIMNSCLELEMNEFNLKDVVLTAVSQVMLPSEGKGVNVVYDLPDGLLSEYVYGDSLRLQQIXADFLLVCVKYSPDGAQVEITANLKKNTLGKSLQLIHVEIRITHAGNGVAEELLSEMFGSKEETSEEGMSLMVCRKLLRLMNGDVCYLREANKSVFILSAELACASKQPKDVKAAV

SEQ ID NO: 10421 - protein, 458 aa, Chlamydomonas reinhardtii
MAGSKKKKSEPSGPDLYAELSVAKNASTEEIKKAYRRLALQCHPDKNPGDAAAHERFQKISVAYSVLSDDGKRRYYDQTGTTEGLDISPDEFMDMFQSLLLEIVGGADMIRDMLSCFTPRELARLPPFPFPKELFPPGTFPEGLRFSSKGLKGMPPQEWIAAARGGDVGALCGMLAASPGLLGARCRGMGHTALHWAAAKGEVEGVEWLLRQGLDVNVRNGDGATPLHAAARNGRMEQKQRRRPQRHLQRRTRLSQRPSPHVLLLPKGQGTSLSFTAHSALHWAVAKGHLHVARWLLEQGADPDALNASDAAPLHTAAGQGAADCARLLVLEAGARMGLANELELLARVAAMRDAPGGEADWAPRAMRTVLAAAGISTAGMLERQELVAACRQLIASNRAAAYCGMSYFGKGQADAEEAVRLDPGQPKYRCRRGPDPTPRTLTYHATTYVLRCASHTT

SEQ ID NO: 10422 - protein, 182 aa, Glycine max
MSTSVLPSLLFFLVLILLLLDPSEPENVAIYWGQNADEGTLNETCATGTYSHVIIAFLSTFGNGQTPQLSLADHCDPSTNGCTKIGREIKNCQEQGITVMLSIGGGSGNYSITSDEDANNVSNYLWDNFFGGFFSSRPFGDAVLEGLDFDIALGDNTSFMAKFAQYLQIKFRFHRTIPTNNL

SEQ ID NO: 10423 - protein, 76 aa, Nicotiana acuminata
GNNILVICDAYTPAGEPIPTNKRHKAAQIFNDSKVVSEVPWFGIEQEYTLLQQNVKWPLGWPVGGYPGPQGPYYCG

SEQ ID NO: 10424 - protein, 605 aa, Melampyrum pratense
SGKPFYAIIHRLTASLIIDFEPVKPHEVPMTAAGALQSYKLASKSIARLQSLPGGSMERLCETMAQEVFELTGYDRVMVYKFHEDDHGEVLTEITKPGLEPYVGLHYPATDIPQASRFLFMKNKVRTICDCRANHVRVIQDENLPVDLTLCGSTLRAPHSCHLQYMENMNSIASLVMSVVVNEGNEDAGPDDSSLDKRQRLWGLVVCHNTSPRFVPFPLRYACEFLAQVFAINVNKELELENQMFEKNILRTQTLLCDMLLRDAPLGIVSHSPNVMDLVKCDGAILLHKNQKHRLGMTPNDSQFRDIVSWLEEYHRDSTGLSTDSLYDAGFPGALDLGDVVCGMAAVRISDEDWLFWFRSHTASEIRWGGARHESCERDDGQKMHPRSSFKAFLEVVKSRSLPWKDFEMDAIHSLQIILRNASSKETEERKEVGVQIQARLNELQIDGVQELEAVTSEMVRLIETASVPIFAVDVDGLVNGWNTKIADLTGLPADKAIGMHFLSLVEESSIEAVSKMLELALDGKEEQNVHFEIKTHGPSPISLIVNACASRDVKENVVGVCFIAHDITTQKSVMDMFTRIEGDYRAIVQNPNPIIPPIFGTDVF

SEQ ID NO: 10425 - protein, 302 aa, Triticum aestivum
MSLNDMGRRLALVIVCCILLSSLRTAAATGKTGRITVYWGQTSSEGSLREACESNLYSTVILSFLTNFGRGKYELNLAGHPWKAVGPHVKYCQSKKILVLLAIGGGIGKYSLASRADAKKVAEHLWNYYLGGKSRDRPFGNAVLDGIDFDIELGSRAHYDDLARHLKAYGDRKGAKKVFVTAAPQCPFPDRMLGEALRTGLFDRVHVQFYNNPVCSYRAGNVAAFKKAWKDWTKSLPNSSVYLGLPAARGASNKGSGYVDPGTLVSKVLPIVQRSNNYGGIMLWSRYFDVKSGYSRRVKKFV

SEQ ID NO: 10426 - protein, 356 aa, Camellia sinensis
MSLLSDLINMNLSDSTEKIIAEYIWIGGTGLDLRSKARTLSGPVNDPKKLPKWNYDGSSTGQAPGEDSEVIIYPQAIFKDPFRKGNNILVMCDAYTPAGEPIPTNKRYNAEKIFSHTDVVAEEPWYGIEQEYTLLQKDVKWPIGWPKGGYPGPQGPYYCGAGADKAFGRDIVDSHYKACLYAGINISGINGEVMPGQWEFQVGPAVGISAGDELWVARYILERITEIAGVVVSFDPKPIEGDWNGAGAHTNYSTKSMRKDGGYQVIKKAIEKLGLKHKEHIAAYGEGNERRLTGRHETADINTFLWGVANRGASVRVGRDTEKAGKGYFEDRRPASNMDPYVVTSMIAATTILWKP

SEQ ID NO: 10427 - protein, 382 aa, Melampyrum sylvaticum
PYEVPMTAAGALQSYKLASKAIARLQSLSSGSMERLCETMVQEVFELTGYDRVMTYKFHEDDHGEVFTEITKPGLEPYLGLHYPATDIPQAARFLFMKNKVRMICDCRANHVRVIQDENLPSELTLCGSTLRAPHGCHVQYMENMNSIASLVMSVVVNEGDEEAGPDDSSQHPDKRKKLWGLVVCHNTSPRFVPFPLRYACEFLTQVFAIHVNKEVELENQMLEKNILRTQTLLCDMLMRDAPLGIVSQSPNVMDLVKCDGAILLHKSQKHRLGITPSDYQIRDIISWLDEYHRDSTGLSTDSLYDAGFPGALSLGGGVCGMAAVRITDKDWLFWFRSHTASEIRWGGAKHEPNDRDDGQKMHPRSSFKAFLEVVKTRSLPW

SEQ ID NO: 10428 - protein, 377 aa, Candidatus Blochmannia floridanus
MVKSDYYEILGVSKNADEREIKKSYKRLAMKFHPDRNPGDVSAESKFKEIKEAYEVLSNPEKRSAYDQYGHAIFEQNSGGMGGSNTGGSDFSDIFGDVFGDIFGGSRRSRSRRGSDLRYDIELSLEEAVKGVVREICVPTLVTCLQCRGSGAKSSASIVSCVTCHGHGQIQMRQGFFSVQQSCPSCNGHGKIIKEICNKCRGSGRIERTKTLSVKIPAGVSTGDRIRLSGEGESGKNGAPAGDLYVQVQIKKHPIFDREEKNLYCEVPISFSMAALGGEIEVPTLDGRVKLKIPPETQTGKLFRMRGKGVKSVRGIGGHGDLLCRVVVETPVRLSDRQKQLLQDLSDSFGGPYGHKNSPKSKTFFDGVKKFFDDLTR

SEQ ID NO: 10429 - protein, 436 aa, Arabidopsis thaliana; identical to SEQ ID NO: 9411

SEQ ID NO: 10430 - protein, 466 aa, Melasma scabrum
SGKPFYAIIHRVTGSLVIDFEPVKPHEVPMSAAGALQSYKLAAKAIARLQALPSGSLERLCETMVQEVFELTGYDRVMVYKFHDDDHGEVFAEITRPGLEPYAGLHYPATDIPQAARFLFMKNKVRMICDCRSAHVKVVQDESLSSDLTLCGSTLRAPHSCHLRYMENMNSIASLVMSVVVNEGRDEESSASSSTSLHPEKRKRLWGLVVCHHTSPRFVPFPLRYACEFLSQVFSIHVGKELELLNQTLEKNILKTQTLLCDMLLRGNPLAIVTQSPTMMDLVKCDGAVLLYKGKNHRLGLAPSDLQIRDIMSWLDEYHRDSTGTSTDSLLDAGFPGAAALGDAFCGMAAIRITGRDWLFWFRSHTAAEVRWGGAKHEKGDEDDGRRMHPRSSFKAFLEVVKARSVPWRDFEMDAIHSLQLILRNACEKEMEEEERRKDMVVAGEIQARLTELHIDGAREMEAVTS

SEQ ID NO: 10431 - protein, 74 aa, Nicotiana miersii
GNNILVICDAYTPAGEPIPTNKRHKAAQIFSDSKVVSEVPWFGIEQEYTLLQQNVKWPLGWPVGGYPGPQGPYY

SEQ ID NO: 10432 - protein, 198 aa, Bradyrhizobium japonicum
PTPNLRGKTQIKEFASFPTLEQLPLWGFDGSSTQQAEGHSSDCVLKPVAVFPDAARTNGVLVMCEVMMPDGKTPHASNKRATILDDAGAWFGFEQEYFFYKDGRPLGFPASGYPAPQGPYYTGVGFSNVGDVARKIVEEHLDLCLAAGINHEGINAEVAKGQWEFQIFGKGSKKAADEMWMARYLMLRLTEKYGIDIE

SEQ ID NO: 10433 - protein, 612 aa, Melasma scabrum
SGKPFYAIVHRVTGCLVVDFEPVKPHEVPMTAAGALQSYKLAAKAIAHLQALPSGSLERLCETMAQEVFELTGYDRVMVYRFHDDDHGEVYAEITRPGLESYAGLHYPATDIPQAARYLFMKNKVRMICDCRAAHVKVVQDEGLSSSLTLCGSTLRAPHSCHLRYMENMNSIASLVMSVVVNEGTDGESSSSPHQPDKRKRLWGLVVCHHTSARFVPFPLRYACEFLSQVFAIHVSKELDLLNQVIEKSILKTQTVLCDMLLRGNPLAVVGQNPTVMDLVKCDGAVLLYKGKNHRLGLAPTDPQIRDIVLWLNKYHRDTTGTSTDSLLDAGFPGAAALGDALCGMAAVRITGRDWLFWFRSNTAAEVRWGGAKHEKGDEDDGRKMHPRSSFKAFLEVVKARSVPWRDFEMDAIHSLQLILRNACEKEEERRKDVVVVGEIQSRLNDLNIYGAREMEAVTAEMVRLIEKASVPILAVGVDGVVNGWNTKIADLTGLPMDKAIGQHLLELVEEASADAVSRMLELVLQGQEEQNIQFEIKTHGPRAESGPISLVVNASATQDVKHNIIGVCFIAQDVTTERSMTDKFTRIEGDYRAIVQNRNPLIPPIFGSDEF

SEQ ID NO: 10434 - protein, 182 aa, Medicago sativa
VQQRPAHEHAPRRVKSTLLLDKLDDISHQWIDSDILIFNTGHWWVPSKLFHTGCYFQVGRSLKLGMSIPAAYKIALKTWTSWIERKIDKNRTRVFFRTFEPSHWSDDTRRTCNVTQFPTFETNATEQNSFSDTVLEVVKNVNFPINVLHVTSMSAPRSDAHVGNWNDNPLSQDCSHWCLPGS

SEQ ID NO: 10435 - protein, 234 aa, Triticum aestivum
  misc_feature (182)..(184): Xaa can be any naturally occurring amino acid
  misc_feature (192)..(192): Xaa can be any naturally occurring amino acid
  misc_feature (214)..(216): Xaa can be any naturally occurring amino acid
  misc_feature (224)..(224): Xaa can be any naturally occurring amino acid
  misc_feature (231)..(232): Xaa can be any naturally occurring amino acid
MASAAPKRCYYEVLGLSRDCSPTDIKLAFRRLALTLHPDKQAPGSDVAAATAAFQELQHAHSVLSDPQERAYYDSHRSQILFADPVSSRSGTASASPVPDLFSFFSTSAFSGFSDSGRGFYKVYGDVFDKVYAQEVAYARRMGIPTDSISTPPVIGNLDSPYTQVTAFYSYWLGFGSVMDFXXXAAEWDASXVGENRRVSECSWRRVNKKAMRXXXWEYNDAVXGLGCFCXXER

SEQ ID NO: 10436 - protein, 212 aa, Zea mays
MYPSIFVEVAVVDRAINDICILFKCSRHNLNVVPVVKGLVMGWIRFMEGEKKVYCITSVNAAFSIPVDIEAIKDVVSVAHYILVVEKETVFQRLANDKFCERNRCIVITQLAHDANLLRVPDIRWLGVFTSDFEEYCLPDCCLLRLSPEDRRKAEGILARCYLHREAPEWRSELEAMLQKGVKFEIEALSANSISFLSHEYIPQKIKQGMHL

SEQ ID NO: 10437 - protein, 422 aa, Magnaporthe grisea 70-15
MKVSGSNLTGALLACCALASAARYSPNVKTNTVVYYGQGPDQKDLMTYCREPAIDVIVLSFVHLFPQQANGLPGTNFGNQCGGAVYPGPGPDPARDALQANCPRLVPQIEQCQRIFRKKILLSLGGGVAGYQLTGADAGRAFADQLWAIFGPRPDGSTLPRPFDGESRVADLDGFDLDIEFPPVDGGEGYRALALRLRAHYASVPGRRKIRLLTASPQCVVPDSNLSDVIRAVRFDALFIQFYNTIVCSAARWANENPTYTPGDIANPAGFTFDAWTESIRGTASSRAKLYLGLAGGPNAANPGHYIDESASRRLVEAFFCRPNLGGVAIWEATNANPGGKKAYYTTAREHLERANRDPKARECLVAPPPDNSNAPPAPATGTCGSGVGSCAGDLCCSQYGYCGQEPEYCGAGCQWQFGTCT

SEQ ID NO: 10438 - protein, 198 aa, Bradyrhizobium liaoningense bv. glycinearum
PTPNLRGKTQIKEFASFPTLEQLPLWGFDGSSTQQAEGHSSDCVLKPVAVFPDAARTNGVLVMCEVMMPDGKTPHPSNKRATILDDAGAWFGFEQEYFFYKDGRPLGFPASGYPAPQGPYYTGVGYSNVGDVARKIVEEHLDLCLAAGINHEGINAEVAKGQWEFQIFGKGSKKAADEMWMARYLMLRLTEKYGIDIE

SEQ ID NO: 10439 - protein, 825 aa, Aspergillus fumigatus
MVSSKLSFVATAVAALAPLASAFDASSRSNLAIYWGQGPNQLRLSHFCQETSLDIINIGFINYFPDMSPGHWPGSNFGNQCDGSVYVTNDGVVTKLLSGCHQIMEDIPICQAAGKKVLLSIGGAYPPDQSILSEDSAVAFATFLWGAFGPVAEGWEGPRPFGDVVVDGFDFDIEHNGGFGYATMVNTFRQYFNQVPERKFYLSAAPQCIIPDAQLSDAIFNAAFDFIWIQYYNTAACSAKSFIDTSLGTFNFDAWVTVLKASASKDAKLYVGLPASETAANQGYYLTPDEVESLVSTYMDRYPDTFGGIMLWEATASENNQIDGAPYADHMKDILLHCDPSPPVTSSSAVPSSTPVTTPSPSSSAVPSSTPAVSETPSPSSSAVPSSTPVASSTPVVPGTSASSSPVSSSSAIAPSTPVVPGTSTPSSTPVASSTPVVPGTSASSSPVSSSSAVASSTPVVPGTSVPSSTPAIPGGSSSSSEAVASSTPLVTLTLTVSPTPAPSSSESSSTDLSSSTQTDVGTAPSQPAGPSTTATATTSSSSSSTDESSTTVGSGNGNGSGSTTTTAATDSITAAPTATSSATATGATSEPVTITTIIVTSYIDICPTGFTTVTTTYTTTYCPGTNTATATATVTNPPSGPGGAGSQTTAPTVPEGWTTTVTVCTQCAAKPTTVTLTLPVTETGSTSTDAVPAPPAATGEGSNPTQPSGASPTGGNGSFSEEPVPPPAVTQVSTSTEIVTLVRPTSSRPLILGTGTVHPSSTLAVKPSAKPSGQNSGSSSHVPIPPSYTQEAVSPLSTGAASRVTGLGHGLVLTVLTLSAFFVL

SEQ ID NO: 10440 - protein, 114 aa, Triticum aestivum
  misc_feature (81)..(81): Xaa can be any naturally occurring amino acid
MDYYNILKVNRNASLEDLKKSYRRLARTWHPDKNPTGGAEAEARFKQITEAYEVLSDPEKRAIYDQYGEEGLKGMPPPGSXSRTGTASGSSGPSNFRYNPSDPDDIFNEFMASN

SEQ ID NO: 10441 - protein, 52 aa, Gossypium hirsutum
MEKLDHIKSHLATLSQIGENEKNGFINLVSRYLSGEAQQIEWSKIQTPTDEV

SEQ ID NO: 10442 - protein, 392 aa, Lasiocarpus sp. Anderson 13834
DLEPVNPADVPVTAAGALKSYKLAAKAISRLQSLPGGNISLLCDVLVKEVRDLTGYDRVMVYKFHEDEHGEVVSECRRSDLESYLGLHYPAIDIPQASRFLFMKNKVRMICDCLAPPVKVIQDKRLSQPLSLCGSTLRSPHGCHAQYMANMGTIASLVMSVTVNEDDDMIDGDQQQMARKLRGLVVCHHTSPRFVPFPLRYACEFLIQVFGVQINKEVELAAQVREKHILRIQTMLCDMLLRDAPVAIITQSPNVMDLVKCDGAALYYKNKFWLLGVTPTEAQIRDIAEWLLEYHSGNTGLSTDSLMEAGYPGASVLGDAVCGMAAVSITSRDFLFWFRSHTAKEIKWGGAKHDPEDKDDGRKMHPRSSFKAFLEVVKWRSLPWEDVEMDAI

SEQ ID NO: 10443 - protein, 163 aa, Arabidopsis thaliana
  misc_feature (21)..(21): Xaa can be any naturally occurring amino acid
  misc_feature (56)..(56): Xaa can be any naturally occurring amino acid
  misc_feature (95)..(95): Xaa can be any naturally occurring amino acid
  misc_feature (99)..(99): Xaa can be any naturally occurring amino acid
KALTKLAEADALKKGIIPNPXKSLEPLIYRLETRSGAEMQTFDGPVGANVPLSRLXTETASSYSVLVHPALYCSSDRSGTGNIASTNPSPPVMKXIPEXRNVGTLPDLFTYITSIVHLDNLKASAEVGLGYNLGLPVEVTVAANTGVNLAIPDRAVVENKNIN

SEQ ID NO: 10444 - protein, 392 aa, Ptilochaeta nudipes
DLEPVNPVDVPVTAAGALKSYKLAAKAISRLQSLPGGNISLLCDVLVKEVRDLTGYDRVMVYKFHEDEHGEVVSECRRSDLESYLGLHYPATDIPQASRFLFMKNKVRMICDCLAPPVKVIQDERLSQPLSLCGSTLRSPHGCHAQYMANMGTIASLVMSVTVNEDDDMMDGDQQQMARKLWGLVVCHHTRPRFVPFPLRYACEFLIQVFGVQINKEVELAAQVREKHILRIQTMLCDMLLRDAPVAIITQSPNVMDLVKCDGAALYYKNKFWLLGVTPTEAQIREVAEWLLEYHSGNTGLSTDSLMEAGYPGASVLGDAVCGMAAASITSRDFLLWFRSHTAKEIKWGGAKHDPEDKDDGRKMHPRSSFKAFLEVVKWRSLPWEDVEMDAI

SEQ ID NO: 10445 - protein, 124 aa, Frankia sp. BMG5.4
PLMRSKTRIVKGGKEPEIWGFDGSSTNQAPGSNSDCVLQPVFTCPDPLRGGDNVLVLCEVQLTDFTPHPTNTRAAARAVAEKYADMSPMFGIEQEYTFFQNGRPLGWPEVRLPRGAGPVLLRRR

SEQ ID NO: 10446 - protein, 360 aa, Physcomitrella patens subsp. patens
GVQHMARQNFYETLGLQRGANPKEIKSAYYELAKRWHPDVNKGNAEAERKFQEIQQAYEVLKDDEKRAMYDQVGHDAFEQAAAGGAPGGGAGFGGFDETIFGDAFGGGMDEVMLQLILVFSWSCQVQLDLTFREAVQGCSKAVNFQTTVRCQPCSGSGLPPGVKPQTCKTCRGRGRVVMQQAFFAFESTCSKCGGSGQMVKDHCRNCDGAGVVKGHREVRVDIPAGVESGTTLKVHGEGGEGPKGGRPGNLMLQIRVQPDKVFRREGANLYVDVPISFTHAILGGSVQVPTLTGDVLLKIRPGTQPGHKQVMRGKGVKVLNSRHYGDQYVLINVTIPTNITQRQRQLIEEFSGEEYAEPE

SEQ ID NO: 10447 - protein, 392 aa, Ptilochaeta bahiensis
DLEPVNPADVPVTAAGALKSYKLAAKAISRLQSLPGGNISLLCDVLVKEVRDLTGYDRVMVYKFHEDEHGEVVSECRGSDLESYLGLHYPATDIPQASRFLFMKNKVRMICDCLAPPVKVIQDKRLSQPLSLCGSTLRSPHGCHAQYMANMGTIASLVMSVTVNEDDDMMDGDQQQMARKLWGLVVCHHTSPRFVPFPLRYACEFLIQVFGVQINKKVDLAAQVREKHILRIQTMLCDMLFRNAPVAIITQSPNVMDLVKCDGAALYYKNKFWLLGVTPTEAQIREIAEWLLEYHSGNTGLSTDSLMEAGYPGASVLGDAVCGMAAVSITSRDFLFWFRSHTAKEIKWGGAKHDPEDKDDGRKMHPRSSFKAFLEVVKWRSLPWEDVEMDAI

SEQ ID NO: 10448 - protein, 90 aa, Glycine soja
GINISGTNGEVMPGQWEYQVGPSVGIEAGDHIWASRYILERITEQAGVVLSLDPKPIEGDWNGAGCHTNYSTKSMREDGGFEVIKKAILN

SEQ ID NO: 10449 - protein, 392 aa, Dinemandra ericoides
DLEPVNPADVPVTAAGALKSYKLAAKAISRLQSLPSGNIPLLCDVLVKEVRDLTGYDRVMVYKFHEDEHGEVVSECRRSDMESYLGLHYPATDIPQASRFLFMKNKVRMICDCLSPPVEVIQDERLPQPLSLCGSTLRSPHGCHAQYMANMGTIASLVMSVTVNEDDDMMDGDQQRMARKLWGLVVCHHTSPRFVPFPLRYACEFLIQVFGVQINKEVDLAAQVREKHILRIQTMLCDMLLRDAPVAIITQSPNVMDLVKCDGAALYYKNKFWLLGVTPTEAQIRDIAEWLLEYHRGNTGLSTDSLMEAGYPGASVLGDAVCRMAAVSITSRDFLFWFRSHTAKEIKWGGAKHDPGDKDDGRKMHPRSSFKAFLEVVKWRSLPWEDMEMDAI

SEQ ID NO: 10450 - protein, 275 aa, Medicago truncatula
MAPNKKSRVSDDEEIEDQPQKSLYQVLGLEKTASQQEIKKAYYKLALRLHPDKNPGDEEAKEKFQQLQKVISILGDEEKRALYDQTGCIDDDDLAGDVQNLHAFFKTMYKKVTEADIEEFEANYRGSDSEKNDLIELYKKYKGNMKRLFCSMLCSDAKLDSHRFKDILDEAIAAGELKATKAYQKWAKEVSETKPPTSPLKRKAKSNKQSETDLCAIISQRRNERKGQFDSMFASLVSKYGGSDMPEPSEEEFEAAQKKLEKGRSSKKSKQSKRK

SEQ ID NO: 10451 - protein, 96 aa, Glycine canescens
LYAGINISGTNGEVMPGQWEYQVGPSVGIEAGDHIWASRYILERITEQAGVVLSLDPKPIEGDWNGAGCHTNYSTKSMREDGGFEVIKKAILNLSL

SEQ ID NO: 10452 - protein, 392 aa, Mcvaughia bahiana
DLEPVNPADVPVTAAGALKPYKLAAKAISRLQSLPSGNISLLCDVLVKEVRDLTGYDRVMVYKFHEDEHGEVVTECRRSDLESYLDLHYPATDIPQASRFLFMKNKVRMICDCLAPPVKVIQDKRLSQPLSLCGSTLRSPHGCHAQYMANMGAVASLVMSVTINEDDDTVDGDQQQMARKLWGLVVCHHTSPRFVPFPLRYACEFLIQVFGVQITKEVELAAQVREKHILRIQTLLCDMLLRDAPVAIITQSPNVMDLVKCDGAALYYRKKFWLLGVTPTEAQIRDIAEWLLEYHSGNTGLSTDSLLEVGYPGASALGEVVCGMAAVSITSRDFLFWFRSHTAKEIKWGGAKHDPDDKDDSRKMHPRSSFKAFLEVVEWRSLPWEDVEMDAI

SEQ ID NO: 10453 - protein, 172 aa, Medicago truncatula
MESHDEMGCQAPERPILCVNNCGFFGREATMNMCSKCYKDTLLKQEQEKLVATSVENIVNGNSSSNGKLAVTASAVDVRVESVELNTVSPEVPENPISNESVEMKAKTGPSRCATCRKRVGLTGFSCKCGNLFCSMHRYSDKHDCPFDYRTAGQKAIAESNPVIKADKLDKI

SEQ ID NO: 10454 - protein, 343 aa, Streptomyces coelicolor A3(2)
MTFKAEYIWIDGTEPTAKLRSKTKIITAAPAGLDALPVWGFDGSSTNQAEGSSSDCVLKPVFSCPDPIRGGEDILVLCEVLDTDMTPHPSNTRAALAELSERFAAQEPVFGIEQEYTFFKGTRPLGFPEGGFPAAQGGYYCGVGSDEIFGRDVVEAHLENCLKAGLGISGINAEVMPGQWEFQVGPLAPLEVSDQLWVARWLLYRTAEDFEVSATLDPKPVKGDWNGAGAHTNFSTKAMREGYDAIITAAESLGEGSKPMDHVKNYGAGIDDRLTGLHETAPWNEYSYGVSDRGASVRIPWQVEKDGKGYIEDRRPNANVDPYVVTRLLVDTCCTALEKAGQV

SEQ ID NO: 10455 - protein, 341 aa, Zea mays; identical to SEQ ID NO: 9212

SEQ ID NO: 10456 - protein, 75 aa, Nicotiana trigonophylla
GNNILVICDAYTPAGEPIPTNKRHKAAQIFSDPKVVSQVPWFGIEQEYTLLQQNVKWPLGWPVGGYPGPQGPYYC

SEQ ID NO: 10457 - protein, 347 aa, Zea mays
MDACFTVRGVWQTTDQAIGRSSKKQAAVTRNHHRSMYPPMAALGGRRRRASSAALQLALLAVALVSLAGPATAAGNKTGQVTVFWGRNKAEGTLREACDSGLYTMVIMSFLDVYGPQRGGYRYHLDLSGHPTAGIGDDIKHCQFVGVPVTLSVGGFGSGYSLPSTQAARDLFDYLWNAFLGGSKPGVRRPFGDAWLDGVDLFLERGSPADRYDVLALELAKHNIRGGPGKPLHLTATPRCGFPPAGYLRRALDTGIFERVHVRIYDDADCEARWHLAWDEWTAAYPATRFYVGLTASEMTHGWVHPKNVYYDVAPSAQKADNYGGFMIWDRYYDKLSNYTSMVKDYA

SEQ ID NO: 10458 - protein, 76 aa, Nicotiana quadrivalvis
GNNILVICDAYTPAGEPIPTNKRHKAAQIFSDPKVVSQVPWFGIEQEYTLLQQNVKWPFRLACWRLPRTSGPYYCG

SEQ ID NO: 10459 - protein, 297 aa, Oryza sativa; identical to SEQ ID NO: 9560

SEQ ID NO: 10460 - protein, 331 aa, Arabidopsis thaliana; identical to SEQ ID NO: 8745

SEQ ID NO: 10461 - protein, 198 aa, Bradyrhizobium japonicum bv. glycinearum
PTPNLRGKTQIKEFASFPTLEQLPLWGFDGSSTQQAEGHSSDCVLKPVAVFPDAARTNGVLVMCEVMMPDGKTPHASNKRATILDDAGAWFGFEQEYFFYKDGRPLGFPTSGYPAPQGPYYTGVGFSNVGDVARKIVEEHLDLCLAAGINHEGINAEVAKGQWEFQIFGKGSKKAADEMWMARYLMLRLTEKYGIDIE

SEQ ID NO: 10462 - protein, 608 aa, Orobanche californica
  misc_feature (598)..(598): Xaa can be any naturally occurring amino acid
SGKPFYAIIHRVTGSLIIDFEPVNPHEVPMTAAGALQSYKLAAKAITRLQALPSGSVKRLCDTMVQEVFELTGYDRVMVYKFHDDDHGEVFSEITKPFLEPYVGLHYPATDIPQATRFLFMKNKVRMICDCQANHVKVVQDDNLPFDLTLCGSTLRAPHSCHLQYMENMNSIASLVMSVVVNEGDEDGPDSSSGPNKRERLWGLVVCHNTSPRFVPFPLRYACEFLAQVFAVHVTKELEWENQLLEKNILRTQTLLCDLLLRNTPLGIVSGSPNVMDLVRCDGAVLLHKNTKYRLGLTPTDFQIQDIVSWLDEYHRDSTGLSTDSLYDAGFPGALALGNAVCGMTAARVTDKDWLFWFRSHTAGEVRWSGAKHEPGEKDDGRKMHPRSSFKAFLEVVKTRSLPWRDYEMDAIHSLQLILRNASRENDEKALEGREIQARLNVLQIDGVKEIEAVTSEMVRLIETASVPIFAVDLDGLVNGWNTKIADLTGLGVDEAIGSHFLALVEDSSADTVSKMLELALQGKEEQNVQFEIKTHGQRSESGPITLIVNACASRDVQENVVGVCFIAHDITTQKSMMDKFTRIEGDYRSIIQTRTRXSHLFSEPTSL

SEQ ID NO: 10463 - protein, 252 aa, Oryza sativa; identical to SEQ ID NO: 2944

SEQ ID NO: 10464 - protein, 198 aa, Bradyrhizobium genosp. beta
PTPNLRGKTQIKEFASFPTLEQLPLWGFDGSSTQQAEGHSSDCVLKPVAVFPDAARTNGVLVMCEVMMPDGKTPHASNKRATILDDAGAWFGFEQEYFFYKDGRPLGFPSSGYPAPQGPYYTGVGYSNVGDVARKIVEEHLDLCLAAGINHEGINAEVAKGQWEFQIFGKGSKTAADQMWMARYLMLRLTEKYGIDIE

SEQ ID NO: 10465 - protein, 193 aa, Cyanothece sp. PCC 7424
MSKYTKEIERENVVNQQQTTTRSHSKKLPIQTRFANSYYAILGLHPSASPIEIRRAYRELSKRYHPDTTELPPEEAKTKFHRLNEAYGTLSNPDRRSLYDLKIGYSRFNVIQAPPDDTLSSEQKQQWSKSAYLDPNDRPLSGGEIFALLMMGITLIGCLLLAILIAFLRGDQLIPPSALPSGTISFIGQFIKF

SEQ ID NO: 10466 - protein, 198 aa, Bradyrhizobium yuanmingense
PTPNLRGKTQIKEFASFPTLEQLPLWGFDGSSTQQAEGHSSDCVLKPVAVFPDGARTNGVLVMCEVMMPDGKTPHPSNKRATILDDSGAWFGFEQEYFFYKDGRPLGFPTAGYPAPQGPYYTGVGYSNVGDVARKIVEEHLDLCLAAGINHEGINAEVAKGQWEFQIFGKGSKTAADQMWMARYLMLRLTEKYGIDIE

SEQ ID NO: 10467 - protein, 117 aa, Frankia sp. BMG5.6
TRIVKDGKEPEIWGFDGSSTNQAPGSNSDCVLRPVYTVPDPIRGGDNVLVLCEVELTDFTPHPTNTRAKAPLVAEKYADMAPHFGIEQEYTVLPERSSARLAGSRLPGAAGPVLLRR

SEQ ID NO: 10468 - protein, 464 aa, Arabidopsis thaliana; identical to SEQ ID NO: 9681

SEQ ID NO: 10469 - protein, 476 aa, Hordeum vulgare subsp. vulgare; identical to SEQ ID NO: 6915

SEQ ID NO: 10470 - protein, 172 aa, Vitis vinifera
MDHYEALGIGRNASKGEIKEAFRKLALKYHPDKHAQSPKAVRDGATLRFKQVSEAYEVLSDDRKRSLYNLRSSTAPPGFSGGYAHSYHYNNERPRYSSRPNADAFVSKFEVVLRFLTTRAFLLNVAFAGALLGGMAIIDRSGETLWKMNNSGKSFDEAMESIGKAKAHKDDM

SEQ ID NO: 10471 - protein, 335 aa, Debaryomyces hansenii CBS767
MRYRSPLQKLIGVWNQIQSNIGGDIVFVFHKPYCRSRKRTFGGNSKSYEVGQLGGCELEARRFAAVIKVLKTMIVNLVQDRTTTKRDVYYQDVGLFQKSQPFANELIECIVGSLGMCAERDLKIFASQKGLMFGNMRFRRAGVAWDLDEPVLIPRTNDLEAMEPPKGIVVIEKEAIFKSFCKYIQNIDVNLIAVTGKGFPDNLTKRFVGNLGQLYPDVPILAFMDSDVYGLSICKNYKYAKNFDAMLCPLLTFAGVFLTEYASGWLDISVRDWRMMSNFIRDIKLLQRPVLEAKELDKWHRELTRGLVLFKKSEMNIVDSCPNEYILRKIKQHIQ

SEQ ID NO: 10472 - protein, 114 aa, Frankia sp. BMG5.3
IVKGGKEPEIWGFDGSSTNQAPGSNSDCVLQPVFTCPDPLRGGDNVLVLCEVQLTDFTPHPTNTRAAARAVAEKYADMSPMFGIEQEYTFFQNGRPLGWPAAGYPEAQGPYYCG

SEQ ID NO: 10473 - protein, 623 aa, Campylobacter jejuni RM1221
MSKVIGIDLGTTNSCVAVYERGESKVIPNKEGKNTTPSVVAFTDKGEVLVGDSAKRQAVTNPEKTIYSIKRIMGLMINEDAAKEAKNRLPYHITERNGACAIEIAGKIYTPQEISAKVLMKLKEDAEAFLGESVVDAVITVPAYFNDAQRKATKEAGTIAGLNVLRIINEPTSAALAYGLDKKDSEKIVVYDLGGGTFDVTVLETGDNVVEVLATGGNAFLGGDDFDNKLIDFLANEFKDETGIDLKNDVMALQRLKEAAENAKKELSSANETEINLPFITADASGPKHLVKKLTRAKFEGMIDSLVAETITKINEVVSDAGLKKDEIKEIVMVGGSTRVPLVQEEVKKAFNKDLNKSVNPDEVVAIGAAIQGAVIKGDVKDVLLLDVTPLSLGIETLGGVMTKIIEKGTTIPTKKEQVFSTAEDNQSAVTINVLQGEREFSRDNKSLGNFNLEGIPPAPRGMPQIEVTFDIDANGILTVSAKDKATGKAQEIKITGSSGLSEEEINNMVKDAELHKEEDKKRKEAVDARNAADSLAHQVEKSLSELGEKVAAADKENIQKALDDLRETLKNQNASKEEIESKMKALSEVSHKLAENMYKKDEPNTANDKKKKDDDVIDAEVE

SEQ ID NO: 10474 - protein, 446 aa, Synechococcus sp. PCC 7335
MVGTLVQTQSLQTQNLEEKAKALGLKFFLVSYTDLLGGTRAKLVPAAKIASVEKDGAFFSAFASNLGLGPEAAEIAAIPDPTSLIQLPWEPTVGWVASNVFFEGEPFPAAPRMILGRAIDRCESMGYTYKAGVEAEFFLLKKTETGYAVADERDTAERPCYDQLNLMRQFDLISTVVGYMEDLGWEPYQCDHEDANGQFELNWSYSEAMTACDRHVFFKYMVKTLAEKRGLTATFMPKPFSGTTGSGGHVHNSLWQGETNSFAQDADEGGLSPVGYHFLGGVLAHAKALTALFAPTINSYRRLGASTTTSGSTWTPRYISYGGNNRSHLLRIPEAGRFECRLIDGAANMYLALAGLLAAGLEGIENQTSPGERIDENLFARGAEFPDLETLPTNLAEALTTLQQDALLMETLGELGAKTFFEFKWKEWREFCTRITDWEIDQYINI

SEQ ID NO: 10475 - protein, 448 aa, Neptuniibacter caesariensis
MEAVTRFLEENAITEVESTLPDMTGNARGKFYPTQKFLAEKGGRIPETLLVQTVTGDWADNHYDIVDASDRDMVLKPDPNTLRLVPWANEPTAQVINDCYTVDGELHPLSCRSVLRKVLALYEKEGLKPVIAPEVEFYLIQKNTDPDYELKPAIGRSGRRETARQSYSIDAVNEFDPIIDTLYDYCEAQGLDVDTLIHETGAAQMEINFLHGDPLDLADQVFTFKRTLRETGMKHGVYATFMAKPMQVEPGSSMHIHQSLVDIETGENIFAGKEGERFSEQFYHYLGGLQKFTPNAISFFAPNVNSYRRFTPEMSAPVNMKWGIDNRTTGLRAPEAVPAATRIENRFPGADCNPYLAIAATLACGYLGLKNKLQPTKPTTDAAAEEGDAVELARTLEEALRLLEECPELREIMGSEFVEAYIGVKRAEFETFHKVISSWEREYLLLNV

SEQ ID NO: 10476 - protein, 169 aa, Triticum aestivum
  misc_feature (37)..(37): Xaa can be any naturally occurring amino acid
  misc_feature (55)..(55): Xaa can be any naturally occurring amino acid
  misc_feature (75)..(75): Xaa can be any naturally occurring amino acid
  misc_feature (89)..(89): Xaa can be any naturally occurring amino acid
  misc_feature (118)..(118): Xaa can be any naturally occurring amino acid
VCFLIFLEMLVVREKGWVPDMHIFSMTGESTPDQRDXAVERFNQSPDAKVFFGSXKACGEGISLVGASRVVILDXHENPSVMRQAIGRXFRPGQSKMVCLYRLVAADSPEEEDHNTAXRKEWVSKMWFESNDLCGNDDFELASVDVSESGDRFLDNEALRQDIKSLYKR

SEQ ID NO: 10477 - protein, 469 aa, Aquifex aeolicus VF5
MPKYTPEEVLDLIQKEGVQYVDLRFSDPFGQWQHLTIPAYEISKETFEVGRGFDGSSIRGWQSINESDMLAKPDPNTAFIDPFIEPKTLVMICDIYDPVTGERYGRDTRYIAQKAEQYLKQTGIGDTAYFGPEAEFFIFDSVEFGTAANYAFWRVDSEEGWWNREVPSSGYKIPHKRGYFPAPPVDKMMQLRNEMVSIMSDLGIIVELHHHEVATAGQGEIDIRYDSLLNQADKLFLYKYIVRMVAAKHGKYATFMAKVLPNDNGSGMHTHFSIWKNGENLFAGSEYAGLSKTALYAIGGILKHGPAIAAFTNPTVNSYHRLVPGYEAPVRLAYSARNRSAAIRIPMYSQNPKAKRIEVRFPDATSNPYLAFAAILMAAIDGIENEIDPGEPFDKDIYSLPPEELEGIPQLPGSLEEALKALEEDYEFLLKGNVFTEEFIQLWIESKRAEIDELRFIPHPKEFELYWDI

SEQ ID NO: 10478 - protein, 118 aa, Brassica napus
MAESQAKSPGGGESGGDQSPRSSSHVREQDRFLPIANISRIMKRGLPANGKIAKDAKEIVQECVSEFISFITSEASDKCQREKRKTINGDDLLWAMATLGFEDYIDPLKIYLTRYREM

SEQ ID NO: 10479 - protein, 325 aa, Nitrosomonas europaea ATCC 19718
MSTSERPPSPSSMAEDFAVEPLSPDFGFYLRTTELLAERHSPVQHIEIVQTPLFGRAMRIDGCFMTSEQDEFFYHEPMVHLPAITHGDPRQALVVGGGDGGTAYNLLRYPNMERVVLAELDRDVIDMARTWLPKVHRGAFEDPRLELHLGDGRAFTGNCKNQFDQIVLDLTDPFGPAISLYTRDFYRACRRALKPGGVLSLHIQSPIYRSPIMARLLASLRDVFGVVRPYLQYVPLYGTLWAMAMASDSADPLSLSATEIDARLTQNGLIDLKLYSGGTHHALLNLPPFVQTLLSEPAYPIDDGNSLDDINLDPREAGKLKLIQT

SEQ ID NO: 10480 - protein, 566 aa, Mycobacterium smegmatis str. MC2 155
MELLLVVVGAILVTAIAHHRGFEPALMIVVVGSAVSFLPDFEPPELDSHILLSVVLPPLLYSAALNFSFPTFLRHIRPILGLGVGLVVVSAFAVAAVSSWLVIVPLTFGTALVLGAIVAPPDAVTAVAVGRKLGLPKRMMAILTGESLINDAAALTLFSIAVTQVAGGHIFIENPLLLFGYSATVGPLVGAVLGYVTLWIRKRLANPGLETVQGLVVPFAAFITAEELHASGVLAVVVAGFVVGNGNLGAGYQTRLQERYVWNSVDVLLEAFVFAYIGLHLRFVLEHLNEAHESLTEVITASAVVLLIVLVIRPLSVFAIFGRNKLSRHVEKKLSVPAPDGSRSSLGAAVRKQRKKKRRANWRTMVDRRTLSWQENVVLSWTGMRGVVTLAAAAAIPAYTESGEPFPERATIQAIAFVVAVGTLLLQGSTLPWLIRKLHISRFNDDHEADRAEEVKAERVAHDAAEKILVEFQANPPANLNPALVEEIYIRIARHTQDVDEMPDPEAPIKRAAAFTTLYREVLAAQRAALIDQRDAGHIEDEAVRAMLERLDLQEAGVTARLESRL

SEQ ID NO: 10481 - protein, 608 aa, Orobanche corymbosa; identical to SEQ ID NO: 6933

SEQ ID NO: 10482 - protein, 141 aa, Arabidopsis thaliana
MADTPSSPAGDGGESGGSVREQDRYLPIANISRIMKKALPPNGKIGKDAKDTVQECVSEFISFITSEASDKCQKEKRKTVNGDDLLWAMATLGFEDYLEPLKIYLARYRELEGDNKGSGKSGDGSNRDAGGGVSGEEMPSW

SEQ ID NO: 10483 - protein, 231 aa, Chlamydomonas reinhardtii
MAAAALGKVVGPGDKVLGVPEQGTLRLSAGLTTHDGAVTSLKGGVLKSTRTGQLFLEGRQKRYIPAEGDVVVGVISDKHSENFTVDIGGPFNAVLPQLSFEGATRRNRPNLHPGDLVYARVVTAHRDTDPVLSCMDSAGRASGFGHLKEGMVLSCSSALARQLLGSPTAPVLEALGSGLQFELAVGLNGRVWLSAPTAATCVVVANAISESEFRTPAQVRTMVARVLSRLG

SEQ ID NO: 10484 - protein, 307 aa, Oryza sativa Japonica Group
MKPAPSNATLAAAAACCFVLAHGDAAAPVDEPALSAPNEEEREDEAVAAEALLLSPDAAVVAVGVGRGLVVHARRLGPFRLGPKGEPSRFIAQHGPPCAYTVLMETDRSQPAPIDPRRARFPCCIVWTPLPLISWLIPFIGHIGICREDGVILDFAGPNFVSVDNFAFGAVARYIQVNSDECYKLLEPEGASTWDDALRKGVQEFQHRGYSLFTCNCHSFVVNNLNRLFYSGHDKWNVVSLAAVMFLRGRWVSTASVVKTFFPFALVITIGTLLGGATFLIGLLAFAAVMTGWFLVGTYCIKSLVEL

SEQ ID NO: 10485 - protein, 122 aa, Dickeya dadantii
LLDAINQRGSYPVRIVGEQQQVETVSQVSAVHSGSPQAVELIAGVDLVTTAVGPQILAKIAGAIAQGLVKRHANGNTSPLNIIACENMVRGTSQLKQHVLAQLPEDTQAWVAQHVGFVDSAV

SEQ ID NO: 10486 - protein, 1277 aa, Arabidopsis thaliana
MAIVDDAEMRLTESEAVSSSDDRKIVADTPDFIDESSLVIRTTTGVRISALPAEQSLVDSDGSNSEVTLPAKDEVISDGFTCVNKEIVESDSFREQNLEIGEPDLDVENRKEAMIIDSIENSVVEIVSSASGDDCNVKVEVVEPELLVENLVVAKEEEEMIVDSIEDSVVEIVSTASGCDCNVKVEVVDPELCVDNLVVVKEEEMIADSIAESVVETVSRGLDYECVDVKVKEEPDLGTKLEEDSVFPNVLEKKDEVIKVLEDQPSEINKKLEQENDDLFSSGDSDGTSAKRRKMEMESYAPVGVESCILAPTPLRVVKPEKLDTPEVIDLESEKSYTHVKMEPVEEIKVEAVKMSSQVEDVKFSREQKSVYVKKEPVGARKVKVEDGDFPVEKDWYLVGRSLVTATSTSKGRKLEDNEIVNFTFSSVAKWKVPNIVRFSTKRCGEIGRLPMEWSNWAVSLLRSGKVKMLGRCVAAPPFLTMMQEIMLYVSFYIHSSIFTDVSKSTWRIGSSPNLESTLHPLLQLFKHLTIKPYQKAEFTPEELNSRKRSLNLEDDYDERAALLAIAKRRKGCQQSLEQNKDEEEAPESYMNRVVGAADSYNLEEMEAPSTLTCNLRPYQKQALYWMSESEKGIDVEKAAETLHPCWEAYRICDERAPSIYLNIFSGEATIQFPTATQMARGGILADAMGLGKTVMTIALILARPGRGNPENEDVLVADVNADKRNRKEIHMALTTVKAKGGTLIICPMALLSQWKDELETHSKPDTVSVLVYYGGDRTHDAKAIASHDVVLTTYGVLTSAYKQDMANSIFHRIDWYRIVLDEAHTIKSWKTQAAKATFELSSHCRWCLTGTPLQNKLEDLYSLLCFLHVEPWCNWAWWSKLIQKPYENGDPRGLKLIKAILRPLMLRRTKETRDKEGSLILELPPTDVQVIECEQSEAERDFYTALFKRSKVQFDQFVAQGKVLHNYANILELLLRLRQCCNHPFLVMSRADSQQYADLDSLARRFLDNNPDSVSQNAPSRAYIEEVIQDLRDGNSKECPICLESADDPVLTPCAHRMCRECLLTSWRSPSCGLCPICRTILKRTELISCPTDSIFRVDVVKNWKESSKVSELLKCLEKIKKSGSGEKSIVFSQWTSFLDLLEIPLRRRGFEFLRFDGKLAQKGREKVLKEFNETKQKTILLMSLKAGGVGLNLTAASSVFLMDPWWNPAVEEQAIMRIHRIGQKRTVFVRRFIVKDTVEERMQQVQARKQRMIAGALTDEEVRSARLEELKMLFR

SEQ ID NO: 10487 - protein, 122 aa, Dickeya dadantii
LLDAINQRGSYPVRIVGEQQRVETVNQVNAVHSGSPQAVELIAEVDLVTTAVGPQILAKIAGAIAQGLVKRQESGNTSPLNIIACENMVRGTSQLKQHVLAQLPENTQAWVAQHVGFVDSAV

SEQ ID NO: 10488 - protein, 242 aa, Glycine max
LDRLLHRLFSRIHKVLIFSQWTKVLDIMDYIFSEKGFAVCRIDGSVKLEERKQQIQDFNDVNSNCRVFLLSTRAGGLGINLTVADTCILYDSDWNPQMDLQAMDRCHRIGQTKPVHVYRLSTAQSIEGRMLKRAFSKLKLEHVVIEKGQFHQERTKPASMDEIEEDDVLALLRDEETAEDKKIHTDISDEDLEKLLDRSDLIVNDSNDDNFKAPVSAFPLKGPGWEVVIPTATGGMLSTLNC

SEQ ID NO: 10489 - protein, 618 aa, unidentified eubacterium SCB49
MEGSEPTVIPNAEGKRTTPSVIAFVEGGEIKIGDPAKRQAVTNPTKTVASIKRFMGNKYSESAKEADRAAYSVVKGDNDTPRVDIDGRLYTPQELSAMILQKMKKTAEDYLGAEVSRAVITVPAYFNDSQRQATKEAGQIAGLTVERIINEPTAAALAYGLDKKNTDQKIVVFDFGGGTHDVSILELGDGVFEVLSTDGDTHLGGDDVDQKIINWLADEFQSENDNMDLRKDPMALQRLKEAAEKAKIELSASAQTEINLPYVTATASGPKHLVKTLTRAKFEQLIDDLVKRTIEPCKTAMKAAGLTNSDIDEVILVGGSTRIPAVQEAVEKFFGKAPSKGVNPDEVVAVGAAIQGGVLTGDVKDVLLLDVTPLSLGIETMGSVMTKLIEANTTIPTKKSQVFSTAADNQPSVEIHVLQGERPMANDNKTIGRFHLSDIPPAQRGVPQIEVTFDIDANGIIKVSAEDKATGKKQDIRIEASSGLTEEEIEKMKQEAEANADADKKAKETADKINEADGMIFQTEKQLKEFGDKISEDNKKPVEEALVELKAAYETKNVDAITPALDKINEAWKAASEEMYKAQAEAQGGAPTGEPTADAGAGADESSDVEDVDFEEVK

SEQ ID NO: 10490 - protein, 122 aa, Dickeya dadantii
LLDAINQRGSYPVRIVGEQQQVETVSQVSAVHSGSPQAVELIAGVDLVTTAVGPQILAKIAGAIAQGLVKRHANGNTSPLNIIACENMVRGTSQLKQHVLAQLPEDTQAWVAQYVGFVDSAV

SEQ ID NO: 10491 - protein, 55 aa, Zea mays
SSTYGKVLVLDGVIQVTERDECAYQEMITHLPLCSIKDPQDRCWLLGGGDWWCLA

SEQ ID NO: 10492 - protein, 122 aa, Brenneria nigrifluens
LLEALNSRKSYQVRIVGEQTQTENVSNVSAVHSGSQEAVALIADVDLVTTAVGPQILEMIAGTIAQGLVQRQDNGNARPLNIIACENMVRGTSQLKQHVLKLLPQDKLEWVAEHVGFVDSAV

SEQ ID NO: 10493 - protein, 190 aa, Arabidopsis thaliana; identical to SEQ ID NO: 258

SEQ ID NO: 10494 - protein, 649 aa, Capparis spinosa
MAGKGEGPAIGIDLGTTYSCVGVWQHDRVEIIANDQGNRTTPSYVAFTDTERLIGDAAKNQVAMNPINTVFDAKRLIGRRYSDSSVQADMKLWPFKVVPGSGDKPMIVVNYKGEEKQFAAEEISSMVLIKMREIAEAFLGCTIKNGVVTVPAYFNDSQRQATKDAGVIAGLNVMRIINEPTAAAIAYGLDKKAASVGEKNVLIFDLGGGTFDVSLLTIEEGIFEVKATAGDTHLGGEDFDNRMVNHFVQEFKRKNKRDISGNPRALRRLRTACERAKRTLSSTAQTTIEIDSLYEGIDFYTTITRARFEELNMDLFRKCMEPVEKCLRDAKMDKSNVHDIVLVGGSTRIPKVQQLLQDFFNGKELCKSINPDEAVAYGAAVQAAILSGEGNEKVQDLLLLDVTPLSLGLETAGGVMTVLIPRNTTIPTKKEQIFSTYSDNQPGVLIQVYEGERARTKDNNLLGKFELTGIPPAPRGVPQINVCFDIDANGILNVSAEDKTTGQKNKITITNDKGRLSKEEIEKMVQEAEKYKSEDEEHKKKVEAKNALENYAYNMRNTIKDEKIGSKLDPADKKKIEDAIDQAIQWLDGNQLAEADEFKDKMKELESICNPIIARMYQGAGGDMGGAGGADDASPAGGSGAGPKIEEVD

SEQ ID NO: 10495 - protein, 712 aa, Flavobacteria bacterium BBFL7
MNFIKNNVAIAILVLLAATASCSFTKDVDPGDRDKEELLVNLISHVLERNHYSPADLTDDFSQKVFTNYINDLDPAKRYFLESDYQEFANYKLLLDDEIRDSRVQLFTLTYERLEQRRKEAEKLFAEVIQEPFDFNKDEVMDTDYEKIPYATDSEELKNHWRKLLKLSALGSYYDKMEAQEEKPESERKTASAIEKEVRDEVRRSMEENFDFSKDIERLDYFSLYLNSVMAYFDPHTSYFAPQNKDRFDTAMSGKLEGIGARLQKKMDYIKVLEIISGGPAWRSENVEVGDVILKVAQENDTVATSIVGMRISNAVDLIKGPKGTKVILTLKRVDGTIEDVTLTRDVVEIEETFAKSVIVKDPEGSINYGLINLPKFYFDMENRNGRASGDDIKKEIERLKMQGMDGLVLDLRNNGGGSLREVIEMAGLFIEKGPVVQVALKNERTQTYSDNDPSIIWDGPLVIMVNELSASASEILAAALQDYERAVIIGSKQTFGKGTVQNFEDLNRWVRNSDLGDLGAIKLTTQKFYRINGKSTQLEGVKSDIVTPDRYSYIDIGERDEEFPLPYDEIPAATYSKFNKYIDFNSTIAKSQARINSNETFKLIDENAKWMSEQREEHIVPLNYTAYKERLDRLEKETERFEKLEDYKNDLSFEYVNYEKELIAKDSLLAEKRERWHKSLSQDVYLAEAINVLKDLKVSNIQNARVSTIKN

SEQ ID NO: 10496 - protein, 345 aa, Arabidopsis thaliana
MDGKASNGNGLEKTVPSCCLKAMACVPEDDAKCHSTVVSGWFSEPHPRSGKKGGKAVYFNNPMWPGEAHSLKVEKVLFKDKSDFQEVLVFESATYGKVLVLDGIVQLTEKDECAYQEMIAHLPLCSISSPKNVLVVGGGDGGVLREISRHSSVEVIDICEIDKMVIDVSKKFFPELAVGFDDPRVQLHISDAAEFLRKSPEGKYDAIIVDSSDPVGPALALVEKPFFETLARALKPGGVLCNMAESMWLHTHLIEDMISICRQTFKSVHYAWSSVPTYPSGVIGFVLCSTEGPAVDFKNPINPIEKLDGAMTHKRELKFYNSDMHRAAFALPTFLRREVASLLAS

SEQ ID NO: 10497 - protein, 419 aa, Bradyrhizobium sp. ORS278
MGSTARAATSDTYRQLNLFGDVFERVRSDYVEKPDDSKLVESAISGMLSGLDPHSSYMDAKSFRDMQVQTRGEFGGLGIEVTMEDGLIKVVSPIDDTPASKAGILANDIITNLDDEAVQGLTLNQAVEKMRGPVGTKIKLKVVRKGTDNPLDITLTRDNIRVRSVRSRPEGDDIAYIRITTFNEQTTEGLKKSIADLQTSIGDKLKGYIIDLRNNPGGLLEEAVTVSDAFLERGEIVSTRGRNAEETQRRAAHAGDLTKGKPVIVLINGGSASASEIVAGALQDHKRATLVGTRSFGKGSVQTIIPLGAGNGALRLTTARYYTPSGKSIQAKGIVPDIEVLQDVPEELKSRTDTKGEASLRGHLKNDGDEKTGSQSYVPPDAKDDKALKMAADLLHGIKNSANTPAPTEKASADKPKAN

SEQ ID NO: 10498 - protein, 725 aa, Candida albicans SC5314
MADSYVPLPQSAGYAVVVGLGFVFAFGMMLTTYILRRYNKEVMTAEEFATAGRSVKTGLIAACIVSSWTWSATLNGSTSQVYNNGVCGSIFYAMGATVQITLFACLAIKARERAPAAHTYLEIVKGRYGTTTHFVYIFWGIVTNILVTSMLLSGGSATVNDLTGMNIVAAILLLPLGVVIYTLFGGIKATFLTDYAHTVVLIVIIFIFAFTTWATSSKLGSPQAVWEIVTKLAESNPREGNAGGSYFTMHSRSGGMFFVINIIGNFGTVFLDNGYFNKAFAANPSSTYKGYIFGSLAWCAIPALCSLTMGFAALALEHTEYWPLGRPMTAAEVASGLVLPNAASALLGKAGAVLALLMVFMAVTSAMSAELIAVSTIATYDIYRTYINPNASGKKLIWVSHLSTVIFAYTMAGFAIGLYYAKVSMGYLYEMMGVIIGGAVLSSALTILSKRQNWHAATFTPIISTALAIMAWLVCTKKKFGSVTYLKTFEDDAMLTGNCVALLTPFIIVPILTFIFKPQNFDWKLLDQRITRVDEEEELAEALGGTVSSDPERLHPIKSQISVIASQLVEGEREQYQKEKEILNKSFKICCIVCCTLAICLVVLFPMPLYGTKYIFSKKFFTGWVVVFIIWLFYSAFQVIIFPIWESRTDLYHTFRGIYWDLTGQTYKLKAWQNEHPEEMHAVRSQLQAQLSRTAVTHEIVDGKAFGDGYVTPANIDDALEEKKG

SEQ ID NO: 10499 - protein, 543 aa, unidentified eubacterium SCB49
MKKKLIITGVAVVVFFTSVGFVNNKSDFFEIAKQIEIFTTLYKELNMNYVDEQTPATLMDKAIEGMLEDLDPYTRYWNEQAVEDARISNSGVYTGVGASVRTLDDEMILIEPFKDYPADKAGLKAGDKIIEIDGNKIAGYEGDARDLLKGTAGTKAKITYTRQGKEAKTTVERSAVDVDAVPFYKLAQDNIGYIVLTKFNKKTTIQTRSALEDLKSQGATKIILDLRGNPGGLLNEAISIVNLFVPKGEVITTTKSDIPKYNKVYKTKKDPVDLDIPLVVLVNGRSASASEIVSGGLQDLDRAVVVGARSFGKGLVQRPKKLTYGTQLKVTISRYYTPSGRCIQALDYWNRDENGDPIRVDSKEYNAFKTKGGRTVYDGGGILPDVELETAVFSPITTALLKDNAIFDYATEYYYKHPMTDWNGYEFSDADFQDFLGFLKRNDFEYETDTEKKFEEALRRADDDDLKDEISSSYNTLMTQIDAAKERKITKRKVEIKSLLTDEILKRYFYAEGLYDYQLTHNPEILKAIEILNDEKQYAKILK

SEQ ID NO: 10500 - protein, 1060 aa, Synechococcus sp. RS9916
MSLLHATWLPAIRTPTSSGRPALLVWADTWRVAEPAGPGVTPAIHPFTLSHDDLRAWLSERDLLPDGIIDATACLTLPSRTVKPRKKRGDTSPEPEGWTGLPLQAGEPIPKQTEWWPWQVQGLAIEPGAATAWLAKLPLSGRNPDLADELRWWSHMQRWALSLIARGRWIPQVELSKGEGYPHRARWVPLLNREEDRRRLEDLAARLPLVATCALPWREPTGRRSNRTTRLRPEAMRAANPVASCRPRSGRLRIATLLEGLVDAQLRTGFTPATEGLDPLLAAWQEALASDTGVIQLGDEEAERLATASNHWREGVAGNVAAARACLELETPDDGEDLWTLRFSLQAEADPTLKVPAGVAWACGPKGLQLGEIAVEHPGELLLEGMGRALTVFEPIARGLDSSTPEAMQLTPAEAFVLVRTAARQLRDVGVGVELPASLSGGLASRLGLSIKAELPEKSRGFTLGEPLDWEWELMIGGVTLTLRELERLAGKRSPLVRHKGAWIELRPNDLKNAEKFFAAKPDLSLDDALRLTATEGDTLMRMPVHRLEAGPRLQAVLEQYHQQKAPDPLPAPEGFCGQLRPYQERGLGWLSFLHRFDQGACLADDMGLGKTIQLLAFLQHLKAEQELKRPVLLVAPTSVLTNWKREATAFTPELEVKEHYGPRRPSTPAALKKALKGVDLVLTSYGLLQRDSELLESLDWQGMVIDEAQAIKNPSAKQSMAARDLARPGRNSRFRIALTGTPVENRVSELWALMDFLNPRVLGQEDFFRQRYRMPIERYGDMSSLRDLKARVGPFILRRLKTDKAIISDLPEKVELSEWVGLSKEQKSLYAKTVEDTLDAIARAPRGQRHGQVLGLLTKLKQICNHPALALKEEQATDDFLQRSAKLQRLEEILDEVIEAGDRALLFTQFAEWGHLLQGYLQRRWRSEVPFLSGSTSKKERQAMVDRFQEDPRGPQLFLLSLKAGGVGLNLTRASHVFHIDRWWNPAVENQATDRAYRIGQTNRVMVHKFITSGSVEEKIDRMIREKSRLAEDIIGSGEDWLGGLDMGQLKELVSLDDT

SEQ ID NO: 10501 - protein, 508 aa, Chlorobium tepidum TLS
MKEIREGAPGAQLDDLVAALGALAERRGGDGARAVITGVTCDSRAVTPGALFVAVRGLVADGHHFIGAAIEAGAVAVACEELPAAYSDSVTWLVVPDARKALAELSKAFYGNASDKLMLIGVTGTNGKTTTARLVTSMLNASGVAAGYIGTGLCRIGNHDIPLERTTPEPNRLHDLFRQMVDAGCRAAVMEVSSHSLVLDRVHGLFFRAAVFTNLTPEHLDFHETMEEYAEAKRLLFDQLNAEGFAVINADDPRAEFMAARLAPERVFCCSTGDNTSLCDPARRFHAVITASTVEGSKADVTFDGQSMAMQVPLPGAYNVMNMLEAFTVGVGLGIDPATALRSLAAADAIAGRMERIWSRDRSRCAVVDYAHTPDALQKALEALRAVTPADAKLAVVFGCGGNRDRQKRPEMGRIAAELADRVILTSDNPRDENPEAILDEVEAGMAGRVHLRIADRAEAIRRAVEQLGAGDILLVAGKGHEAYQEIRGVKHHFSDRECLEACFAQMK

SEQ ID NO: 10502 - protein, 1474 aa, Arabidopsis thaliana
  misc_feature (29)..(29): Xaa can be any naturally occurring amino acid
  misc_feature (39)..(39): Xaa can be any naturally occurring amino acid
  misc_feature (269)..(269): Xaa can be any naturally occurring amino acid
MEANEESLKGKIEKLEGKEVIVESKEDEXDIIIEENREXQEVLEVKARDGRGEQNDVLMEENNNQGEQKDEEMQDASSRSESSDFNSDEDEQILSRRDDELDLEKPLSEEEIDELISDLLAVESKAAEAQEALEKESLSKVESEVREELAQALRGDELDEAVAAEMMTFKDEWEATLDELETESATLLEQLDGAGIELPKLYEMIESQAPNGCYTEAWKQRAHWVGTQVTKETVESLANAERFLHTHRPVRKRHGKLLEEGASGFLEKXLADGAVKESLAGTSNLDWSSLNKVFSEKRDESVSFGSKQWASVYLASTPHQAAAMGLEFPGVNEVEEIEEIDASLADPFLADAIDNERELALTEEQKTNYIRVKEEDDITCDRVLQLRLKRKRRKKRSKQVIRCAAENMDDDSVYLDGNNTTPNFAKDQVKSPETSTQVHNSEVNIEENGNFSNSDVDKMTPSTHINVDAKRDDSQNPANNFRCTACNKVAVEVHSHPLLEVIVCMDCKRSIEDRVSKVDDSLERHCEWCGHIADLIDCRTCEKLFCASCIKRNIGEEYMSEAQSSGWDCCCCSPIPLQRLTLELEKAMRDKKSIELSSDSSSDSSSDNNSVDTDADVNVTISSKKKSKKKIRRIIDDAELGKDTRTKIAIEKARQERLRSLQFSARYKTISSMGDVKSIPEGAEVEVLGDAHSGYIVNVVREIGEEAVRVPRSISAKLKVHQVTGIRFMWENIIQSISRVKSGDKGLGCILAHTMGLGKTFQVIAFLYTAMRCVDLGLKTALIVTPVNVLHNWRSEFEKWMPSEVKPLRIFMLGDVSRERRFDLLTKWRKKGGVFLMGYTNFRNLSLGRGVKDLNAARGICNALRDGPDILVCDEAHIIKNTKADTTQALKQVKCQRRIALTGSPLQNNLMEYYCMVDFVREGFLGSSPEFRNRFQNPIENGQHMNSTAEDVKIMNQRSHILYEQLKGFVQRMDMNVVKKDLPPKTVFVISVKLSPLQRILYQRFLELYGFSDGRTDERMRKNFFAAYQVLAQILNHPGIPQLRSEDSKNGRRGSIVDIPDDCSSDENIDYNMVTGEKQRTMNDLQDKVDGYLQKDWWVDLLQKNNYKVSDFSGKMILLLDILSMSADVGDKALVFSQSIPTLDLIELYLSRVPRHGKQGKFWKKGKDWYRIDGKTESSERQKLVDRFNEPDNKRVKCTLISTRAGSLGINLYAANRVIIVDGSWNPTYDLQAIFRAWRYGQKKPVFAYRLMARGTIEEKIYKRQVTKEGLAARVVDRQQVHRTISKEEMLHLFEFDDDDEKSEAVTEISKQNEAGHSNLVEQAILWTKKATLSRVGGDKLMENLLQRHGPNFHEHETLLQENEEERLTKEEKDMAWEVYRRALEWEEVQRVPFSESPVVPKPSPSTQTEPLPQPKGFNRSRFVNRNCTRIAHQLTLISQGLKVGSSTVCGECGRVIRWEDVIPASKLSAVIVN

SEQ ID NO: 10503 - protein, 187 aa, Zea mays
MEAEAAAKRAREGGEDATAPVAGAEAVVAGAGEQAGISAVIPGWFSEISPMWPGEAHSLKVEKVLFQGKSDYQNVMVFQSSTYGKVLVLDGVIQVTERDECAYQEMITHLPLCSIKDPKKVLVIGGGDGGVLREVSRHISVEQIDICEIDKMVVDVSKQFFPHLAVGFEDPRVSLHIGDGVAFLKNA

SEQ ID NO: 10504 - protein, 490 aa, Ehrlichia canis str. Jake
MLQKHKKLDILSVFKLGNLIMFLSTEDTLNYIKKNAINFIDLRFTDSNGRWHHITRSAETTDAQVLLTGINFDSSSISGWQSIEKSDMILLPDISTAFVDPFSAQSTLVIICNIVDPYNQSQYAKDPRYTAQKAYEYMLSTGIADKCYFGPEVEFFVFDNVQFYTGMYDSYFKIESAEHDISYQRREFSNNNHRPRVKGGYMPTPPIDSLHDIRSEMLTMFKEVGITPLIHHHEVAASQCEVGFQYDELLASADNVQKCKYIVHGVTSSYGKTATFMPKPVIKDNGSGMHCHQSLWKDNVNLFVNSDGNISDTCLYYIGGIIKYGKAINAFTNPSTNSYKRLVPHFEAPTWLTYSYENRSAAIRIPYVPQNDVNAKRIEVRFPDPLANPYLCFSAQLMAGLYGIQNKIHPGPAIDKNLYSLNKAELQQLSSVANSLEDSLESLDKDREFLLAGNVFTNDQIDSYINLKTLEVKDLQLHPHPIEFINYYSS

SEQ ID NO: 10505 - protein, 166 aa, Oryza sativa
MALVEDNNAVAVSFSEEQEALVLKSWAILKKDSANIALRFFLKIFEVAPSASQMFSFLRNSDVPLEKNPKLKTHAMSVFVMTCEAAAQLRKAGKVTVRDTTLKRLGATHLKYGVGDAHFEVVKFALLDTIKEEVPADMWSPAMKSAWSEAYDHLVAAIKQEMKPAE

SEQ ID NO: 10506 - protein, 314 aa, Synechococcus sp. PCC 7002
MAGSEVKADYWINEYITPWDIYSHGITKILAYKQTQFQEMAIVESGAYGKALVLDGKWQSCTGDEFLYHEPLVHPAMIAHGAPKKVLILGAGEGATVREVLRWQSVEKVMMVDIDGEVVEACKEFLPEMHQGVFDDPRLDLRIEDAFKILETTTEKWDVIISDLSDPIEEGPSFKLFTKEYFTQLKDVLAPGGVVAVQAGPTAPANLRLHARLVNTLKAVYANVSSYSTPISSYGSPWGFAICTDGDLNLRPDPEAVDQLLAEQTTGGFKIIDGLTLLGMLQTFRHVREAIATHTEVFTLAEPPKFFGKGHKAQ

SEQ ID NO: 10507 - protein, 469 aa, Sinorhizobium meliloti 1021
MTTANEVLKQIKENDVKFVDLRFTDPKGKLQHVTMDVVCVDEDMFADGVMFDGSSIGGWKAINESDMVLMPDPETAHMDPFFAQSTMVIFCDILDPVSGEAYNRDPRGTAKKAEAYLKASGIGDTVFVGPEAEFFVFDDVKYKADPYNTGFKLDSSELPSNDDTDYETGNLGHRPRVKGGYFPVPPVDSSQDMRSEMLTVLSEMGVTVEKHHHEVAAAQHELGVKFDALVRNADKMQIYKYVVHQVANAYGKTATFMPKPIFGDNGSGMHVHLSIWKDGKPTFAGDEYAGLSESCLYFIGGIIKHAKALNAFTNPSTNSYKRLVPGYEAPVLLAYSARNRSASCRIPFGTNPKAKRVEVRFPDPTANPYLAFAAMLMAGLDGIKNKLHPGKAMDKDLYDLPPKELKKIPTVCGSLREALESLDKDRKFLTAGGVFDDDQIDSFIELKMQEVMRFEMTPHPVEFDMYYSV

SEQ ID NO: 10508 - protein, 792 aa, Ostreococcus tauri
MDGNRAPARIGASRDARAPFRAPCRATATTATTATPRTTSAAGAVKRARGGGRRREAAELEKVRGRCGDIEWRRHRGGRGGTIVEGTTTELGAYEVEIGEEIPEADVASGVVFSRGGTAAVAPREERVEVVSGVKLGGFVAPVRGGGATSSGAKPAAPMRTVEEPLHSDVAENALVLSTRETNFYRRDVRTACPVVCDPFIAKFLRPHQRDGLKFMFECVMGLRASAHTNKAHTGCLLAHEMGLGKTLQVIALVWTLLKQSPFKRGCPTCRRVVICVPASLVGNWAAEFKKWLGPERIDPKVVEGGDKDAQKSFEEFALSSQRRYNVLITSYETLTAKSEALARANIDLLVCDEAHRLKNASQTTKGAMALSSLKCHRRVLLTGTPVQNDLDELWGVMDFACPGLMGDLSSFKTIYATPIEKAGERGAKEDVVRIGNARRDEVSKLIGPFIHSRKADEINASLLPPKTEYVVFIRLTETQRALYVEQLKAKSMQAMLGRIGKTDDAISPLSAIQTLQKLCNAAALASEAHRDDPIETSSKLCVLRSMFRALPSDERIVIVSGFTTTLDLIALLCEGEKLKYDRLQGSTPPKDRTAIVRKFNTTGRILLLSTKAGGVGLNLVGANRLVLVDSSWNPAHDLQAQARIWREGQTKKCTIYRLLSTGTIEERMFQRQELKGSLARTLGFKSTSTASNGGGSSSTFTQAELRDLFSLVKDTKCDTADRIAAQPGDTPKHWCDDASLTTTDVLLLNVARDELITFVAELPSAESDTTIVCEDDDDEFSFDCPSESDGE

SEQ ID NO: 10509 - protein, 90 aa, Zea mays
  misc_feature (29)..(29): Xaa can be any naturally occurring amino acid
MTLYISDYTISYTISFFIPGWIFYIIPMXPIKAHSFNEYNVLFQCKLYYQNVMVFQFFTYGKVLFLDLIIHVTERDEFSYQEIITHLPLC

SEQ ID NO: 10510 - protein, 187 aa, Macrozamia communis; identical to SEQ ID NO: 6957

SEQ ID NO: 10511 - protein, 283 aa, Rhodospirillum rubrum ATCC 11170
MTEWFSETLHPHWRQSFAADRVLLREQTAHQDLVILENQTFGRVMVLDGMVQLTERDEFVYHEMIAHVPLFGHGAARRVLIIGGGDGGTLREVLRHKTVERATMVEIDATVVEMARDHMPMVSDGAFDDPRAELIIADGIAFVAGAHQPYDVIIIDSTDPFGPAEGLFTPAFYGACRQLLTPGGVLVVQAGVPFLQPREIAHVNAALSAAFPEVAFYAIAVPTYVGGLMTLGWASEDAGKKVPDPAVLAARVAASGLAFGYYSPEGHAGAFALPPHIRAAARG

SEQ ID NO: 10512 - protein, 162 aa, Streptomyces pactum
MSLYDIPVRTLAGEPHDLSRYRGKALLVVNVASQCGRTRQYAALEELHRRYGPRGFSVLGFPCNQFGEQEPGGPEEIERFCTTTYGVTFPLFEKVEVNGPGRHPLYALLTAAPDDRGVAGDIEWNFEKFLISPEGRVAHRIASRTRPDDPDVVARIEALLPA

SEQ ID NO: 10513 - protein, 1386 aa, Rhodopirellula baltica SH 1
MSFHDLKTKFESLDGLEQLSCQLLAIAFDTVDLSDLTKMVRHALPCLTKVGKPTPPKVTQAIIKPALKHLQNIGCIQSQSNLRFHIQPSVADAILRSSIHEGTFSDLVFIVNNLATQNRFPWRQIHQSEQQKRQRLAFYQGDVESYFNLAPEEAIHTRKLGLLTPFDETVYEGLPIELQDAYWPVFGPSLLHTANGSTGMMDHVEAWLKRSSPDDEVAISVGTDLLFAAGRCSTLQPLAELLKNQRPEILGLVCLLQGDRDQATQHFATAMPATSLGKSSSLTACQTFAGLYYPLLLLRQSDPQATATAQKIIQRRIKKLDQDLLLGCDAVLSGCDFLEDPGLAQHIQASWTDDVSRPLATLLSGYVREICSSSETASRELNNLAQIGKLYLASGLDWLAAEAMTLVNEHKPNQSTAKTIKKIYNTTGTSPMAGQFERSPIWKKQLGALQAFAASFQPASSPAQQAGQATPQESDRLAWLVNIAASGRSLGCRPVHQSYSKKGWSKGRPIALERIYDPSRLAEFDFLKPEDQKICGSLRCETSRDHYGYTEYHYYFETALLVDALIGHPCLFMDDDARSPIEIEKNHARLVVERSPEGGATISLSPRPTSRESHLLVHRESTSKFSIVQFSDAQLKLASMLADGLTVPDSAVDQLLDAVRPLAPIAPLHSEIEVTADGAEQVVADNTIHAHLTPYDHGLQIAFFTRPFGDSGGFFVPGQGSRTVVTKINGQVRSTRRDLEAESESLRAVQNDCDFLGQQADAEVIDLPTAAEALEALLELNSLVEESRLTLHWPKGQAFQIAGSADESDWKIKINGGQDWFAASGKLHVDSNLAIEMMDLLEMASASTSRFVQLNDGRFVALTEHFRKRLETMAAYTDRRQDQVRFPTIRATAIAELTGNSDLTADQQWKSQIKRIESADRVRPKLPKTLNADLRDYQVDGFKWMSRLAHLGAGACLADDMGLGKTLQCLAVLLNRGKSGPALVVAPTSVAANWVSEIARFAPSLRPILFSEADRETVIESLGKRDLLICSYGLLANEAEKLQSRRWQTLVLDEAQAIKNADTKRSEAAMGLEADFRVVLTGTPMENHLGELWNLFQFINPGLLGSSESFQERFAIPIERDHRRDVQRQLKQLIAPFILRRTKSQVLDELPPRTEITVPIELGEDEAAMYEAMRRKALQNLEDSDDDRPVHIKILAELMRLRRFCCHPDLVDPDAGLKAAKLERFTDTVTDLIEGGHKVLVFSQFVGHLHLLRDRLDERKISYQYLDGSTPAKKRKTSVDAFQDGEGDVFLISLKAGGVGLNLTAADYVIHMDPWWNPAVEDQASDRAHRMGQQRPVTVYRFITTGTIEERILQLHESKRDLADSLLEGTESSAKLSAEELMKLIL

SEQ ID NO: 10514 - protein, 122 aa, Pectobacterium betavasculorum
LLDALNSRKSYTVRIVGDNTQVDTVSNVSAVHSGSQDAVALISVADLVTTAVGPQILEKIAGTIAHGLVKRHDDGNIRPLNIIACENMVRGTSQLKQHVLKLLPEAHQEWVVEHVGFVDSAV

SEQ ID NO: 10515 - protein, 122 aa, Pectobacterium betavasculorum
LLDALNRRKSYTVRIVGDNTQVDTVSNVSAVHSGSQDAVALISVADLVTTAVGPQILEKIAGTIAQGLVKRHDDGNIRPLNIIACENMVRGTSQLKQHVLKLLPEAHQEWVVEHVGFVDSAV

SEQ ID NO: 10516 - protein, 151 aa, uncultured Frankia sp.
SRDPRNTAKKAESYLRGTGFADTAYFGPEAEFYIFDDVRYDYNPYGSLHAVDSIEAAWNTARKEEGGNLGYKPRFKGGYFPVPPTDHFTDLRSEMSRALIRAGITVEMQHHEVGTAGQAEIDIRYDTLLRTANNLMLYKYIIRNVALSRGK

SEQ ID NO: 10517 - protein, 293 aa, Saccharomyces cerevisiae
MAQEITHPTIVDGWFREISDTMWPGQAMTLKVEKVLHHEKSKYQDVLIFKSTTYGNVLVLDNVIQATERDEFAYQEMIAHLALNSHPNPKKVLVIGGGDGGVLREVVKHDSVEEAWLCDIDEAVIRLSKEYLPEMAASYSHPKVKTHIGDGFQFLRDYQNTFDVIITDSSDPEGPAETLFQKEYFQLLNSALTEKGVITTQAESMWIHLPIIKDLKKACSEVFPVAEYSFVTIPTYPTGTIGFMVCSKDKTCNVKKPLREISDEKEAELYRYYNKKIHEASFVLPTWAAKELN

SEQ ID NO: 10518 - protein, 284 aa, Silicibacter sp. TM1040
MTKEVWNTERLHDHFAQSLRVSEMYYDSKTEHQRLKVFQNGTFGRVLTLDDVVQTTEGDNFIYHEMLTHVPILAHGAAKRVLIIGGGDGGIAREVLKHASVEHVTMVEIDAGVVDFSKEYLPMLSQGAFDDARLNLVINDGAVFMKETEDKFDVIIVDSTDPIGPGEVLFTDTFYGHAARALTEDGIIVTQNGVPFMQGDELTNTMRAFQALFQDATCYLATIPTYVGGPMALGWGSHSTKARSVDLTTLEARFAAAGLSPDYYTPEVHKAAFALPGYVKKLFP

SEQ ID NO: 10519 - protein, 151 aa, uncultured Frankia sp.
SRDPRNTAKKAEAYLRGTGFADTAYFGPEAEFYIFDDVRYDYNPYGSLHAVDSIEAAWNTARKEEGGNLGYKPRFKGGYFPVPPTDHFTDLRSEMSRALIRAGITVEMQHHEVGTAGQAEIDIRYDTLLRTANNLMLYKYIIRNVALSRGK

SEQ ID NO: 10520 - protein, 566 aa, Xylella fastidiosa Ann-1
MLAAAMRGMAVTFFSQFMVSCMHSIQIVLAMLLVVAASGYLVRIIPFSMPLPLLQIALGAVISGVFDGGYELQPEAFFLLFLPPLLFLDGWRIPKQGLFRDKNVILELALGLVVFTVLGIGFLIHWMIPTMPLPLAFALAAILSPTDPVALSSITSRVPIPKRMMHILEGESLLNDATGLVCFQFAVAAVLTGHFSLATASLTFVWVLVVGLSLGIATTYVLSRVQRWVWRHFGGEPAAAILFNLLTPFAAYLLAEGMQASGILAAVAAGITMSYVELSGNAQATIRVQRWAVWETVQFTFNGIIFVLLGEQLPGILDDLVHSAQQAGHMNVGWLLVDVAVISAGLMLLRFLWVWLSLQWNLFKAVCCGKQRISPPWQIVVAMSLSGVRGAVTLAGVLTLPLLMPDGTPLPARQLVIFLAASVILVSLLLASVALPYLLRGLELPEKSSYDKEEDFARRVSAQAALEAVERLRQRLVEDSANAERYNEAAHQVSQLYQRKLGAVDLANVDPQETKVFEQVVRRFRQVGLAAERDELFRLAREHNISDELLQRMVRNLDLIEARRRS

SEQ ID NO: 10521 - protein, 122 aa, Brenneria salicis
LLDALNSRKSYQVRIVGEQTQLDTVSNVSALHSGSPQAVALIADVDLVTTAVGPQILEKIAGTIVQGLVKRHADGNTKPLNIIACENMVRGTSQLKQHVVKLLPEAQLAWVDEHVGFVDSAV

SEQ ID NO: 10522 - protein, 1135 aa, Nicotiana plumbaginifolia; identical to SEQ ID NO: 6971

SEQ ID NO: 10523 - protein, 116 aa, Zea mays
ASTIAPTRSASSSPASDPHSPPLLPPPPAPAPFSPLLASPRARFYKGFGGGARSLAMADDGGSHEGSGGGGGVREQDRFLPIANISRIMKKAVPANGKIAKDAKETAAKPRVLKQR

SEQ ID NO: 10524 - protein, 448 aa, Mycobacterium leprae TN
MDRQKEFVLRTLEERDIRFVRLWFTDVLGYLKSVAIAPAELEGAFEEGIGFDGSSIEGFARVSESDTVAHPDPSTFQILPWATTAGHHHSARMFCDITMPDGSSSWADPRHVLRRQLTKANDLGFSCYVHPEIEFFLLKAGPEDGSMPIPVPVDNAGYFDQAVHDSALNFRRHAIEALEFMGISVEFSHHEGAPGQQEIDLRFADALSMADNVMTFRYVIKEVAIENGARASFMPKPFAQHPGSAMHTHMSLFEGDVNAFHSDDDPLQLSDVGKSFIAGILEHASEISAVTNQWVNSYKRLVVGGEAPTTASWGAANRSALVRVPMYTPHKTSSRRVEVRSPDSACNPYLAFAVLLAAGLRGVEKGYVLGPQAEDNVWDLTPEERLAMGYRELPTSLDSALGAMEVSEFVAEALGEHVFDFFLRNKRAEWANYRSHVSLYELKTYLSL

SEQ ID NO: 10525 - protein, 246 aa, Vitis vinifera
MASMPFSVSFTAHSPGFAQTKAAHHHSWPSSPYPSMAFLMPSTKSSFGASNSAFLRTGFSLCSSEIPGVSLKSRFSGGVYARAATEKSLYDYTVKDIEKKDVPLSKFKGKVLLIVNVASKCGLTASNYSELSHIYEKYKTQGFEILAFPCNQFGGQEPGSNPEIKQFACTRFKAEFPIFDKVDVNGPTTAPVYQFLKSNAGGFLGDLIKWNFEKFLVDKNGKVVERYQPTTSPFQIEKDIQRLLAA

SEQ ID NO: 10526 - protein, 538 aa, Arabidopsis thaliana
MLDSLVSKLPSLSTSDHASVVALNLFVALLCACIVLGHLLEENRWMNESITALLIGLGTGVTILLISKGKSSHLLVFSEDLFFIYLLPPIIFNAGFQVKKKQFFRNFVTIMLFGAVGTIISCTIISLGVTQFFKKLDIGTFDLGDYLAIGAIFAATDSVCTLQVLNQDETPLLYSLVFGEGVVNDATSVVVFNAIQSFDLTHLNHEAAFHLLGNFLYLFLLSTLLGAATGLISAYVIKKLYFGRHSTDREVALMMLMAYLSYMLAELFDLSGILTVFFCGIVMSHYTWHNVTESSRITTKHTFATLSFLAETFIFLYVGMDALDIDKWRSVSDTPGTSIAVSSILMGLVMVGRAAFVFPLSFLSNLAKKNQSEKINFNMQVVIWWSGLMRGAVSMALAYNKFTRAGHTDVRGNAIMITSTITVCLFSTVVFGMLTKPLISYLLPHQNATTSMLSDDNTPKSIHIPLLDQDSFIEPSGNHNVPRPDSIRGFLTRPTRTVHYYWRQFDDSFMRPVFGGRGFVPFVPGSPTERNPPDLSKA

SEQ ID NO: 10527 - protein, 995 aa, Bacillus halodurans C-125
MIPNIIVHGGWFKDHFFIWGEEQASSSSGRIVRFEYPFLYSPFELRLALFRHDPHSFYGSFLQHGQAVLEVPLAERAFHSPAGTTTIYQAEPSMKSFRFPVEGIMLSADELFDYGSFLSKLGSSSSDEWVLADDFHFWLHFFLYIRQSIRNGAFSPSAQGTWVLNNPHWKAWAEAMPEVCLALTENAPLIQTTEEEPVHEQLQAIGEHLTDKWIRRLLQTDKGKDRFLSYVQSLHPSVKRTLEQMGPYGEGPTEETHSEKVDRDHFLEAVGVKPQAPFQCAFVLKEPITGKTDWTLSLCVVDKVNPSIIVEMEELSQGQHPWRMNPVPLLKERLPAVTDRLPLLQSIKLSSPVIKLSNEEAYHLFTTYDEYLKELGFRLIVPRWLTQRRPLKVKLKMDAHALHSEVEPLLNWQSVASFQYELAIGDNRVSLEEFQTFVDENRPFLQLNGEWIAWDPSLAKKLRAYLNKLEHGQTTYLDAWRLEQSEEGSFQEAVEWELEWSAEIEQKIKQLFQQNVPLRPAPASLQATLRPYQEEGASWLIHLRETGFGGCLADDMGLGKTVQTISYILYVLEHGQQNKKPFLLFCPTSLITNWVHECKTFAPSLNVYVHHGQQRHQENETAWREADIVISSYSLAYKDLDQWKDIEWNGLILDEAQQIKNVDTKQRQAVKSIRAAHRIALTGTPIENRLKELWSIMDVLNPSYLKSLTHFTRTFIKPIEREKDEARLQELQQLIQPLLLRRKKSDEALALQLPEKREHVHRVSLSVEQAALYQAVVDNMVHQLGDVTHMERRALILKTLTKLKQICNHPAHFLKDKNVDAHQSEKWELLLTLSEQIMDRQEKMLIFTQFKEMGHLMQDAFQSQIGTPIPFLHGSLSRQQRQEAVERFQNDRELPIFILSLKAGGVGLNLTAANHVIHYDRWWNPAVENQATDRAYRIGQTADVTVHKLMTEGTLEERIHQMLESKQALAEQILTAGENQLTELTDDELLALIRL

SEQ ID NO: 10528 - protein, 568 aa, Glycine max
  misc_feature (131)..(131): Xaa can be any naturally occurring amino acid
MTSELEISPADTRKAPGKEQQAAGVGILLQIMMLVLSFVLGHVLRRKKVYIIPEASASLLIGLIVGILANISDTETSIRGWFNFHEEFFFLFLLPPIIFQSGFSLAPVGPSTLRSVLFAGSLLCLYGLAFXLGVNNVIPLQKPFFSNFGAIVTFAIFGTFIASIVTGILVYLGGLLFLMYRLPFVECLMFGALISATDPVTVLSIFQELGTDVNLYALVFGESVLNDAMAISLYRTMSSVRADPSGQNLFMVVVRFLETFVGSMSAGVGVGFISALLFKYAGLDIDNLQNLESCLFVLFPYFSYMLAEGLGLSGIVSILFTGIVMKHYTYSNLSQSSQRFASAFFELISSLAETFVFIYMGFDIAMEQHSWSHVGFIFFSIIFIGIARATNVFSCAYLVNLVRPTHRKIPPKHQKALWYSGLRGAMAFALALQSIHDLPEGHGQTIFTATTAIVVLTVLLIGGSTGSMLEALDVVGGDNDSPLASVGTITNFDGNNGYIAPHYNEESSSGNKIKMKLKEFHKTAASFTALDKNYLTPFFTSQNGDEDDEAEPFTSTRSELHGQNHYSS

SEQ ID NO: 10529 - protein, 575 aa, Gibberella zeae PH-1
MALHSRWSQPIPKCSLQQWIFGSSNGPMEDADKSILIDADRPDTHFLTKSQYRLLSKQVALGLIKNGVQPQSRVLVFSANNVYFPSVFLGILMAGGIFTGANPSFTPRELAYQLQNSEATHMFVHAGQLPTALKAAEEVGLKKENIFVLDPSVLPPVGPNPALPAARDDGLRLWTELIADNHEQAKSWQWVEPQDPEDTACCLNYSSGTTGVPKGVEISHFSYVANGSGVVMMSDMEPDPEHRKHAKGLAFLPMYHAYAQTYYVSIYPKVSIPAYIMPSFDFEKMLQHIQRFRVTSLLCVPPILVYLSKHPLVKKYDLSSVNRVSSGAAPLSHEVIHNVEKLWPSGDVTVKQGWGMTEVTCTCMTWDPRHKTDPDKVGELAPNCSAKIMELDGKTQINKPNERGELWVTGPTLMKGYWKNPSATESTISVDEDGTRWLKTGDIAYVDAFKPGGIFHIVDRIKELIKVKGNQVAPAELEAVLLDHPEIADAAVIGIPFEGDEAPRAYIVKAPGSQLTEKQVVDWMESRVARYKRLKGGATFVDMIPKNPSGKILRRALRDKAKAEMDANKAPSSRL

SEQ ID NO: 10530 - protein, 167 aa, Oryza sativa Indica Group
MAGETGEGGGSHSQPEKQPGQAAAAASMAEAEVEELPKAIVRRLVKEKLAQVAAGGAEVIVNKDAMSAFTESARIFIHYLSATANDMCKESKRQTINADDVLKALDEMEFPEFVEPLNTSLQEFRNKNAARRSETTQKKAEKRRKIDKESLPQEQNDAADNGKTDED

SEQ ID NO: 10531 - protein, 191 aa, Alteromonadales bacterium TW-7
MLKKMIIGFTALLVSSTLMAQTQPNNEAVNPQACDDFTNVDIRKLRSKESINLCDYKNKPLLIVNTASNCGFTPQFESLEKLHKTYKDEGLVILGFPSDDFFQEEDNEKETAKVCFINYGVTFPMFATSEVRGSDANPIFKHLNEQTSSPNWNFYKYLVSADRKTILRFNSKVKPDSEKMIKAVENSLSKI

SEQ ID NO: 10532 - protein, 1241 aa, Saccharomyces bayanus
MHIRGTMSRVPTLASFEVRYKKSFGHKFRDFIALCGHYCSPIKKYIFPNFIAVHYFYTIVLTLITSILLYPVKNIRYIDALFLAAGAVTQGGLNTVDVNNLTLYQQIILYIICCISTPIAVHSCLAFVRLYWFERYFDGIRDSSRLNFKMRRTKTILERELTARTMTKSKTGGTQRVSRPGKSDKRDDFQEKLFNGEMVNRDEQDSVHSSHNSRDSNSNANTNSSNNNSINHNGSSGSLDDYVREDKADEVEKYHGNKSYSSVGSSSNTATDENISQKLKPSSLRFDESQNKRKRTGAPSEKFAKRRGSRDITPEDMYRSIMMLQGEHEGTAEDEGPPLVIGSPTDGTRNMDNGSESKSAPTMNESKIRIQDKGAKISLDQDSVLHSSNSSACTSDEDSLPTNFGGTTPSLSAKPRESSSGPIAFTEGENADRKQGPSIQFNITKPPRKASKSKRVSTMDDLNPRSIFPHQKKSSKGYIMKHLPKARRIRQQIKRRLSTGSIDKNSSSDALDRGLISGLNDDDDGNEGDNMEEYFADNESGDEDDRMQQSEPQSGSELKLKQQQQHQLQQNLHRMYKTKSFDDNRSKPVLMERSKTIDMAEARDLNELARTPDFQKMVYKNWKAHHRNKPNFKRRGWNGKMFEHGPYTSDSDHNYQDNGNNSNSIVHYAESILHRDNSHRNGSEDVSSDSNETTYPLNGNNDHSQNDANGYPTYNDEEEGYYGLHFDSDYNLDPHHALSSNASKNYLSWQPTIGRNSNFLGLTRAQKDELGGVEYRAIKLLCTILVVYYVGWHIVSFVMLVPWINLKKHYSDIVRSDGVSPTWWGFWTAMSAFNDLGLTLTPDSMMSFDKAVYPLIVMIWFIIIGNTGFPILLRCIIWIMFKLSPDLSQMRESLGFLLDHPRRCFTLLFPKAATWWLLLTLVGLNFTDWILFIILDFGSTVVKSLSKGYRVLVGLFQSVSTRTAGFSVVDLSQLHPSIQVSYMLMMYVSVLPLAISIRRTNVYEEQSLGLYGEMGGKPEDTDTEEDGDCDDEDDDNEEEESHEGGSSQRGKSKKETKKKKKRKENENPNEESTKSFIGAHLRRQLSFDLWFLFLGLFIICICERDKIKDIQRPNFNVFTILFEIVSAYGTVGLSLGYPNTNQSFSRQLTTLSKLIIIAMLIRGKNRGLPYSLDRAIILPSDRLEHIDHIEDLKLKRQARTDTDDPMTEHLKRSISDAKHRWDELKHKRSLSRSSKRSTKTN

SEQ ID NO: 10533 - protein, 469 aa, Vibrio parahaemolyticus RIMD 2210633
MSVENVLSLIQENEVKFVDLRFTDTKGKEQHISIPAHQIDADFFEEGKMFDGSSVAGWKGINESDMVMMPDASSAVLDPFTEDATLNIRCDILEPATMQGYDRDPRSIAKRAEDYMRSTGIADTVLVGPEPEFFLFDDVKFSNDMSGSFFKIDDIEAAWNTGSDIEGGNKGHRPGVKGGYFPVAPVDSSQDIRSAMCLIMEEMGLVVEAHHHEVATAGQNEIATRFNTLTTKADEIQIYKYVVHNVAHAFGKTATFMPKPLVGDNGSGMHVHQSLAKDGVNLFAGDKYGGLSETALYYIGGIIKHARAINAFANPSTNSYKRLVPGFEAPVMLAYSARNRSASIRIPVVPSPKARRIEARFPDPAANPYLAFACLLMAGLDGIKNKIHPGEAMDKDLYDLPAEEAAEIPKVAESLEVALNALNEDREFLTAGGVFSDDFIDSYIALKSKDVERINMATHPLEFELYYSV

SEQ ID NO: 10534 - protein, 444 aa, Campylobacter jejuni RM1221
MMELILKTKRFFAGLAGFATTFILCLFLTSHLQAKVDQKEEQVQKRLEALDKLTKTLAIVEQYYVDDQNISDLVDKSLSGLLSNLDAHSSFLNEKDFNDMKIQTNGEFGGLGITVGMKDGALTVVSPIEGTPADKAGIKSGDIILKINDEATLGINLNDAVDKMRGKPKTQITLTIFRKGATKPFDVTLTREIIKIESVYAKMIENENILYLRVTNFDKNVVDVASKELKKYPNVKGVILDLRNNPGGLLNQAIGLVNLFVDKGVIVSQKGRIASENQEYKADPKNKISNASLVVLVNGGSASASEIVSGALQDLKRGVIVGENTFGKGSVQQIIPINKTEALRLTIARYYLPSGRTIQAVGVKPDIEVFPGKVNTQEDGFSIKESDLKQHLESELEKIDKNKKEDKQENKDNKNLISQKQINDDAQLNSAIDTIKILNIKQGR

SEQ ID NO: 10535 - protein, 469 aa, Salmonella enterica subsp. arizonae serovar 62:z4,z23:--
MSAEHVLTMLNEHEVKFVDLRFTDTKGKEQHVTIPAHQVNAEFFEEGKMFDGSSIGGWKGINESDMVLMPDASTAVIDPFFADSTLIIRCDILEPGTLQGYDRDPRSIAKRAEDYLRATGIADTVLFGPEPEFFLFDDIRFGTSISGSHVAIDDIEGAWNSSTQYEGGNKGHRPAVKGGYFPVPPVDSAQDIRSEMCLVMEQMGLVVEAHHHEVATAGQNEVATRFNTMTKKADEIQIYKYVVHNVAHRFGKTATFMPKPMFGDNGSGMHCHMSLSRNGVNLFSGDKYAGLSEQALYYIGGVIKHAKAINALANPTTNSYKRLVPGYEAPVMLAYSARNRSASIRIPVVASPKARRIEVRFPDPAANPYLCFAALLMAGLDGIKNKIHPGEAMDKNLYDLPPEEAKEIPQVAGSLEEALNALDLDREFLKAGGVFTDEAIDAYIALRREEDDRVRMTPHPVEFELYYSV

SEQ ID NO: 10536 - protein, 496 aa, Corynebacterium diphtheriae NCTC 13129
MIDLTVEQIARIVGGTLTQGTDPETVVTGPVEFDSRKVSEGSLFVALAGARVDGHDFVPAALESGAAAALVAHPVKIDSGLAPAIVVPPATGQQQSANSYATEHDEDGSVAAVLQGMGLIARRVIDTLTAQGLTVMGVTGSAGKTSTKDMLASILSNQAPTVAPPGSFNNEIGHPYTALRCTEQTRYLVAEMSARGIGHIAHLAQIAPPKIGVVLNVGTAHLGEFGSREVIAQAKGELVEALPHDGVAVLNADDDLVAGMRTRTDAKVITFSANSQDADVYATDIELDDYARARFTLHIGEAENVVTLRVAGQHQVSNALAATAAAYAAGIAIDDIAEALSNHLGASAHRMALMHRSDGATIIDDAYNANTESMRAGLTALSTTAHNKSHKGEASHAWAVLGPMSELGEESVAAHEEIGRLLGELNVHGLIVVGDSADSLALADGARRSNVTTLMARDTAEAADLLDQNMGSADVALVKASNAYRLWETAEILASK

SEQ ID NO: 10537 - protein, 669 aa, Brassica napus
MARSLGANGTVVLAIIFFGCLFAFSTAKEEATKLGTVIGIDLGTTYSCVGVYKNGHVEIIANDQGNRITPSWVGFTDNERLIGEAAKNQAAVNPERTVFDVKRLIGRKFADKEVQKDRKLVPYQIVDKDGKPYIQVKIKDGETKVFSPEEVSAMILTKMKETAEAYLGKKIKDAVVTVPAYFNDAQRQATKDAGVIAGLNVARIINEPTAAAIAYGLDKKGGEKNILVFDLGGGTFDVSVLTIDNGVFEVLSTNGDTHLGGEDFDHRIMDYFIKLIKKKHQKDISKDNKALGKLRRECERAKRALSSQHQVRVEIESLFDGLDFSEPLTRARFEELNNDLFRKTMGPVKKAMDDAGLQKSQIDEIVLVGGSTRIPKVQQLLKDFFEGKEPNKGVNPDEAVAYGAAVQGGILSGEGGDETKDILLLDVAPLTLGIETVGGVMTKLIPRNTVIPTKKSQVFTTYQDQQTTVSIQVFEGERSLTKDCRLLGNFDLTGIPPAPRGTPQIEVTFEVDANGILNVKAEDKASGKSEKITITNEKGRLSQEEIDRMVKEAEEFAEEDKKVKERIDARNSLETYVYNMKNQINDKDKLADKLEGDEKEKIEAATKEALEWLDENQNSEKEEYDEKLKEVEAVCNPIITAVYQRSGGAPGGAGGEGATEEEDESHDEL

SEQ ID NO: 10538 - protein, 301 aa, Microcystis aeruginosa PCC 7806
MKIAILSQDASLYSTKRLKEAGEAQGHEVRVINYLRCYMNITSHKPTVVYNGKPLESFDAIIPRIAASKTFYGTAVVRQFEVMNVFTANDSQAISRSRDKLRCLQILAREGIGLPVTGIAHAIEDIDGLIETVGGTPLVIKLLEGTQGIGVVLAETDQAAKSVIEAFRQLEANILVQEYIKEASGADLRCFVIDGKVVASMKRQGAEGDFRSNLHRGGKAEKIKLTPEERSTAIRATKAMGLRVAGVDLLRSNHGPVVIEVNSSPGLEGIEAATGVDVAKKIIDFVAKNATLVLNRDRYQY

SEQ ID NO: 10539 - protein, 629 aa, Photobacterium sp. SKA34
MSKIIGIDLGTTNSCVSVLDGDMPRVIENAEGERTTASVIAYTDGETLVGQPAKRQAVTNPENTLFAIKRLIGRRFEDEEIQRDLSVMPYKIVKADNGDAWVEAKGQKMAAPQVSAEVLKKMKKTAEEYLGEKVTAAVITVPAYFNDAQRQATKDAGRIAGLEVKRIINEPTAAALAYGLDKKGGDRTIAVYDLGGGTFDISIIEIDNVDGEQTFEVLATNGDTHLGGEDFDTRMINYLVDEFKKDQGIDLRNDPLAMQRVKESAEKAKIELSSAQQTDVNLPYVTADATGPKHMNVKITRAKLESLVDELVQGTLNPVKSALKDANLNVNDITDVILVGGQTRMPLVQKTVADFFGKEPRKDVNPDEAVAMGAAIQGGILAGDVKDVLLLDVTPLSFGIETMGGVMTSLINKNTTIPTKAEQVFSTAEDNQNAVTIHVLQGERKQAMHNKSLGQFNLEGIQAAPRGMPQIEVTFDLDADGILNVSATDKATGKAQKITIQASGGLTEAEIEKMVQEAEANKEADIQFEQLVTARNQADQLIHSTRKQLTEAGDNLPAADKEGVEVAISSLEDVKSGDDKNAIEQHTQALMTAAKKLMELAQANNQHQAETQNEAKSDDVVYAEFEEVK

SEQ ID NO: 10540 - protein, 1069 aa, Kluyveromyces lactis NRRL Y-1140
MIFRKVVRNPTVQNIQIYRKTLGHQIRDIIEKLTKKIDPFVKFIFPNFIAFHYFYIIAFALLCSILIYPVKNFAYIDILFLATGAATQGGLNTVDLNELSLYQQIVLYITTALTTPIFIHSGLAFVRFYWFERYFDGIRDWSKRDFEMRRTMTLRQRELTKNNTMENASRSTGQGPLNFLTRTFTHGDRDASNFQGRLFRGEVVKRDEDNNDDSSVDTRPPEAHSDHTEKFIGRRKSRDINPADMYRSIAMLQNRHESNDNIKGPALVIKSPAEREKEIEEQRRLQKEREEQQGQSIQFKVEPRPTKSTRSTFEPSGIRKSFTRRKRPSFFKGSQSARIIRDKLRRRSKGSDVNNVDDEEEEQDGHDADMEGSSEDDSVIESSDGQSESISAPNFDHHSSEPTLQSGGTVSAPSSLESNEIEEEDEELSDLPTGVSYYGLHSGGDPRNRLNRVMSTNYLSYEPKIGRNSTFVGLSESQKVELGGVEYRSTKVLCLLLSIYYLGFSILAMIIFAAWIQPMNNYKEIVRSQGVSPTWWGFWTGMSAFGNLGLTLTPNSMISFHKSIYTLIWMMWFIVIGNTGFPIFLRFVIWILFKLSPDLSLRKDSLGFLLDHPRRCFTMLFPKAATWWLFLILIGMNAIDLILFIILDLNTDVVKDLTAGFKVLNGLFQAVSTRTAGFAVLDLSQLHPSVQVSYMLMMYVSVMPLAISIRRTNVYEEQSLGVYGNGENQEDDGSEKNTKSFIGAHLRRQLSFDLWYMFLGLFIICICEGGKIQDPSKPSFTVFQCLFEVVSAYGTVGLSLGYPGSNQSFSGQFTTISKLVIIAMLIRGRHRGLPYTLDRAIILPSAKLKENDLLHELTHSRRPTTLGLNGSTSHDNRTTSVADSTSSIGNKHIDRFRDRSRSVWHGLTSAFSMGHQPRPHRTMTSRSLDDTITTDRMMSTQSNQSFNNESQQQTFSDGNNYPMHSMNSNHHYDNRSMTPNQYHVFRDSFDLRSGITEHKGLDGVHANTVEAFDHSNYNSNSNSNSNSNSNSKNTETSSSGPIFNHINSSTSLHSPHSTGSMQSLNSSPR

SEQ ID NO: 10541 - protein, 189 aa, Coprinopsis cinerea okayama7#130
MSTESSSGFYSLKAELPNGQTYDFEQLRGKVVLIDLLTDFKVDLLLNTKACSHFNGVLLLGVTFLPSGLQQLYEKYKDRGFTILGFPCNQFGGQEPADDAGIQEFCTVNHGVTFPLMKKSEVNGDNTNEVYQWLKSKKAGFLGLTRIKWNFEKFLVDKEGNVVNRWASTTSPSSIASEIEKLLTEEPRL

SEQ ID NO: 10542 - protein, 570 aa, Oryza sativa Indica Group
MDSSRSSNSLDSRSSLTLGELACAALIPVLALVDAVVFAAAQCFQKRPPGLLPATLAARARRRAGGRLTFRELAVLADESRCFSVNEVEALYELYKKISCSIVDDGLIHKEELQLALFRTPAGKNLFLDRVFDLFDEKKNSVIEFEEFIHAISVFHPNAPLEDKIDFSFRLYDLRQTGFIEREEVKQMVVATLLESEVQLSDDLVEAILDKTFEDADTDKDNRISKEEWKAFVLKHPSVIKKMTLPTLKNLGTGVVLESSLTSSSLKLSAWPSISTAARANGRLNLPPRQETSGSAYHWHMEASLPSWMENGGTPLPAATARNVQVRNPACALTICAAHRVQLAPGAAADAAAELQELWPVGEIDPKRARFPCCIVWTPLPIVSWLAPYIGHAGICREDGTVLDFAGSNLVSMDNFAYGSIARYLQLDRKKCCFPVNLATHVCERSYKHAEAGTAISWDDALQLGMRSFEHKFYNLFTCNCYSFVANCLNRLAYNGSVKWNVLNVAALVWLRGQWVDKMSVVRSFFPFLTVTCVGILMAGWPFLIGMAAFSSLLIGWFVFAVYCMKDLVC

SEQ ID NO: 10543 - protein, 394 aa, Arabidopsis thaliana
MEAKPLASSSSEPNMISPSSNIKPKLKDEDYMELVCENGQILAKIRRPKNNGSFQKQRRQSLLDLYETEYSEGFKKNIKILGDTQVVPVSQSKPQQDKETNEQMNNNKKKLKSSKIEFERNVSKSNKCVESSTLIDVSAKGPKNVEVTTAPPDEQSAAVGRSTELYFASSSKFSRGTSRDLSCCSLKRKYGDIEEEESTYLSNNSDDESDDAKTQVHARTRKPVTKRKRSTEVHKLYERDDKASLLDEAIKYMRTLQLQVQMMSMGNGLIRPPTMLPMGHYSPMGLGMHMGAAATPTSIPQFLPMNVQATGFPGMNNAPPQMLSFLNHPSGLIPNTPIFSPLENCSQPFVVPSCVSQTQATSFTQFPKSASASNLEDAMQYRGSNGFSYYRSPN

SEQ ID NO: 10544 - protein, 147 aa, uncultured Frankia sp.
RNTAKKAESYLRGTGFADTAYFGPEAEFYIFDDVRYDYNPYGSLHAVDSIEAAWNTARKEEGGNLGYKPRFKGGYFPVPPTDHFTDLRSEMSRALIRAGITVEMQHHEVGTAGQAEIDIRYDTLLRTANNLMLYKYIIRNVALSRGK

SEQ ID NO: 10545 - protein, 690 aa, Bifidobacterium longum
MAVFELILCIIAAVVVSSFASRFVPKVSTPLVQIVLGVLVTYLPFFPDAKLDPELFMVLFIAPLLYLEAHEIDKSALLKTLDLSLSLAIGLAIVTMAAVGFTLHAVWPSITLASALALGAALGPTDAVAVSSLGKEASLTQRQRSVLKGESLFNDASGIVGFQFALAAAFTGEFAVGQAAGEFVISFFGGTLFGLMIAAAANWLFETVRSLGWETTTTRILMELFLPFLLYLGAEEFNVSGILSVVAAGLFIRFDRTGVGPNVARTNIVSTSVWGVLSFSLNGAVFILLGMQLPRAMRASWSDPYISNTVLIGIILLVTLVVIALRFFWIAAMLRVARDTISGQRRKMTPERWRSAAVMTFGGPKGTITLSLMFTIPYYIAGGAPFPMRDELIFIASGVIIVTLLLANFLLPLLAPNRGKDPSAEIIPVTIDVLRATVEELTGRITPENRRAILMVIDQYTKRIGRLQQRIGDTDPQGFEQLQIEALHWEKEFVRDRLADTKAHPAADTATQELNVEACERMLDQIMNTLRHTSTDPTSGHAVSQIRGRVRMFQRQMSNYAKRTVSKIRHTTPLVSEDQIFARTRELQVEAIHHVIGRLIDEMGQDTYNTEHCSALLLDYRRAEASLQARPTMSGTTETITQVEDVKRESYGIELGMIQDMYEAGDINRAQARSLRRNIYVMQVDADSGI

SEQ ID NO: 10546 - protein, 702 aa, Alcanivorax sp. DG881
MSLLRKLFPLALALLLLGGAIKGGGALHDSSPDIQGDLKPTEEQLEAAEEIADKLKYHYRQLDFDDQLSEQVLQRYLKDLDPNRLYFLASDIKDFQRYNEILDDQLRKGQLEGGYTIFNRFQQRLEERLTWSLETIANDLDSLTFDSEESVRVDREDAPWAKDKAALDEIWQRQLKNAVLSMRLNDSSAEDIETRLTRRYESQLKRIKQNTPEDVFQVYMNALTQTFDPHTTYFTPHNSKNFDISMSRSLEGIGAVLQYEDGYTKVVRLVPGGPAAKGGQLKPADRIVGVSQDEEDPVPVIGLRLDEVVDQIRGPKGTKVNLEIIPAGSPSEHDTRTITIVRNKVVLEEQAAKKDIIHVDRNGQDLKLGIIEIPAFYLDFDAYHRGDPKYTSTTSDVAKLLVELRKENIDGLVIDLRNNGGGSLLEVNKLVSLFINRGPTVQVRESNGRVSVEGDKFPGVLFAGPMAVMVNRYSASASEIFAGAMQDYGRALIVGDQTYGKGTVQTLLDLNHGKLKMTNAKFYRVSGSSNQNLGIVPDVDLPSLVDKDDVGESSLPNALPWDEIKSANFQRVTDLVPFLPQLRERHEERTDSDPEFVYVHSLRKLLDVNRNRTELSLNEKARTQMQTEFDKERLAIENSRRQARDEDPLESIKELRTLEEQRALDPESHDEAMDEDPYVRETGEILVDYMDLLRENQVARKG

SEQ ID NO: 10547 - protein, 147 aa, uncultured Frankia sp.
RNTAKKAESYLRGTGFADTAYFGPEAEFYIFDDVRYDYNPYGSLHAVDSIEAAWNTARKEEGGNLGYKPRFKGGYFPVPPTDHFTDLRSEMSRALIRAGITVEMQHHEVGTAGQAEIDIRYDTLLRTADNLMLYKYIIRNVALSRGK

SEQ ID NO: 10548 - protein, 1299 aa, Ceratodon purpureus; identical to SEQ ID NO: 6986

SEQ ID NO: 10549 - protein, 143 aa, uncultured Frankia sp.
SRDPRNTAKKAESYLRGTGFADTAYFGPEAEFYIFDDVRYDYNPYGSLHAVDSIEAAWNTARKEEGGNLGYKPRFKGGYFPVPPTDHFTDLRSEMSRALIRAGITVEMQHHEVGTAGQAEIDIRYDTLLRTADNLMLYKYIIR

SEQ ID NO: 10550 - protein, 135 aa, uncultured Frankia sp.
KKAESYLRGTGFADTAYFGPEAEFYIFDDVRYDYNPYGSLHAVDSIEAAWNTARKEEGGNLGYKPRFKGGYFPVPPTDHFTDLRSEMSRALIRAGITVEMQHHEVGTAGQAEIDIRYDTLLRTADNLMLYKYIIR

SEQ ID NO: 10551 - protein, 633 aa, Streptomyces avermitilis MA-4680
MAKAVGIDLGTTNSVIAVWEGGEPSVVPNSEGNRTTPSVVAFTDTGERLVGQLARRQAILNPKGTIYSAKRFIGRHFDEISDEARAVTYDVVEGDGGAARFKVRDKLYAPEEISAQVLRKLADDASKQLGERVTEAVITVPAYFNDAQRTATKDAGRIAGLEVLRIINEPTAAALAYGMDKKEHETVLVFDLGGGTFDVSILDVGDGVVEVRSTAGDSHLGGDDFDRRLVDYLADDFQQENGIDLRKDPQALQRLFEAAEKAKTELSSVTQTQVSLPFITADASGPKHLTDTVMRSTFEQITSDLVERCLGPVQQAMADAKVGESDIDEVILVGGSTRIPAVQALVRRLTGGKDPNMSVNPDEVVALGAAIQAGVLKGEVKDVLLLDVTPLSLGVETRGGVMTKIIERNTTIPVRRSETFSTAEDNQPAVDVVVLQGERERAADNRVLGRFQLTDIRPAPRGEPQVEVTFDIDANGILNVTARDKDTGKEQGITISESSNLDRSEVERMVQEAERNQGQDQALREAVDARNELDAVAYQVEKRLAELGDAAPAHEKARAEMLVSDARAAVKEEAGVERVRPLTSELQQVLAGLAAHQGAATADGGPAQHAATGGPTSGGGGGDDVIDAEFDKG

SEQ ID NO: 10552 - protein, 688 aa, Streptococcus thermophilus LMG 18311
MHLSLALLVLLFSLILSNVINRIFPRLPLPLIQIIFGVGIGFLLKGEVFELETELFLAFIIAPLLFREGEESDITSILRNWKLILFLIFPVIFVSTLGIGYLAKAVLPASVPLSACLALGAALGPTDFVAYSAISKRFSFPKWISYILQGEGLLNDASGLVAFRVAVTALTTGSFSLLDASWNLVISVIGGFLVGLITALLNRLFLTILDNMDAADVTGALLLELVLPIPSYFVAEEIHVSGIIAVVVAGISLASRFKKITVFDAKLDSVSHTIWGTITFVLNGMVFFLLGTELPTLATPVLSSSTYDTLWMLLAIVLLTAIMFGIRFVMISAVFAQRAWRTKRSLKKIWKVATILTFSGVKGTVSIATILLLPVANMTALEHSLLTFTVAGVTLLSFLIGILILPRLATGPAHTTNHYMQIAILNDVVRELEKDLKQSANQGAVYATIDNYNQRLEDLILEQESNDVKEELANIRIMIMEIESEGLEYAYKKGKISELEYNLYQRYIKGLERRINRGFVSSLSYASAVFVLGLRRILHLAFTFKFRFEQEENRRGPQLTEENRDHMTELYLTNTEQVLEALSNLEGVYHSDLLSYLKRSRIREAEIIQSGAFVERVITHLNPDYVDEMLRGYFLERKIIIEYEQAGRISSRYAKQLRKEVNTLENYSLKETSNTLIYDMINLARRGA

SEQ ID NO: 10553 - protein, 110 aa, Arabidopsis thaliana
  misc_feature (83)..(83): Xaa can be any naturally occurring amino acid
MPSSMLSSATMVASPAQATMVAPFNGLKCYAAFPATLKANNDITSITSNGGRDNCIAVWPALGKKKFETLSYRSDLTDSELAXGVHYLIPNQGVSCVKFEVEHGFVYPEH

SEQ ID NO: 10554 - protein, 530 aa, Synechococcus sp. PCC 7002
MPLVMIVLAELAEAAISTNLQQFVLVLSISLTVATFSRIFSWLRQIPYTLLLVIVGLGLAFINVRLVNLSPELILEIFLPPLLFEAAWNIRWRELQKQWLPIALFALAGVAIAIFGIGFALSQWTSLALSSALLAGAALSATDPVSVVALFRELGASKKLTMVMEGESLFNDGVAVVAFLLLVGIPLGTQTFSMSATVATFLVFVGIGVGFGCLIGFGISFLTQRFDIPLVEQSLTLVSAYGTYLLTEELGGSGVIAVVTVGMILGNFGSNIGMNPRTRLVVSEFWEFLAFFVNSIVFLLIGDQVNFGTLGESLDAIFVAIAAVLVTRAISVYGLGWLSNQFSNNPLSFSEQTVLWWGGLRGSVSIAVALSVPVVLGDRQEIINIIFGVVLFTLLVQGLTTQWVLEKLDLIGDQPIRQKYSEYLARRVALKRVLNYLDQLNLAADVDEEFYRYERDLVEGELETIEEKIEKLKSSHPQLQELDMKQLRDTLLDIEADTYAEFIRVGRLNKDLSPLLQETLIKATEKTIQS

SEQ ID NO: 10555 - protein, 1171 aa, Oryza sativa; identical to SEQ ID NO: 6991

SEQ ID NO: 10556 - protein, 155 aa, Medicago truncatula
MDAFTERQEALVNSSWEAFKKNIPQLSILFYTLILEKVPDAKDMFSFLKNFDGIPHNNSTLEAHAELIFEMTRDSAVQLRAKGKVDVADDVTLEYLGSVHVQKGVIDLHFMVFKEAMLKTIKKAVEDKWSEELDCAWGIAYDELAAAIKKAMGWP

SEQ ID NO: 10557 - protein, 695 aa, Magnaporthe grisea 70-15
MARLKDFLKAQAKSLKPAFFSKQPHFNFISAHYREFPQLRTTEEHVAILERQRNEGETLRIPGPRDVELGMAPERVEHSADEDAMPRSPRSPHRRPRSMESADGRAPGPRQQTIVIQEPTKPPAREEMAEEFEAIKNTLDPFKLRVPRIFKNKNPRLHEDDSDEEQEQTHLPERLRRRSTFGSVRKAFTQDKVEDTPYLSWTPTVARNSNFPGMSEEQREEMGGIEYRSLKSLAKVLVFYFMGFSVLGVVCLLPWILLTERWGVIVDQAGQSRTWWGFFTANSAFMDLGFTLTPDSMVSFNTATFPLLLMSFLIIIGNTGFPIMLRFLIWGFSLMVPRGSGLWEELRFLLDHPRRCFTLLFPAGATWWLFWILLALNGIDLIFFIVLDLDSGPVFEMPTGIKILNGIFQAASTRTAGFASVNLSQLHPAVLTSYIIMMYISVFPIAISVRRTNVYEESALGIYTNAEDDEQVSHIGSHFRRQLSFDLWFIFLGYFILSISEGTRLQSGDITMFAVLFEVVSAYGTVGLSLGYTNVNTSLVGQFSTVGKLVIVAMQIRGRHRGLPYGLDRAVLLPGDSRNVTEEKKEAAHADNSLDTQFQLHRRASGMSTATQGVGSSVRRGRSRSMTRVNSNVLVQLLHPGPAPIPHGPPMRRRSAADMEEEEYHEMYERSTSSIRRAETIAQVPIPSTGIPARH

SEQ ID NO: 10558 - protein, 500 aa, Arabidopsis thaliana
GSSLSPISFTKPNKINPNFSIQISKASKFSYARSRSNISRSNAANPGVVFVCNRFLCVIERNDQRKLSGKVMMKSSVNFRQNLSVALVRIVSVLLVSSISVVTTDSPPSWGLTEENLLFLEAWRTIDRAYIDKTFNGQSWFRYRETALRNEPMNTREETYMAIKKMVATLDDPFTRFLEPGKFKSLRSGTQGAVTGVGLSIGYPTASDGPPAGLVVISAAPGGPANRAGILPGDVIQGIDNTTTETLTIYDAAQMLQGPEGSAVELAIRSGPETRLLTLTRERVSVNPVKSRLCELPGSGSNSPKIGYIKLTTFNQNASSAVREAIETLRGNNVNAFVLDLRDNSGGSFPEGIEIAKFWLDKGVIVYICDSRGVRDIYDTDGSNAIATSEPLAVLVNKGTASASEILAGALKDNKRALVYGEPTYGKGKIQSVFELSDGSGLAVTVARYETPAHTDIDKVGVTPDHPLPKSFPKDEEAFCGCLKDPTAACYLNQGLLFSR

SEQ ID NO: 10559 - protein, 502 aa, Glycine max
MKGKSQSQRIGKKSRKMKGALNTHTNTTRHLQLQLGQVSLIPLQQPSSTTATTSSAVSCFQNLLDAEAPNASSSRVALIDNAAAAAADDRDCILSQDFFCTPDYITPDNQNVFNGFDCDRENTPCPKSPEKLNTTKSKRCRPDAMSVHPLSPTFCSDHQPVVELGKDSGTEELALEKTIAPGKPKAQNYVSHSAVALRCRVMPPPCFRNPYLKDVSDKDLDPFGNQRLKCAGLFPAFTGGDGLSRYRADFHEIEQIGRGNFSSVFKVLKRIDGCLYAVKHSTRPLRLETERTKALMEVQALAALGLHENIVGYYSSWFENEQLYIQMELCDHSLSIRKYSALFTEGQVLDALFQVANALQFIHEKGIAHLDVKPDNIYVKNGVYKLGDFGCATLLDSSLPIEEGDARYMPQEILNENYDHLDKVDIFSLGASIYELIRRLPLPESGCQFFNLKEGKFPLLPGHSLQLQNLLKVMMDPDPVKRPSAKELIENPIFCRIQRTAS

SEQ ID NO: 10560 - protein, 187 aa, Pseudotsuga menziesii; identical to SEQ ID NO: 6998

SEQ ID NO: 10561 - protein, 122 aa, Pectobacterium atrosepticum
LLDALNSRKSYSVRIVGDNTQVEAVSNVSAVHSGSQDAIALIAAADLVTTAVGPQILEKIAGTIAQGLVKRHEDGNTRPLNIIACENMVRGTSQLKQHVLKLLPEAHQEWVVEHVGFVDSAV

SEQ ID NO: 10562 - protein, 149 aa, uncultured Frankia sp.
RPRNTAKKAESYLRGTGFADTAYFGPEAEFYIFDDVRYDYNPYGSLHAVDSIEAAWNTARKEEGGNLGYKPRFKGGYFPVPPTDHFTDLRSEMSRALIRAGITVEMQHHEVGTAGQAEIDIRYDTLLRTADNLMLYKYIIRNVALSRGK

SEQ ID NO: 10563 - protein, 179 aa, Daucus carota; identical to SEQ ID NO: 335

SEQ ID NO: 10564 - protein, 83 aa, Daucus carota
WPMAKLGFEDYIEPLKVYLARYREMEGDTKGSGKGAEGSSRKEGVQPVHQGQLVHQGSYPQGVIYGNSQQQTQHMMVPMQGPQ

SEQ ID NO: 10565 - protein, 62 aa, Daucus carota
WAMGTLGFEDYIEPLKVYLARYREMEGDTKRSGKGAEGSSRKEVYNRFIRDSLFIKVHIHRV

SEQ ID NO: 10566 - protein, 1098 aa, Azoarcus sp. BH72
MKSPDSYTEADVIAWLGQHEVDKGRAYLAAVTQLERKGDILHARVRGSRTTPYQVSAQVRSDPWRGTFLLSHCSCPLGDSCKHVAATLLSWLARRDGPERPRDQVLAWIDAFRSAAGQAPTAAGEPRRAAPSVHALRYLIHDQADVQDYVVSCHKVRLDRQGQIRSAEGWSNFERAFEAPPAFVDEVDLDILGLLWAQRPRTRYLPYALPLAGRNAAALMERLVASGRAHLDTLESPPLQVGEPRPGVPEWRTTREGLRAPGLRLTPPADRVLPLSPPWYVERATGVAGPVTLELPAEQVVRLLALPPLTPTEAELVADTLHDVAPQLPAPLATGEPPLRLDGAPLPVLRIATLPVIGVDYRDYPGYSVNRFDYATLAFRYGPLTVEAADTALFHVLDDGRSARLTRDRAAEAAAARRLTQNGFGKVPAHAVHTGHGATPPHMLGLASEADWVHFTAEDIPALRREGWVVDMPEDFRHHALDIDELLLDVDEQGGWLDISPGIEVEGRRVSLAPLLAELFAQDPRWLSGGLERIADSEPIILHHDILGRLRLPAGRLKPLVRALVDLFDNATGEHMRVSPLDAGRLAALQLPGRGADTLAAYARRLRDATGIEAVPQPKGFKAELRPYQLEGLAWLQHLVRNNLAGILADDMGLGKTAQTLAHLLALKHAGKLDRPALVVLPTSLVFNWQAEAERFAPELRVLKLHGADRHGLFEQLEPGKRKPRVDVAITTYPLLWRDEEELQAREWSILILDEAQTVKNVASKGAQVIRQLKARHRLGLTGTPLENHLGELWAQFDFLLPGFLGDAKHFTKTWRTPIEKHGDTVRRDLLAARLRPFILRRRKEDVATELPPKTIIVRSVALEGGQRDLYETVRAAMDSKIRDEIAAKGYARSQIVILDALLKLRQVCCDPRLLKTTAAAAKVKERAKLDLLMSMLPELIDEGRRILVFSQFTQMLALIAAELDKAKIGWVALTGDTRDRRIPVEDFQKGRAPVFLISLKAGGVGLNLTTADTVIHYDPWWNPAAENQATDRAHRIGQDKPVFVFKLICAGSIEERILSLQDKKAALAASVLSEDANALAKFGEADIAALLAPLPPG

SEQ ID NO: 10567 - protein, 803 aa, Magnaporthe grisea
MTVGTATPSANKENAPRSRFPTPQSLEKLHKPFKCPGSATRRPEADRPARKRRKVDYKGADGADDTGESYTSIERLALANRDVNKYPVFKPKDKDTIFRKSFVVPLVNKNVASYNPNRPPPTLGLRQGAVFVAKALHDPSGEFAIVLYDPTVDDRPKEPEKPVEEPDKPSPSQEKLDAPLVHKSLAEILGIKKKVEGEHPRVPVVIDPRLAKVLRPHQIEGVKFMYRCVTGMIDEKANGCIMADEMGLGKTLQCITLLWTLLKQSPEAGKPAIQKAIVACPSSLVRNWANELVKWLGADAITPFAIDGKASKEELTRQLRQWAISSGRAVTRPVIIVSYETLRLNVEELKHTKIGLMLCDEGHRLKNGDSQTFTALNNLNVSRRVILSGTPIQNDLSEYFSLISFANPDLLGTRLEFRKRFELPILRGRDADASEKERVKGDECLKELLALVNKFIIRRTNDILSKYLPVKYEHVVFCNLAPFQLDLYNYFITSPDIQALLRGKGSQPLKAIGILKKLCNHPDLLNLSDDLPGSEAHWPSDYVPKESRGRDREIKPWYSGKMQVLDRMLARIRADTNDKIVLISNYTSTLDLFERLCRNRGYGSLRLDGTMNVTKRQKLVDKFNDPEGSEFVFLLSSKAGGCGLNLIGANRLVLFDPDWNPAADQQALARVWRDGQKKDCFVYRFIATGSIEEKIFQRQSHKQSLSSCVVDSAEDVERHFSLDSLKELFQYRGNTRSDTHDTFKCKRCKPDGKQYIKAPAMLYGDTSTWNHFNNEGLKPIQDLLLRQECGETEVSAVFQYISH

SEQ ID NO: 10568 - protein, 638 aa, Salmonella enterica subsp. arizonae serovar 62:z4,z23:--
MGKIIGIDLGTTNSCVAIMDGMQARVLENAEGDRTTPSIIAYTQDGETLVGQPAKRQAVTNPQNTLFAIKRLIGRRFQDEEVQRDVSIMPYKIIEADNGDAWLDVKGQKMAPPQISAEVLKKMKKTAEDYLGEPVTEAVITVPAYFNDAQRQATKDAGRIAGLEVKRIINEPTAAALAYGLDKEVGNRTIAVYDLGGGTFDISIIEIDEVDGEKTFEVLATNGDTHLGGEDFDTRLINYLVDEFKKDQGIDLRNDPLAMQRLKEAAEKAKIELSSAQQTDVNLPYITADATGPKHMNIKVTRAKLESLVEDLVNRSIEPLKVALQDAGLSVSDINDVILVGGQTRMPMVQKKVAEFFGKEPRKDVNPDEAVAIGAAVQGGVLTGDVKDVLLLDVTPLSLGIETMGGVMTPLISKNTTIPTKHSQVFSTAEDNQSAVTIHVLQGERKRASDNKSLGQFNLDGINPAPRGMPQIEVTFDIDADGILHVSAKDKNSGKEQKITIKASSGLNEEEIQKMVRDAEANAESDRKFEELVQTRNQGDHLLHSTRKQVEEAGDKLPADDKTAIESALSALETALKGEDKAAIEAKMQELAQVSQKLMEIAQQQHAQQQAGSADASANNAKDDDVVDAEFEEVKDKK

SEQ ID NO: 10569 - protein, 176 aa, Rhodobacter sphaeroides 2.4.1
MTVRPHLALAFACLAGPALAAGPPPVTFDSIDGGQIRLDELRTAGPVLVVNTASLCGFTPQYDDLQALWDRYRDAGLTVLAVPSNDFKQELDDAGAVRDFCATNFDLTLPMTTITPVTGAEAHPFYRWLAEEHGVEPRWNFHKVLIDRDGDLVASWSSPVRPTDREIVGRIEALLP

SEQ ID NO: 10570 - protein, 617 aa, Methanosarcina acetivorans C2A
MAKILGIDLGTTNSCMAVMEGGDAVVLPNAEGSRTTPSVVGFSKKGEKLVGQVAKRQAISNPENTVYSIKRHMGEANYKVTLNGKTYTPQEISAMILQKLKTEAEAYLGETIKQAVITVPAYFNDAQRQATKDAGSIAGLEVLRIINEPTAASLAYGLDKGDVDQKILVYDLGGGTFDVSILELGGGVFEVKSTSGDTHLGGDDFDQRVIDHLLAEFKKTEGIDLSKDKAILQRLKDAAEKAKIELSGVTVTNINLPFLTVGPDGEPKHMDIDLTRAQFQKMTEDLLEKTLVSMRRALSDSKLTPNDLDKVILVGGATRMPAVVELVENFTGKKPYKNINPDEAVAIGAAIQAGVLGGEVKDVLLLDVTPLTLGIETLGGIATPLIQRNTTIPTKKSQIFSTAADNQPSVEIHVLQGERGIASENKTLGRFTLDGIPPAPRGIPQIEVAFDIDANGILHVNAKDLGTGKEQSISIQKPGGLSDAEIERMVKDAELHAEEDKKRKEEVETRNNAEALINAAEKTIKEAGDVATEDQKSKVNAAIEDLKKALEGKDTEEVKAKTEALQEAVYPISTAMYQKAQQEAQQASGEAGSADARGPDETVVDADYEVVDDEKRK

SEQ ID NO: 10571 - protein, 1161 aa, Candidatus Protochlamydia amoebophila UWE25
MLNFRKLKHDFSPSVIKEGKTLQDKGMVVSVKILNLKPDVVRLSCRVMGSFDNSYESELEIDRNESVIIDSDCDCTYKYDCQHLAAVLFYLEAHFNEILVAYSKETDLEKDVSVDDQEKENLRETFKEAETKEHARQGKKFQKELLAEYINASQVLGQSSFFLPEEEIIQDKAELAVIFLNPQKMTEQVEIQLALRLPFRSKALNISQIKLFIDAIRYNEALYIGNKRYFFSLSSFDEASSEVLKLIIDFARFIDKGDKQQRSAFIDTEAFGTLLAVSYGIAESKFALAGSLNDLETELYPMPCMYRGTLEEPLRLAISPALLRFELNYLEVNAPKVLLKPKIVLQNEAVIDCDEAILFECAKPGMIHGNTYYRFQPLIKRKHLRNLPSIRDMTIPEPLFGTFVENSMTELSRFAEIANKEMIERFVTLPFVEKVAAECDIQYLDGELEASLNFVYGGVKVPAASSQLKVSHISTFVTPEGILARNLTEEQKIIDLLFQDFVYDPSQGLYSAKNDKKIVEFMTEVIPAHQDQVKFNCPENLLDQFIYDNSVFHLNLKESNRIDMYEVEVKVDGYLNNVTVDLLWDCLSSKRAFIELSVKKGSKRKSKTEEKGTYKILILDLEKLAPVVQIFDEMGINRLDEHKELRPLWSLASLDIEQFANLPIHFSMSDKLKEIQQQMLGNLPCPSREIPKSIKASLRNYQIDGIHWLNRLRGMHLNGILADDMGLGKTLQAIITLTQYKMDHPKQPSIVVCPTSLVYNWQEEITKFNPKLKVLPVDGNPSQRKKLLNDLDYYDVIITSYTLLQKDIEFYKTVPFGYIILDEAQHIKNRGTRNAQSVKMIQAAHRLILTGTPIENSLEELWSLFDFLMPGLLSSYDRFVEKYIRQSTISQGGKNLDNLRRKVAPFILRRMKKDVLDDLPPVSEIVYHCHLSNIQQELYRSYAASAREELSQLVKKEGFERVQIHVLATLTRLKQICCHPAIFAKDRPENGDSSKYEMLLELLQTLMESKHKTVIFSQYTRMLNIMREDLEKQGIRFEYLDGSSKNRLSIVKKFNEDPNIPIFLVSLKAGGSGLNLVGADTVIHYDMWWNPAVENQATDRVHRLGQKNSVSSYKLITLNTIEEKILELHNRKKGLVKEVVSRDEDMMAKLTWEEVLELLQT

SEQ ID NO: 10572 - protein, 1048 aa, Cyanothece sp. PCC 7424
MPTLHGSWILQSTQCYLFIWGETWQSVEPVNSSSISLHPFNLTQNELQSFLKTHQLELEPDLTGQWTTEIIAVPSVAKGRSKKFLPLLSEQESLDKTQKTSLVLQPWQVQGIRLTPHQGLKLFQNFPLSSLQVEQSFLGEDLQFWLHIYRWSLDLLVRNKVLPGIFRESDSQAKSCWYPLLDSAIDQARFAKFSQMMPLSCRAYLSSSEQEIEENLVFSEAQELLLGVLRTLVDTQLRNWLEPVSNLSKSLMVQPWLQSLVNSETRFDFEPKNITRLETALYNWTLPIQDYLVSPNNNQLGQNQFRVCFKLDPPSSEEIELDQVDWKLSYHLQALDDEDFLIDAQTIWQHPIELLTVGQRTIENPQETLLKGLGLASRLYDPINNSLEDSQPFNCYLNPIEVYQFLKTTVEDLQNNGLGIILPAGLKIGNEKRLGIKVEAELKQKKGERLNLNSLLSYNLKIAIGNQTISKQELDKLLAQKSPIVEVNGEWIALQPADIRAAQSVLDKSNEPINLTVEYALRLSTKETKTLAKLPVVDFEASGILAEFINNLTNNQSIQPLETPKGFKGELRPYQKRGAGWLAFLEQWGLGACLADDMGLGKTPQFLAFLLHLKQEHGLVSPTLVVCPTSVVNNWEREVQKFAPTLSTVVHHGDNRKKGKPFKRQVENKDLVITSYSLIYRDATTLETVDWQGLVLDEAQNIKNPQAKQSQFIRKLKSGFRMALTGTPVENRLSELWSILDFLNPGFLGNQPFFQRRFAIPIEKHGDRESLNTLRSLVRPFILRRLKTDKDIIQDLPEKQEMNVYCGLSLEQANLYQKLVDDSLAKIEETTGIQRRGLILTLLMQLKQVCNHPAQYYKENSLDSAQRSGKLLRLEEMLEELVDEGDRALIFTQFAEWGKLLQPYLTKKLGRQVLFLYGATPRQQRQEMIDRFQNDPAAPPIFILSLKAGGTGLNLTRANHVFHIDRWWNPAVENQATDRAFRIGQKQNVQVHKFICTGTLEEKINDMIESKKQLAEQTVDAGENWLTDLDTDQLRTLLLLDRSAVIDE

SEQ ID NO: 10573 - protein, 609 aa, Streptococcus agalactiae 2603V/R
MSKIIGIDLGTTNSAVAVLEGTESKIIANPEGNRTTPSVVSFKNGEIIVGDAAKRQAVTNPDTVISIKSKMGTSEKVSANGKEYTPQEISAMILQYLKGYAEDYLGEKVEKAVITVPAYFNDAQRQATKDAGKIAGLEVERIVNEPTAAALAYGMDKTDKDEKILVFDLGGGTFDVSILELGDGVFDVLATAGDNKLGGDDFDQKIIDFLVEEFKKENGIDLSQDKMALQRLKDAAEKAKKDLSGVTQTQISLPFITAGSAGPLHLEMSLSRAKFDDLTRDLVERTKTPVRQALSDAGLSLSEIDEVILVGGSTRIPAVVEAVKAETGKEPNKSVNPDEVVAMGAAIQGGVITGDVKDVVLLDVTPLSLGIETMGGVFTKLIDRNTTIPTSKSQVFSTAADNQPAVDIHVLQGERPMAADNKTLGRFQLTDIPAAPRGIPQIEVTFDIDKNGIVSVKAKDLGTQKEQHIVIQSNSGLTDEEIDKMMKDAEANAEADAKRKEEVDLKNEVDQAIFATEKTIKETEGKGFDTERDAAQSALDELKKAQESGNLDDMKAKLEALNEKAQALAVKLYEQAAAAQQAAQGAEGAQSADSSSKGDDVVDGEFTEK

SEQ ID NO: 10574 - protein, 569 aa, Physcomitrella patens subsp. patens
SKTRRIGGWISTPFIFGNEMGERLAGFGLSMNLITFLTLEMHMPTVKAANIITNFGGTCGLTPLVGAFIADAYLGRFKTIAITSIIYMLGVVLLTLSAAFSSLRPPSCNYHMGVSSLICKEPSSKQLWYFFSSLFLLAVGTGGIRPNTAPFGADQFDPSHPKEKNQLWHFFNWYYFCVGISILGALTVIVWVQDNVGWTWGFGIPAGAMAIALLSFFIGAPFFRYMPPVGSPFTRIAQVIVASYRKRKLSLPSDTSLLHRRNDKGELINYPAVIELHHSNQFTLLDKAAIVEEDNNMSSHASRWRLCTVHQIEELKSLLRMAPIWMTTILVSTVIVQQGTFSVQQARTMNRWMGYNFQMPAASFGVFGILMLLTWVPIYDLYVMGWLKKVTGNERGVTPLQRIGAGLFIAILSMVAAAAVEVKRRNVAHRHGLLDRPDLTVPISAFWLVPQHCLFGLAESFVFIGELEFFYDQSPESMRSTGTALFWSTFALGNYVSTALVTLIDHNTNWLENNLNRAHLDHFYWFLAVLSTVNLLFFLLSAHWFRYRNEGLDPDLDIHLETSAALKPN

SEQ ID NO: 10575 - protein, 496 aa, Blastopirellula marina DSM 3645
MLPGAKILGAEDIVVRSCAANSKLCLPDDLFVAMVGAHQDGHDFVEEAIANGASAILSERALPTTRPVCIVENTQSAYAQICQALAGDPSKRMRVIGVTGTNGKTTVCRLIQSIMETAGATVGMSSSLGYDNGYDRQPWDCTTPNAAVLADLLSRMEYNGCTHAVVEASSEALSRDRLDGIELDAVAITNLRQDHLDVHGSVTNYHRAKKKILGRLRETGFAVVNADDSACNKLLSQIETPALSVALHGAAEITASVVERHKSEQTFLLSAGDETVPVCTRMIGDHHVYNCLVAAAVGLVYGVDLKTVVRGLERVDSIPGRMQRIECGQPFGVFVDLAHTHDALAMALKALRRVTHGRVICVYGADGLGDPSKRPLLGRVAERGADLSLITSANPGDESPLEVIHDILDGYERPARAHVMPNRAAAIEWALSEAQTGDTVLIAGRGTPNLQTLREEELPLDDVQIAQSWLYQDSRGLEVDVTVEDDGPVLLKFPRG

SEQ ID NO: 10576 - protein, 456 aa, Rickettsia sibirica 246
MLLRLIITLFFIINSICAFAEGEKETENKISNQEAYKQFQDVFERIEKAYVQVPDRQKMIDEAINGMLNSLDPHSSYYTDEDLEDIFTFTKGEFGGIGVEIMYDSGAIKIISPIDDLPAFKAGLKGGDYIVGVDDELVSTLGPNKAIKEMRGTPGTKVKLLIIKEEEAKPQELELTREIVKIKPIKAHLEKNNIAYIRITTFNESTISELKAAVKKLKTESKDDLKGIILDLRNNAGGILDQAIAVSDYFIDSGVIVTTKGRTTSSNSEIKANEFSLKAPKVPMIVLINGNSASASEIVAGALQDHKRAIILGTKSFGKGSVQALTQINSRAAVKLTISKYYTPSGRSIQAEGIEPDILIEPAKVEYPEVKKIDKRFSESSLKNYLKNDNEKNKDNASKNKDSQKETKAKNNKQEENELSELYKKDYQFARAYDVITGLIINKKLETKERVKQEDK

SEQ ID NO: 10577 - protein, 683 aa, Colwellia psychrerythraea 34H
MQKFCRIALAVSLSLGLSVSAIAFEKPITPEELPVLMPESQHATASKRITARFTRAHYKKVIIDDALSGEVFDRFIKQLDYARNIFLATDIDDFQKYRLEFDTVLTRGKLATAYDIYNLNMQRRLERYEYAVSLLNSKGDKNPFNFTKEEIYSFDREEAPWPVSEAELNELWRLKVKSDVLNLTLTKKEWPKIKEVLTKRYEYAIKRLKQSESEDAFQLVMNSFARVVEPHTSYLSPRNAERFQVDMNLSLEGIGAELRSIEDYTVIHRVVTGGPADKSKQLKSKDRIVGVAQGDKDFEDVIGWRLDDVVELIKGAKGTTVRLQILSGDSDDEANIKVVSIVRDIIKLEDRAAKSEVYLENPDVADSKKLGVITIPSFYNNLSKDVKKEIAKLKEQEVEGIIVDLRGNGGGSLSEATLLTGLFIDKGPVVQIRDGANRIQVNSDRDGVSFFDGPLTVMVDRYSASASEIFSAAIQDYGRGVIIGEHTFGKGTVQQHRGLGRVYDLYEKPLGSIQYTIAKFYRINGGSTQHRGVLPDISFPAAVNPEDWGESKEENALPWDQIQKAKYSPLNELNTDIEYLSSLYQQRIKENPEFNYLLEDISIYQAEKDDKTISLNLATRKSEREERKSKRLVRVNEQLVLLGKEKVTDLDDLSDELDDLDPFLDEAARITFDFVSLGKIAKK

SEQ ID NO: 10578 - protein, 128 aa, Triticum aestivum
SMWLHTHLIQDMLSICREVFKGGVHYAWASVPTYPSGVIGFLLCAKDGPPVDFLTPVNPIEKIEGATKDGREMRFSNSEIHRAAFILPTFVKRELEAYSPSPEKEKPEKPTAKPVKMKVMRDSAITAS

SEQ ID NO: 10579 - protein, 158 aa, Staphylococcus epidermidis ATCC 12228
MSIYDIAVENYDGSTYLLKRYKGKVLIIVNTATNCTLNDQFNKLEMLYKKYHKYGLEILSFPCNDFNNQEPELIKDIYRVYKYKFGITFPIHAKINVNGEHEHPLYTLLKCKQPGLFGSQIKWNFTKFVVDQQGNIVKRFLPCDNPNQMEKLIRQLLK

SEQ ID NO: 10580 - protein, 122 aa, Pectobacterium atrosepticum
VLDALNSRKSYSVRIVGDNTQVEAVSNVSAVHSGSQDAIALIAVADLVTTAVGPQILEKIAGTIAQGLVKRHDDGNTRPLNIIACENMVRGTSQLKQHVLKLLPEAHQEWVVEHVGFVDSAV

SEQ ID NO: 10581 - protein, 857 aa, Bordetella pertussis Tohama I
MEVSRIRALRGPNLWSRNTAIEAIAACSDAECAINGMPDFEARLRARFPQLGVLQPEGQRDAISMAHVLQATALGLQAHAGCPVTFGRTSPTIEPGVFQVVVEYSEEDVGRLAFELAEALIRSAQDDTPFDLPQALQRLRDLDEDTRLGPSTGSIVNAAVARSIPYHRLTQGSMVQFGWGSKQRRIQAAETDMTSAISESIAQDKDLTKMLLDAAGVPVPMGSSVDSAAAAWQAAQALGGSVVVKPRDGSQGRGVAVNIETRDRIESAFEAAAEISSEAIVERYIPGHDFRLLVVGDTLVAAARRDPPQVTGDGTHTIAELVAQVNADPLRGDGHATSLTKIRFDDIAIATLRKQGYEADSVAAAGALVVLRNNANLSTGGAATDVTDEVHPELAARAVTAARMIGLDICGVDVVAETVHLPLEDQHGGVVEVNAAPGLRMHLNPSFGKGRAVGEAIISHMFAERDDGRIPVVAVAGTNGKTTTVRLTAHILDCAGHRVGMTNSDGVYVGKQRIDTGDCSGPRSARRLLLHPDVDAAVLETARGGVLREGLAFDRCNVAIVTNIGMGDHFGLGYISTVEDLAVVKRVIVQYVQPDGMAVLNAADPMVAEMASACPGSITYFAEDRNHPVMATHRAQGHRVVYRDGDSLVAAQGGAEVAFALADIPLTRGGAIAFQVENTMAALAAAWALGIDWDTIRHALAIFVNDAQTAPGRFNVFDFRGATLIADYGHNPDAIQALVRAIDTMPARRRSVVISGAGDRRDEDLRQQTEILGGAFDDVILYQDQCQRGRADGEVVALLRQGLQQAPRTRHIDEIQGEFVAIDAALERLAPGDLCLILVDQVEEALAHIASRVTGQP

SEQ ID NO: 10582 - protein, 271 aa, Arabidopsis thaliana
MQSKPGRENEEEVNNHHAVQQPMMYAEPWWKNNSFGVVPQARPSGIPSNSSSLDCPNGSESNDVHSASEDGALNGENDGTWKDSQAATSSRSDNHGMEGNDPALSIRNMHDQPLVQPPELVGHYIACVPNPYQDPYYGGLMGAYGHQQLGFRPYLGMPRERTALPLDMAQEPVYVNAKQYEGILRRRKARAKAELERKVIRDRKPYLHESRHKHAMRRARASGGRFAKKSEVEAGEDAGGRDRERGSATNSSGSEQVETDSNETLNSSGAP

SEQ ID NO: 10583 - protein, 144 aa, uncultured Frankia sp.
SRDPRNIAKKAETYLRGTGIADTAYFGPEAEFYIFDDVRYDYNPYGSMHQVDSVEAAWNTSRKEEGGNLGYKPRFKGGYFPVPPTDHFTDLRSEMTRVLYETGITVEMQHHEVGTAGQAEIDIRYDTLLKTADNLMLYKYVIRN

SEQ ID NO: 10584 - protein, 160 aa, Colwellia psychrerythraea 34H
MSNIYQFTVKNNKEETIELNQFTDKVLLIVNTASNCGFTPQYQGLQSLHDSFQTNGFEVLAFPCNQFKQQESGNNEEIQQFCDLHFNIKFPLFDKIDVNGSNAHPLFSFLKQQAPGILGSKSIKWNFTKFLVNRKGEVVKRYAPTTKPEAITADIEKLLV

SEQ ID NO: 10585 - protein, 173 aa, Arabidopsis thaliana
MGASSSSSVSEKSIHQFTVKDSSGKEVDLSVYQGKVLLVVNVASKCGFTESNYTQLTELYRKYKDQGFVVLAFPCNQFLSQEPGTSEEAHQFACTRFKAEYPVFQKVRVNGQNAAPVYKFLKSKKPSFLGSRIKWNFTKFLVGKDGQVIDRYGTTVSPLSIQKDIEKALAQEL

SEQ ID NO: 10586 - protein, 122 aa, Pectobacterium carotovorum subsp. odoriferum
LLDALNSRTSYTVRIVGDNTQVDTVSNVSAVHSGSQDAVALIAVADLVTTAVGPQILEKIAGTIAQGLVKRHNDGNTRPLNIIACENMVRGTSQLKQHVLKLLSEGHQEWVVEHVGFVDSAV

SEQ ID NO: 10587 - protein, 436 aa, Pseudomonas fluorescens Pf-5
MLHLSRLTSLALTIALVIGAPQAFAAETAQAATAATTKAPLPLEELRTFAEVMDRIKAAYVEPVDDKTLLENAIKGMLSNLDPHSAYLGPEDFAELQESTSGEFGGLGIEVGAEDGFIKVVSPIDDTPASKAGIQAGDLIVKINGQPTRGQTMTEAVDKMRGKIGQKITLTLVRDGGTPFDVTLARATIQVKSVKSQLLESGYGYIRITQFQVKTGEEVSKALAKLRKDNGKKLNGIILDLRNNPGGVLQAAVEVVDHFITKGLIVYTKGRIANSELRFSATGKDESEAVPMVVLINGGSASASEIVAGALQDQKRAVLMGTTSFGKGSVQTVLPLNNDRALKITTALYFTPNGRSIQAQGIVPDIEVRRAKITSESQDGEYFKEADLQGHLGNGNGGADKPSGAASKAKPMPQDDDYQLAQALSLLKGLSITRGK

SEQ ID NO: 10588 - protein, 143 aa, uncultured Frankia sp.
SRDPRNIAKKAETYLRGTGIADTAYFGPEAEFYIFDDVRYDYNPYGSMHQVDSVEAAWNTARKEEGGNLGYKPRFKGGYFPVPPTDHFTDLRSEMTRVLYETGITVEMQHHEVGTAGQAEIDIRYDTLLKTADNLMLYKYVIR

SEQ ID NO: 10589 - protein, 550 aa, Lactobacillus plantarum WCFS1
MPGFFVDLDWPGDGTFNQQHTMYRAITSIISILIWGDNYPVCMYSRNSNFIEKDANIMQASQLINSLKFKQVQPALTTDFDVTMLTQDTREVQPGAMFIAVVGYHVDGHDLVDQAIEKGAKIIVASKPLDVNVPVIYVENTERAMAILADVFYGAPSQKMRMIGVTGTNGKTTVTHLIEQIYRDQQQATGLIGTMYRKIKDEKLPTANTTPDAITTQRTLAAMRDAGVETVAMEVSSIALVLGRVWGIDYDIAVFTNLTQDHLDFHKTMAKYTEAKAMLFAQLGNKYSADGTNKVAVLNTDDPVGREFEQYTAAHVLTFGLKPDAMINAQNVEIKSHGTEFDLSVFGHVTHVTMQLIGQFNVYNMLAAFAAAYASGIPEDQIIKSLEKVTGVKGRFQSVPSHTGVSVIVDYSHTPDGLLNALETIQDFATKDIYCVVGCGGDRDKTKRPKMAKIAVEHSTKPIFTSDNPRTEDPTMILNDMVAGVPNADVPVYEDRHVAIAKAIEAAQPGDVVLIAGKGHEDYQIIGRTKHHFDDSEEAAKALALKPTID

SEQ ID NO: 10590 - protein, 144 aa, uncultured Frankia sp.
SRDPRNIAKKAETYLRGTGIADTAYFGPEAEFYIFDDVRYDYNPYGSMHQVDSVEAAWNTARKEEGGNLGYKPRFKGGYFPVPPTDHFTDLRSEMTRVLYETGITVEMQHHEVGTAGQAEIDIRYDTLLKTADNLMLYKYVIRN

SEQ ID NO: 10591 - protein, 122 aa, Pectobacterium wasabiae
LLDALNSRKSYSVRIVGDNTQVDTVSNVSAVHSGSQDAVALIAVADLVTTAVGPQILEKIAGTIAQGLVKRHDDGNTRPLNIIACENMVRGTSQLKQHVLKLLPEGHQEWVVEHVGFVDSAV

SEQ ID NO: 10592 - protein, 676 aa, Arabidopsis thaliana
MSNTVEDDDDDFQIPPSSQLSIRKPLHPTNANNISHRPPNKKPRLCRYPGKENVTPPPSPDPDLFCSSSTPHCILDCIPSSVDCSLGDFNGPISSLGEEDKEDKDDCIKVNREGYLCNSMEARLLKSRICLGFDSGIHEDDEGFVESNSELDVLINLCSESEGRSGEFSLGKDDSIQCPLCSMDISSLSEEQRQVHSNTCLDKSYNQPSEQDSLRKCENLSSLIKESIDDPVQLPQLVTDLSPVLKWLRSLGLAKYEDVFIREEIDWDTLQSLTEEDLLSIGITSLGPRKKIVNALSGVRDPFASSAEVQAQSHCTSGHVTERQRDKSTTRKASEPKKPTANKLITEFFPGQATEGTKIRTAPKPVAEKSPSDSSSRRAVRRNGNNGKSKVIPHWNCIPGTPFRVDAFKYLTRDCCHWFLTHFHLDRIDVTCFDANHCPGSIMILFEPANGKAVLHTGDFRYSEEMSNWLIGSHISSLILDTTYCNPQYDFPKQEAVIQFVVEAIQAEAFNPKTLFLIGSYTIGKERLFLEVARVLREKIYINPAKLKLLECLGFSKDDIQWFTVKEEESHIHVVPLWTLASFKRLKHVANRYTNRYSLIVAFSPTGWTSGKTKKKSPGRRLQQGTIIRYEVPYSEHSSFTELKEFVQKVSPEVIIPSVNNDGPDSAAAMVSLLVT

SEQ ID NO: 10593 - protein, 273 aa, Thermoplasma volcanium GSS1
MKLIENWFSERYSDNLQLSFRVSDQLLSIKTDYQRIDLFDTYDFGKLLAIDGTVQLTERDEYIYHELITMIPYHMTKNPPQSALVIGGGDGGAARRLLDLGLNKIVNVEIDGQVVEVSKRFFPDLSSAFTDKRVNLIIDDGIKYVRKCNEKFDLVIIDSTDPEGPAEGLFSMEFYSDITKILSDGGVIVSQSGSPFYQPKALKLAYTGMRRLFKDVKVYTGFIPTYPSGFWSFTIASEDAMNPRKPAIKGKYFNEDVLDGVFKLPQFVKDLIT

SEQ ID NO: 10594 - protein, 472 aa, Cyanobium sp. PCC 7001
MAHTAQDVLRQIQDEGIELIDLKFVDLHGKWQHLTVCKELIDEDAFTSGVAFDGSSIRGWKAINESDMAMVPDPKTAWIDPFYSHKTLSLICSIQEPRSGQPYGRCPRALAQKALEYLASTGIADTAFFGPEPEFFVFDDVRYTSGSGSSFYSVDSIEAPWNTARLEEGGNLAYKIQLKEGYFPVSPNDTLQDMRTEMILTMASLGVPIEKHHHEVATAQHELGMKFAELISAADNVMIYKYVVRNVAKKYGKTATFMPKPVFADNGTGMHVHQSLWKAGNPLFFGEGTYANLSQTARWYIGGLLRHAPSFLAFTNPTTNSYKRLVPGFEAPVNLVYSQGNRSAAVRIPLTGPSPKAKRLEFRSGDALSNPYLGFAAMLMAGIDGIKNQIDPGDGTDVDLFELSAEELAKISTVPASLNGALEALDADKHYLMEGGVFSEDFINNWIALKYEEVQQLRQRPHPHEFVMYYDA

SEQ ID NO: 10595 - protein, 133 aa, uncultured Frankia sp.
RNIAKKAETYLRGTGIADTANFGPEAEFYIFDDVRYDYNPYGSMHQVDSVEAAWNTARKEEGGNLGYKPRFKGGYFPVPPTDHFTDLRSEMTRVLYETGITVEMQHHEVGTAGQAEIDIRFDTLLKTADNLML

SEQ ID NO: 10596 - protein, 371 aa, Triticum aestivum
  misc_feature (15)..(15): Xaa can be any naturally occurring amino acid
  misc_feature (20)..(20): Xaa can be any naturally occurring amino acid
RFFFLFLLPPIIFPXDLSEXQSGFSLSPKPFFANFGAIVTFAILGTFIASIVTGMLVYLGGLTFLMYKLPLVECLMFGALISATDPVTVLSIFQELGSDVNLYALVFGESVLNDAMAISLYRTMSSVRSNAAGGENIFMMILQFLEIFVGSMSSGVGVGFISALLFKYAGLDIDNLQNLECCLFVLFPYFSYMLAEGLGLSGIVSILFTGMVMKHYTYSNLSDNSQRFVSAFFHLLSSLAETFVFIYMGFDIAMEEHSWSHVGFIIFSIIFIIVARAANVFSCAYLVNISRPEHRRIPLNHQKALCFSGLRGAMAFALALQSVHELPEGHGKTILTATTAIVVLTVLLIGGSTGTMLEALDVIGDEKYINR

SEQ ID NO: 10597 - protein, 191 aa, Glycine max; identical to SEQ ID NO: 375

SEQ ID NO: 10598 - protein, 1495 aa, Saccharomyces cerevisiae YJM789
MSLAVLLNKEDKDISDFSKTTAGKSAKKNSRERVADVAPTRVLDKKQAYLSQLNSEFNRIKKRDSIEQLYQDWKFINLQEFELISEWNQQSKDWQFDNTNDSQDLHFKKLYRDMSMINKEWAEYQSFKNANLSDIINEKDADEDEEDDEDELEDGEEDMEEDEASTGRHTNGKSMRGNGIQKSRKKDAAAAAAVGKAIKDDQTHADTVVTVNGDENEDGNNDEDNDNDNENNNDNDNDNDNDNDNDNENENDNDNDNDDEEENGEEDEEEEEIEDLDEEDFAAFEEQDDNDDEDFNPDVEKRRKRSSSSSSSTKLSMNSLSLITSKKINKNITINSDRPKIVRELIKMCNKNKHQKIKKRRFTNCIVTDYNPIDSKLNIKITLKQYHVKRLKKLINDAKREREREEALKNNVGLDGNDLDNDEDGSESHKRRKLNNNTANGADDANKRKFNTRHGLPTYGMKMNAKEARAIQRHYDNTYTTIWKDMARKDSTKMSRLVQQIQSIRSTNFRKTSSLCAREAKKWQSKNFKQIKDFQTRARRGIREMSNFWKKNEREERDLKKKIEKEAMEQAKKEEEEKESKRQAKKLNFLLTQTELYSHFIGRKIKTNELEGNNVSNNDSESQKNIDISALAPNKNDFHAIDFDNENDEQLRLRAAENASNALAETRAKAKQFDDHANAHGEEEEEDELNFQNPTSLGEITIEQPKILACTLKEYQLKGLNWLANLYDQGINGILADEMGLGKTVQSISVLAHLAENHNIWGPFLVVTPASTLHNWVNEISKFLPQFKILPYWGNANDRKVLRKFWDRKNLRYSKNAPFHVMVTSYQMVVTDANYLQKMKWQYMILDEAQAIKSSQSSRWKNLLSFHCRNRLLLTGTPIQNSMQELWALLHFIMPSLFDSHDEFNEWFSKDIESHAEANTKLNQQQLRRLHMILKPFMLRRVKKNVQSELGDKIEIDVLCDLTQRQAKLYQVLKSQISTNYDAIENAATNDSTSNSASNSGSDQNLINAVMQFRKVCNHPDLFERADVDSPFSFTTFGKTTSMLTASVANNNSSVISNSNMNLSSMSSNNISNGKFTDLIYSSRNPIKYSLPRLIYEDLILPNYNNDVDIANKLKNVKFNIFNPSINYELCLFLSKLTGEPSLNEFFRVSNTPLLKRVIERTNGPKNTDSLSFKTITQELLEVTRNAPSEGVMASLLNVKKHAYEREYLNCIQRGYHPNVSAPPVTIEVLGSSHVTNSINNELFDPLISQALSDIPAITQYNMHVKKGIPVEDFPKTGLFPEPLNKNFSSNISTPSMDRFITESAKLRKLDELLVKLKSEGHRVLIYFQMTKMMDLMEEYLTYRQYNHIRLDGSSKLEDRRDLVHDWQTNPEIFVFLLSTRAGGLGINLTAADTVIFYDSDWNPTIDSQAMDRAHRLGQTRQVTVYRLLVRGTIEERMRDRAKQKEQVQQVVMEGKTQEKNIKTIEVGENDSEVTREGSKSISQDGIKEAASALA

SEQ ID NO: 10599 - protein, 793 aa, Vitis vinifera
MSLNTLKETLRQCTNPSSSTLISYTNSSISREIDPINPRKPPKSSLSKQLQRLQDPFSLPQIQPRNQQKQSLDHEEEEEVEAQEGFEKPQLGFLQFDLTGPFVPLVLSSDDEVPVIQVPASINHRLLEHQREGVKFLYNLYKHNHGGVLGDDMGLGKTIQTIAFLAAMFGKDGECGDSTILKGNQMGKKGPVLIVCPTSVIHNWESEFSKWATFSVSVYHGANRDLILDKLEAHGVEILITSFDTYRIHGSILSEVPWEIVVIDEAHRLKNEKSKLYTACLEIKTCKRIGLTGTIMQNKIMELFNLFDWVAPGCLGTREHFREFYDEPLKHGQRSTAPERFVRVADERKQHLVAVLHKYLLRRTKEETIGHLMMGKEDNVVFCAMSELQKRVYTRMLQLPDIQCLINKDLPCSCGSPLTQVECCKRTVPNGVIWSYLHRDNPDGCDSCPFCLVLPCLVKLLQISNHLELIKPNPRDDPDKQRKDAEFASAVFGTDIDLVGGNTQSESFMGLSDVKHCGKMRALEKLMLSWVSHGDKILLFSYSVRMLDILEKFLIRKGYCFSRLDGSTPTNLRQSLVDDFNSSPSKQVFLISTRAGGLGLNLVSANRVVIFDPNWNPAQDLQAQDRSFRYGQKRHVVVFRLLAAGSLEELVYSRQVYKQQLSNIAISGKMEKRYFEGVQDCKEFQGELFGICNLFRDLSDKLFTSEIIELHENQRQDHGHNRSTKMDLSELGSYFVQSKEAIETVSSAPESRKPKYFKSDTTLEDLGMFFFSRVLSHLQLPYCDICYLSVEKG

SEQ ID NO: 10600 - protein, 283 aa, Prochlorococcus marinus subsp. pastoris str. CCMP1986
MKDMPTWIDEYHKGSRFGLNGKVLLKKNSKYQEILIIETDFYGKALMLDGCWMTSVRDEKYYHECLVHPALSSIDKKSHILIIGGGDGGTARECLKYSQVSKIDLVEIDEEVIKVSKTFLKEIGGGAWSDKRLAIHIDDGVKWVETTKDNSYDVIFIDCSDPSEFSNLLFTDSFYKECKRILTKKGILATQSESPESFENIHIHILKSLNKIFKLSETMYSFVPIYPSGIWSWTFASDEELNLSKVNYKEVMEIENNCDVWNLNFQNAAFKMMPNKIVKKLNS

SEQ ID NO: 10601 - protein, 296 aa, Candida glabrata CBS 138; identical to SEQ ID NO: 377

SEQ ID NO: 10602 - protein, 583 aa, Magnaporthe grisea 70-15
MTRKKVRVGCHISTQDAPDSIPLHEFMINESHGRQPLNKSRNPFTCGLTGRTYTTADLHHRSEYLARALAQRTGWAPDDDLTPWDKVAAIFSINTIDYIIPAYAAHKLNGIVTPANAAYAADELEHQLRSSGTGVIFTCVSLLTTALKAADAAGLKRDRIFLLPTVGDEAAIAQAPFPTIDDLITKGKQLKPLEPIKWVKGQGKRQVAFINYSSGTSGLPKAVMISHYNIITNIISHVAYESVARKQKGIETQVELGLLPMSHIYGLVVVAHTATWRGDEIIVLPRFELKSYLEAIQRFRIEHLIVVPPMVIAMLQQGDVCAKYDLSSVRFVYSGAAPLGEETIAELAKTYPKWIVAQAYGCTESAVVVCSSSEHDVMTKSSGSLVPGVRAKLMDPVSGKEITEHDKPGEIWVQSPSVVLGYLNNEKATAETFVHDADGRWLRTGDEVYVTKSPQGHDHIVIVDRIKELIKVKGHQVAPAELEAHILTHPAVSDVAVTQVPDERAGEVPKAYVVKSPEYKNTSDEEMARLVTKHVADHKASYKWIKGGVEVMDAIPKSPSGKILRRLLRDREKERRRKQGAKI

SEQ ID NO: 10603 - protein, 275 aa, Bacillus anthracis str. Ames
MELWFTEKQTKHFGITARINRTLHTEQTEFQKLDMVETEEFGNMLILDGMVMTTEKDEFVYHEMVAHVPLFTHPNPENVLVVGGGDGGVIREVLKHPSVKKATLVEIDGKVIEYSKQYLPSIAGALDNERVEVKVGDGFLHIAESENEYDVIMVDSTEPVGPAVNLFTKGFYAGISKALKEDGIFVAQTDNPWFTPELITTVFKDVKEIFPITRLYTANIPTYPSGLWTFTIGSKKHDPLEVSEERFHEIETKYYTKELHNAAFALPKFVGDLIK

SEQ ID NO: 10604 - protein, 441 aa, Candidatus Kuenenia stuttgartiensis
MAVINRAKDDKVKLVQLQFTDINGSVKAVTIPIEKFPESLEKGLWFDGSSIEGFTRICESDMFLKPDAGTYALLPWETVAVTARLFCDVYMPDGSPFEGDPRYILKRAIKNARDMNFEYNVGPELEFFLFKPKNDGAVAPTPHDVGSYFDFSPRDLAGNVRADIIFTLEKMGINVEMSHHEVAPGQHEIDFKYAEALRTAENALTFKQVVKSIAHKHDLYATFMPKPIFGICGSGMHCHQSLFDIRTNTNIFFDENDTYKLSRNAKHFIAGQLEHVRAMSAILSPTVNSYKRLVPGYEAPVYICWGQKNRSALIRVPRYSPGREQATRAELRCPDPSNNPYLALAVMLEAGLDGIKRKLELPKATEENVYEFNKDELAYRNIATLPGSLGEALHELKQSALMKRALGSHTYQIYLHSKFSEWDEYRIQVTEWEQKKYLETT

SEQ ID NO: 10605 - protein, 367 aa, Triticum aestivum
FGTRPFLYSLVFGEGVVNDATSVVLFNALQNFDPNQIDAIVILKFLGNFCYLFVSSTFLGVFTGLLSAYVIKKLYIGRHSTDREVALVMLMAYLSYMLAELLDLSGILTVFFCGIVMSHYTWHNVTESSRVTTKHAFATLSFIAETFLFLYVGMDALDIEKWKFASDSPGKSIGISSILLGLVLVGRAAFVFPLSFLSNLTKKTELEKISWRQQIVIWWAGLMRGAVSIALAYNKFTRSGHTQLHGNAIMITSTITVVLFSTMLFGILTKPLIRFLLPASSNGAASDPASPKSLHSPLLTSQLGSDLEAPLPIVRPSSLRMLITKPTHTIHYYWRKFDDALMRPMFGGRGFVPYSPGSPTDPNVLVE

SEQ ID NO: 10606 - protein, 94 aa, Triticum monococcum
TGLPKGVMLSHRGLVTSVAQLVDGDNPNLHLREDDVVLCVLPMFHVYSLHSILLCGLRAGAALVVMKRFDTVKMMQLVERHGITIAPLVPPIVV

SEQ ID NO: 10607 - protein, 857 aa, Bordetella pertussis Tohama I
MRNHSSITMKKKDIEFLDVVTLRGPNIWTYRPVLEAWVDIGELEDFPSNTIPGFYERLSGWLPTLIEHRCSPGVRGGFLQRLREGTWPGHILEHVTLELQNLAGLPGGFGKARETSRRGVYKVVVRAWHEQVTRAALQEGRDLVMAAIEDRPFNVPAAVARLRALVDSLCLGPSTACIVDAADDRDIPYIRLFEGNLVQFGYGSRQRRIWTAETDRTSAIAEGISRDKDLTKELLSTCGVPVPEGRLVQSAADAWEAAQDIGLPVVVKPYDGNHGRGVFTNLLTRDEIESAYAVAVDEGSGVIVERFITGNEHRLLVVGDRMVAAAAGEPAWVTGDGVSTIEDLIGSQINTDPRRGRTENHPLNPVRLDSAARLEIARQGMTATSVPAAGRNVLIQRSGSVAFDVTDRVHPSVAATVALAARVVGLDVAGVDLVTDDISRPLDQTRGAIVEVNAGPGLLMHLKPADCPPRPVGRSIVDHLFPADDDGRIPIVGVTGTNGKTVVARLVARLVQKGDCANWAAGRRVLMNRSVDAAVIENDSGVILGQGLAYDRCLVGVVTNIDDGDHLGDFDINETDRLVDVFRTQIDVVLPGGAAVLNARDPRVVRMAELCDGEVLYFGLDPALPTLAAHLAEGKRAVYLRAGRIVLARGRDEEALADIAAVPLTHGGRVAFQIENVLAAVAAAWALDIPVELIRAGIETFDIDQADAPWQFTLFERNGACVVVDDVHNPSALRALLAAIEQFPARRRAAVYSAGADRNDDALVEQGRLLGTTFDQVVLYDDATVASKRPAGQARSLLRQGLEQSARATAIADEADHARAIARVLDDLREGDFALLQSDEAFSGPTIDLVRRWIQQG

SEQ ID NO: 10608 - protein, 426 aa, Vibrio angustum S14
MSVYSTLCFLAAAAMFIAFVNSKIGKMQTTIAITAGSLILSLLIIIAGHNGWFHLEDVAATQISKINFEDFLLKGILGFLLFAGGLGIKLPHLEDQKWEITVLALGATLFSTFFIGFSLWGICQVIGIQLDLIYCLLFGALISPTDPIAVLAIVKKMNAPRRISTQIEGESLFNDGFGLVIFVTMFTIAFGDTAPTVMGVTQLFLQEAIGGIAYGFVLGLIFHYLISSTNDHSMELLLTIGIPTAGYALAEVLHVSGPLAMVVSGIMIGNWTRYIGFSKESEEHLDHFWELVDEFLNGVLFLLIGMTMLDFSFHQEDWILMIIAVPLVLLSRYISVKLPYVGFNRYRQYNPMSVKILTWGGLRGGLALAMAMAIPAGVMVIPEKGIDVREIILVMTYSVVVFSILIQGSTITPLIEKAKLWELKNK

SEQ ID NO: 10609 - protein, 473 aa, Prochlorococcus marinus str. AS9601
MSKSPQDVLSQIKDEGIELIDLKFTDIHGKWQHLTLTSDMIEEDSFTEGLAFDGSSIRGWKAINASDMSMVPDASTAWIDPFYKHKTLSMICSIQEPRSGEPYDRCPRALAQKALKYLDSTGIADTAFFGPEPEFFLFDDVRYDSKEGGCFYSVDTIEAPWNTGRIEEGGNLGYKIQYKEGYFPVAPNDTAQDIRSEMLLLMGELGIPTEKHHHEVAGAGQHELGMKFDSLINAADNVMTYKYVVRNVAKKYGKTATFMPKPVFNDNGTGMHVHQSLWKSGQPLFFGEGSYANLSQTARWYIGGILKHAPSFLAFTNPTTNSYKRLVPGFEAPVNLVYSEGNRSAAVRIPLTGPSPKAKRLEFRSGDALANPYLAFSVMMLAGIDGIKNQIDPGDGVDVDLFELPADELAKIDTVPSSLNDSLNALKADKDYLLAGGVFTEDFIDNFIDIKYEEVQQLRQRPHPHEFFMYYDA

SEQ ID NO: 10610 - protein, 170 aa, Arabidopsis lyrata subsp. petraea
MGASASVPERSVHQFTVKDSSGKDLNLSIYQGKVLLIVNVASKCGFTETNYTQLTELYRKFKDQDFEILAFPCNQFLYQEPGTSQDAHEFACTRFKAEYPVFQKVRVNGQNAAPLYKFLKASKPTFLGSRIKWNFTKFLVGKDGLVIDRYGTMVTPLSIEKDIKKALEDA

SEQ ID NO: 10611 - protein, 110 aa, Physcomitrella patens; identical to SEQ ID NO: 402

SEQ ID NO: 10612 - protein, 133 aa, uncultured Frankia sp.
AKKAETYLRGTGIADTAYFGPEAEFYIFDDVRYDYNPYGSMHQVDSVEAAWNTARKEEGGNLGYKPRFKGGYFPVPPTDHFTDLRSEMTRVLYETGITVEMQHHEVGTAGQAEIDIRYDTLLKTADNLMLYKY

SEQ ID NO: 10613 - protein, 135 aa, Selaginella moellendorffii; identical to SEQ ID NO: 405

SEQ ID NO: 10614 - protein, 432 aa, Picea abies
AFDVSILTIDNGVFEVLSTSGDTHLGGEDFDQRIMDYFIKLVKKKHNKDISKDKRALGKLRRECERAKRALSSQHQVRVEIESLFDGVDFSEPLTRARFEELNMDLFKKTMGPVKKALEDANLQKTEINELVLVGGSTRIPKVQQLLKDLFDGKEPNKGVNPDEAVAYGAAVQGGILSGEGGDETKDILLLDVAPLSLGIETVGGVMTKLIPRNTVIPTKKSQVFTTYQDQQTTVSIKVYEGERSLTKDCRELGKFDLSGIPPAPRGVPQIEVTFEVDANGILNVRAEDKGTKKSEKITITNDKGRLSQEEIDRMVKEAEEFAEEDKKVKERIDARNNLETYVYNMKSTINEKDKLADKIDSEDKEKIEDALKEALDWLDENQSAEKDDFEEKLKEVEAVCSPIIKKVYEKTGGPSGGDGGDDEEDDSHEEL

SEQ ID NO: 10615 - protein, 122 aa, Yersinia pestis
LLDELNKRKRYQVNVVGEQARVEEVKNVSAVNSGSPEVVALIAEADIVTTAVGPQILARIAATVAQGLITRHQQGNTRPLNIIACENMVRGTSQLKQHVFAALSEDEQIWVEQHVGFVDSAV

SEQ ID NO: 10616 - protein, 344 aa, Candida albicans SC5314
MSPSTQQQVHESNQSQSNDSSSIGLRLNDNNIQPIEIELSSFKHDSITFHKQDSSYWFYEKSKQSFPGQSFGLQVEKILYHTKSSFQDILIFKSTNFGNVLVLNGIIQCTEKDEFAYQELITHLPIMSHPSPKKVLVIGGGDCGVIRELIKHVNDQTIQEITMVEIDDMVIKLSTKFLPEMAKYHNHPKVNLIIGDGFEFLKNSSKEKKYDVIITDSSDPDDGPAEEFFQINYFKLLLNALNEKGIVIMQSSENIWLNLPYLKELKSKAATVFSNVKYCQCYMPSYTSGQLGLIIATMDTGKDLVNPLRKFDHDKELKLFKYYNQHIHTNSFVLPTWADDYLNN

SEQ ID NO: 10617 - protein, 285 aa, Xylella fastidiosa Temecula1
MTTNDTWFTEHFQTTGSAIGFRVTGKLDEVQSPFQKIEIYNSTDWGKLMVIDGALMLTSRDNFLYHEMISHPALFTHTAPKCVVIIGGGDCGTLREVLKHPDIEQVTQCDIDEQVTRMAEKHFPELCTSNNDPRATLLFSDGVAYMADCPTNSVDVIIVDSTDPVGPAKGLFNRTFYESCFRALKNDGLLIQQSESPLALLELIKEMRHEMSKAGFKAFKTLPFPQPCYPTGWWSVTLSSKQPNANFAFRQTDAQTKPFDTLYYNAHLHHGVLVPPPFIAHALGE

SEQ ID NO: 10618 - protein, 540 aa, Zea mays
MGLGVDAETVRLGVLSSTSDHASVVSNNFFVALLCACIVLGHLLEENRMVNESITALLVGLGTGTVILMISRGVSIHVLVFSEDLFFIYLLPPIIFNAGFQVKKKQFFRNFITIILFGAIGTLISFVIISLGAMGLFKKLDVGPLELGDYLAIGAIFSATDSVCTLQVLNQDETPLLYSLVFGEGVVNDATSIVVFNALQNFDITHINAEVVFHLLGNFLYLFLLSTVLGVATGLISALVIKKIYFGRHSTDREVALMMLMAYLSYMLAELFALSGILTVFFGCIVMSHYTWHNVTESSRITTKHAFATLSFLAETFIFLYVGMDALDIEKWRSVSDTPGKSIAISSILMGLVMLGRAAFVFPLSFLSNLAKKNEHEKISWKQQVVIWWSGLMRGAVSMALAYNKFTRAGHTEVRGNEIMITSTITVVLFSTVVFGLLTKPLIRLLMPHRHLTMLSDDSTPKSLHSPLLTSQLGSSIEEPTQIPRPTNIRGEFTTMTRTVHRYWRKFDDKFMRPMFGGRGFVPFVPGSPTERNPHDLSKP

SEQ ID NO: 10619 - protein, 178 aa, Frankia sp. EAN1pec
MTVHDFTVEATDGTSRSLRDYAGKTLLIVNVASKCGLTPQYEGLEALYRDLKGRGLEILGFPCNQFGGQEPGTDAEIQEFCSTNFDVTFPVFSKIEVNGPGAAPLYDYLRSEAPGDFGPESGFLYEHIKRSRPEAIGTDEVKWNFTKFLVDGEGKVVRRFEPTVTPDELRGELDTSLA

SEQ ID NO: 10620 - protein, 163 aa, Kineococcus radiotolerans SRS30216
MTSPLDVPLTALTGGPLDPAQLTGRAVLVVNVASRCGSTPQYAGLQELQEEYGERGFTVLGVPCDQFGGQEPGTEEEIAEYCSATWGTTFPMTAKVEVNGPGRHPLYGALTATPDADGTAGDVAWNFEKFLVSPAGEVVARFRTRTTPQDPALRAAIEARLPA

SEQ ID NO: 10621 - protein, 300 aa, Saccharomyces cerevisiae YJM789
MVNNSQHPYIKDGWFREINDKSFPGQAFTMTVDSILYEARSEFQDILIFRNKVYGTVLVLDGIVQCTEFDEFAYQEMITHIAMFAHSNPKRVLIIGGGDGGVLREVAKHSCVEDITMVEIDSSVIELSRKFLPTLSNGAFDDERLDLKLCDGFKFLQDIGASDVHKKFDVIITDSSDPEGPAEAFFQERYFELLKDALNPNGVVIMQSSENFWLNLEYLHDLKNTAKKVFPNTEYCYTMVPTYTSGQLGLIVCSNNANIPLNIPQRKISEQEQGKLKYYNPQIHSSAFVLPTWADKVINE

SEQ ID NO: 10622 - protein, 317 aa, Symbiobacterium thermophilum IAM 14863
MNLERLGSITSELSTSLLKSIVVPQRSLRAWFARHRSSNPRNKNGRPDGRPERELDVSTAEFPAGPVILMGGTPVPDEAVVAAVHLSGGRSARLAVVPAAAGGDAAEAAAVAARAFTRFGMKHVEPVLLDSREKAADPEWVARLREYDAIVLCGDSPARGLHVLQATAAAAALRDHVKAGRLLVGIDAGAAILGSRLFPHEAEDGITVGLGIVPALLIDPGFSGAQRFSRLVRAMSAPEAAAMMGVGLDAQTGVLIADGEAKVLGEARVTVLDPWERGTPSEDRPGGLKVHLLTDGYRLDFRTRRAFPPERPEPNGK

SEQ ID NO: 10623 - protein, 874 aa, Clostridium perfringens ATCC 13124
MKINNQRIFEGRNIYSHRKCIRLDVDLEGYCETPTKDIDGFNERLLSYVPELYTHRCGIDIEGGFVQRLKEGTYLAHVCEHTIIGIHNKLGIDIKYGKAREIKDDFYYIIFEYKLKRTAILIAELAIDLINSIIKKKDINFDERIEIIKRVIMEESIGPSTKAICDAAKEVGLPIITVGNENLYQIGYGKAGKRFSATIGNNTKGIAIDIACDKMLTKELLDIQNLPVARGEKVFNTIHLLEVVNRIGYPVVLKPQWGSKGNGVFVNINSEKELLRAYAEITKECKEIMIEEYKVGNDYRVMLVDYKVVAVSLRKPPYITGDGVRTIRDLIEAMNANPLRGEGHEKPLTKVKIDEELINRLSKLGYSLNSVLEYGEKVTLRGNANLSTGGSAEDYTDLICKENIEICERAAKTIGLDICGIDICAKSIAEPLYENDGIILEVNAAPGIRMHHFPTIGKERNVGRKILDNMFKENYSNIPVISVTGTNGKTTTVRLISYVLNLIGFNVGCTTTSGVKIGNKYIHKGDDTGYNSARSVLLNPEVDIAVLESARGGLVRRGLAYDLADVGVITNIREDHLGIDGINDMEDLSFVKSLVGEAVKDNGYSVINADDEWSLKVLDRIKKPKILFSMNENNKYLQENLKHGNPIVFYRDETIYVKNRSKEYKIASAEEMKFTMNGKLKHNIENAMAACAALVGIEVDYCIISKGLKQFKSCEEDNRGRFNMFDVNGINVILDYGHNIDGYKVVIDSLKNLGLKNITGIIGVPGDRDLNTMKEVGRISGDFFDSIVIKEDKDLRGKDKGEVASIINEGVLSSNRKDLNVKIILSEEEALRETLKLAKKGETIIMFFEDYESLYDIINEFKNKGTKDLKSASI

SEQ ID NO: 10624 - protein, 68 aa, Brassica juncea
MTTSKRLADRKIEKFDKNITKRGFVPETTTKKGKDYPVGPILLGFFVFVVIGSSLFQIIRTATSGGMS

SEQ ID NO: 10625 - protein, 738 aa, Yarrowia lipolytica CLIB122
MIEAPLSQGAGYGVVLGVGLGFSMIMIFITWAMRRYQREVMSSEEFSTASRSVKTGLIAASVVSSWTWAATLLQSTSQAYKNGVSGPLWYSTGACVQVLLFATLAIELKRRAPGAHTYLEVIKMRFGPAGHIVFMCFGLATNILVTLMLLTGGSAVVKDLTGMNVVAACLLLPLGVILYTLFGGIKATFITDYLHTIILLVIILVFAFTTYANHDVLGSPGKVYDLLVARALEFPVKGNEHGSYLTMKSHDGAIFFVINIVGNFGTVFLDNGYWNKAIAASPAAALPGYVLGGLAWFAIPWLCATTMGLACLALEGTPSFPGYPARMSAEDVSAGLALPNAAVALLGKAGAGCALTMVFMAVTSAFSSELIAVSSIFTYDIYKGYINPKATGKTLIMTSHAAVVTFGFAIAGFAIGLYYIGVSMGFLYLLMGVIISSAVIPAVLTLMWGGLNFWAGVLSPPLGFCFAIITWLVTTKCEKGVINVDTAGSDLPMLAGNVVALLSPLMTIPVLTLIFGLDKFDFEKFKQITRADDSEFWKVDSIVEELGGSDEIVSIREKRANSPNKTGGSTTPEDPMEAEYGLHEPLPAAVEPPVHLEELDPAEKALLDKYAKIARIITAIMALCLLVLWPMPMYGVGYVFSKKFFTGWVVVGIIWIFFSAFLVVLYPLWESRQGIFETFRGLYWDCTGQTWKLRRWQGQTEDKQMAAHGVTRTFSHLERLDGQEVESDEGVQVTKIED

SEQ ID NO: 10626 - protein, 595 aa, Xanthomonas oryzae pv. oryzae KACC10331
MVAITPQDHSGPCGAVVSSPVATRYGPVSALLCVAICDAARAAALSFRVFMHSIDVVLAMLLAVAASGYLIRILPFSLPLPLVQIALGAVVSGVFDAGHELEPELFFLLFLPPLLFLDGWRIPKQGLFRDKAAILELALGLVIFTVIGAGVFIHWLIPAMPLAVAFALAAIISPTDPVAVSSIASKVPIPKRLMHILEGESLLNDASGLVCFQFAVAAVLTGTFSVAAASLTFLWVALAGLALGVATTFGLSRIQAWIWRHFGEEPGSAILVNLLTPFAAYLLAEAFHASGILAAVAAGITMSYVEMAGNAPGNMRLQRSAVWDTVQFTFNGIIFVLLGEQLPGILDGAVRSVQEAGHLNPWWLAVYVATISASLMALRFVWVFLSLRWNIFKAQRRGEAHVSPPWRIVVAVSLAGVRGAITLAGVLTLPLMLEDGSPFPARQLAIFLAASVILVSLLVASVALPRLLRGLELPEEEDEQLKEDLAAKAASQAALDAVEKLRQRLVDGSKHAERYNAAANQVSQRYQRKLGSVDMAETDPEEAVAYEKALRQFRHAALVAERNELFKLARRREISDELSRRLVRNLDLIESRKRA

SEQ ID NO: 10627 - protein, 1130 aa, Solanum tuberosum; identical to SEQ ID NO: 7056

SEQ ID NO: 10628 - protein, 638 aa, Closterium ehrenbergii
MTIQTHKIFRSGAMKLALGVLVLLLGADLISCQTGDTPDPLEASYAGDGAFLHKWQAASFTNFPLSFWHSVVGRPCPAPNSVDIPFAGVTCNDRLFTIGVDLSHPSMPAGTPKLEGVLDWNITGVIYLQTLDLSQNNLHGSIPAQMGLAPALRTLNLENNNFTGRLSPMLCYISTLECLHLAGNNLTGPLPDCWKGKFPCPDFEGNNLTITKGVDCLDVDYKSCVSNFTAITAPKTSSGLSVGVVIGIVFGSLAVVAFCVALVIFIRFKQDQRRKELEAERLAQDIETQISTRHFGTLRRFSVDELSKATNGFDEDNLLGEGGFSKVYKGKLEDGKSVAIKRIKEEKKSGGELMFLAEVELISRAVHRNVMHSEGFCVERGECMLVLPFYANGSVASRTQGKEGNPIDWSTRQKIARGAAEGIAYMHTDCNPKLIHRDIKAANVLLDESDEAVIADFGLAKEMDVQESHATTAVKGTIGHIAPEYFISGQCSEKTDVYAFGVFLLELVSGKDVFELTVAPEAEEILLRDWVANMLRDGKLAEFIDKDLVKLGYDEVEAAKMLQVALLCMKPEAADRPMMDDVAKMLSGRALADKWEKWQEEAAKMSGEDVMAVVNTPAIWENTTTGISLEAFNLSGPR

SEQ ID NO: 10629 - protein, 557 aa, Ustilago maydis 521
MAPQILKSLEPDPPRVQRGNLFDFLHSNPNKVDENKPVFYRLDGKKITRKQLYDDSRRLAYALRNKLGLRPGARIGIISPNSTAYPWVVHAGLCAGVVLVPLNPAYGAEELVHPVQQAEIEYIFCHQSVLNTVRDGLELAKVSLKSTNGQNRLWILDDGDSLKKDDKGEQDARTLLGDDRLETHKVVDDRTEDAFIVFSSGTSGKPKGVQLVHGNMTAVTTAIVHTFGDAISPNDRYIGVLPFYHIFGLAKFMCKGVYIGAECVVVPKFDLGVFCAAVEKFKCNISYVVPPILVLLAKDPRAKKYDLKSLKWVMSGAAPLGTELSMEVEAAHPGLRVTQGWGLSETSPTATFAKPEDYHAHMGTCGRLIAGVEGRLVDDDGNDVGFEQGENGKPGEFWVRGPTIMKGYLNNKEATDDCITPDGWFKTGDIAIMKNNYFWIVDRKKELIKYKGFQVPPAELEATLLSHPKIADVAVIGVYNKAQATELPRAYVVLKEEVAKNEDPEAVAKEIIEWTAKKVANHKRLRGGVKVLEEIPKSPSGKILRRLLRDEAAKESQ

SEQ ID NO: 10630 - protein, 187 aa, Selaginella moellendorffii; identical to SEQ ID NO: 426

SEQ ID NO: 10631 - protein, 701 aa, Oryza sativa Japonica Group
MAVVLLLMLVQLPGYLSCLLLCAIRAAVERAVAATFAAAGDAVSAAADAAVGVFVRVANGAKGGRKTKGPVIGIDLGTTYSCVGVYRNGHVDIVANDQGNRITPSWVAFTDDERLVGEAAKNQAALNPDRTIFDIKRLIGRRFDDEEVQRDVKYLPYKVVDKGGKPYVEVRVKAGEVKVFSPEEISAMILAKMKETAESYLGQRVTDAVVTVPAYFNDAQRQATKDAGTIAGLNVPRIINEPTAAAIAYGLDRKGAGEMTNVLVYDLGGGTFDVSVLSLDHGVFEVLATSGDTHLGGEDFDRRVMDHFIRLVKRQHGRDIGGDGRALGKLRRECERAKRALSRQHQVRVEIEALFVGVDFSETLTRAKFEELNMDLFKKTLGPVRKAIADAKLKKSDIDEIVLVGGSTRIPKVQELLKEMFDGKEPTKGINPDEAVAYGAAVQGSIISGEGGAETKDILLLDVTPLTLGIETAGGVMTKLIPRNTRIPVKKSQVFTTYEDHQTTVSIKVFEGERSLTKDCRELGRFDLSGIAPAPRGVPQIEVTFEVDENGILHVTASDKAAGRSKSITITNDKGRLSQEEIDRMVREAEEFAEEDRRVRERVDARNRLENYVYRMRSAVRDGGMAGKIGDDDRERMESALTEALEWLEDNDGGARTAEKEDYEEKLKEVEQVCGPIIKQVYKKSGDASAGAGDDDDVNEL

SEQ ID NO: 10632 - protein, 546 aa, Glycine max
MVFEISTVVSKLQTLSTSDHASVVSMNLFVALLCGCIVLGHLLEENRWMNESITALLIGVCTGIVILLFSGGKSSHILVFSEDLFFIYLLPPIIFNAGFQVKKKQFFVNFMTIMLFGAIGTLISCTIITLGATQIFKRLDVGPLELGDFLAIGAIFAATDSVCTLQVLNQDETPLLYSLVFGEGVVNDATSVVLFNAIQSFDLNQIDPSIAGHFLGNFLYLFIASTMLGVLTGLLSAYIIKKLYIGRHSTDREVALMMLMAYLSYMLAELSYLSGILTVFFCGIVMSHYTWHNVTESSRITTKHSFATLSFVAEIFIFLYVGMDALDIEKWKFVSDSPGTSVATSSVLLGLILLGRAAFVFPLSFLSNLAKKSPNEKISFRQQVIIWWAGLMRGAVSIALAYNQFTMSGHTSLRSNAIMITSTITVVLFSTVVFGLLTKPLIRLLLPHTPHHKESSITITTDPSTPSPKSVTVPLLGSAQESEVDIDGHDIHRPSSIRALLSTPTHTVHRLWRKFDDAFMRPVFGGRGFVPIEPGSPTERNGHQWR

SEQ ID NO: 10633 - protein, 292 aa, Coccidioides immitis RS
MTEITHPTIKDGWFSEISDMWPGQAMTLRVNQILHHEKSKYQDILIFESTDHGTCLVLDNVIQCTERDEFSYQEMITHLAMNSHPNPKKVLVIGGGDGGVLREIVKHESVEEAILCDIDEAVIRASKKYLPGMSIGFQHPNVKVHIGDGFKFLEERKNEFDVIITDSSDPEGPAEVLFQKPYFELLYGSLREGGVISTQGSENQWLHIKLITDLKKLMKEVFPVVEYAYTSIPTYPSGQIGFLVACKDPNRNIREPVRSWTREEEDKLCRYYNQDIHRASFVLPGFARKALE

SEQ ID NO: 10634 - protein, 641 aa, Bordetella pertussis Tohama I
MSKIIGIDLGTTNSCVAVLDGGQVKIIENAEGARTTPSIVAYMDDGETLVGAPAKRQAVANPKNTLYAVKRLIGRKFDEKAVQKDIDLMPYSIVKADNGDAWVEVRGKKLAPPQVSAEVLRKMKKTAEDYLGEEVTEAVITVPAYFNDSQRQATKDAGRIAGLEVKRIINEPTAAALAFGLDKTEKGDRKIVVYDLGGGTFDVSIIEIADVDGEMQFEVLSTNGDTFLGGEDFDQRIIDYIISEFKKEQGVDLSKDVLALQRLKEAAEKAKIELSSSQQTEINLPYITADASGPKHLNLKITRAKLEALVEELIERTIEPCRVAIKDAGVKVSDIDDVILVGGMTRMPKVQDKVKEFFGREPRKDVNPDEAVAAGAAIQGSVLSGERKDVLLLDVTPLSLGIETLGGVMTKMIQKNTTIPTRYSQTFSTADDNQPAVTIKVFQGEREIAAGNKGLGEFNLEGIPPAPRGLPQIEVTFDIDANGILHVSAKDKGTGKENKITIKANSGLSEDEIQRMVKDAEANAEEDHRLAELAQARNQADALVHATRKSLTEYGEKLEAAEKESIEAAIKDLEDILKTGDKAEIDAKVEALSTASQKLGEKMYADMQAQQQAQQQQAADNAKPVDDNVVDADFKEVKRDQ

SEQ ID NO: 10635 - protein, 165 aa, Cichorium intybus x Cichorium endivia
MSFSEEQEALVKEAWEIMKEDIPALSLYFFTQVLEIAPAAKGLFSFLKDAEEIPQDNPKLKSHAVKVFKMTCEAIQLREKGEVVVSGSTLKYLGSVHLQKGVIDAHFAVVKEGVLRTVEKGVGEKWSEEMKGAWSEAYDQLAAAIITEMKKEATEMDEEAEETQT

SEQ ID NO: 10636 - protein, 99 aa, Selaginella moellendorffii
NIGKIMKRVLPDNSKMTKDAKDLVQECVPEFICFVTGIAADRCTKEKRKTINGDDILKALQQLGFAEHAEIVRVYFERKVAQEAAAAAAAAAGGKAATR

SEQ ID NO: 10637 - protein, 711 aa, Oryza sativa Japonica Group
MAWWWWWSEAVVVGGGTGGGSSGTVVSICVFTAVLCVCLVAGHLLEENKWVNESITALLIGCVVGAIIFLLSEGKNSRILRFDEQLFFIYVLPPIIFNAGFQVKKKQFFHNFLTIMSFGIFGVFISVAIVSTGCYWLFPKVGFGDLGAVDYLALGAIFSSTDTVCTLQVISQDETPRLYSLVFGEGVVNDATSVVLFNAIKNLDITQLKGGVALKVISDFLYLFFTSTMLGVTIGLSTAYALKALYFGRHSTDREVALMALMAYLSYMLAEVVIWWAGLMRGAVSIALAYNQFTFSGVTLDPVHATIITSTIIVVFFTTLVFGFLTRPLISAILPHQHRQSTTPGTGGGGRSTGSNSPKDDFIMPFLSPDEEASGSGSGFLQAKRSISMLLERPVHTVHIYWRKFDDRFMRPIFGGPMERDRGNLQILLSVGPVRPGRCCRSDRRVSRGQTGAARGDSRCRESICGDGLGVGLGIRRRPWWSEIMRDTKARVQYTWLVKIPYGIRWRYCVRMGCRVEFGRSPNLIGVEDNDVWEDRSSVDDDERRWAMQTCSLMGKKYNQQQEGGERGRRGRRLRAAEDGRKHCNRELANAQLRTEAEDGTPPVAVQASSASPTRTSAPRPPPSAAAPAASASTSSSAAAVAPRRGCRPQPPPSAAASASPSDVAAAPCRGCRPQPPPSAAASASPSDVAAAPRRGRRPRLPMTMRERGEE

SEQ ID NO: 10638 - protein, 122 aa, Yersinia pestis
LLDALNKRKSYQVNVVGEQARVEEVKNVSAVNSGSPEVVALIAEADIVTTAVGPQILARIAATVAQGLITRHQQGNTRPLNIIACENMVRGTSQLKQHVFAALSEDEQRWVEQHVGFVDSAV

SEQ ID NO: 10639 - protein, 156 aa, Selaginella moellendorffii
HSDDAGGHGGERDNSNVREQDRFLPIANISRIMKKALPANAKIAKDAKETVQECVSEFISFITSGASDKCQREKRKTINGDDLLWAMSTLGFEEYLEPLKIYLQKYRETEGDKGSGVKGEGKKDQSMAVPSPVQSSMYTSMSYLPQQVTTQFPSHL

SEQ ID NO: 10640 - protein, 377 aa, Pereskia aculeata; identical to SEQ ID NO: 7063
  misc_feature (7)..(7): Xaa can be any naturally occurring amino acid
  misc_feature (118)..(118): Xaa can be any naturally occurring amino acid
  misc_feature (120)..(124): Xaa can be any naturally occurring amino acid
  misc_feature (151)..(151): Xaa can be any naturally occurring amino acid
  misc_feature (174)..(174): Xaa can be any naturally occurring amino acid
  misc_feature (204)..(204): Xaa can be any naturally occurring amino acid

SEQ ID NO: 10641 - protein, 387 aa, Yersinia pestis CO92
MKALHFGAGNIGRGFIGKLLADAGAQLTFADVNQPLLDELNKRKRYQVNVVGEQARVEEVKNVSAVNSGSPEVVALIAEADIVTTAVGPQILARIAATVAQGLITRHQQGNTRPLNIIACENMVRGTSQLKQHVFAALSEDEQIWVEQHVGFVDSAVDRIVPPSEAGSTDILAVTVETFSEWIVDGTQFKGQPPEIVGMELTDNLMAFVERKLFTLNTGHAITAYLGQLAGHQTIRDAILDPAVRQTVKGAMEESGAVLIKRYAFDPQKHAAYINKILSRFENPYLHDDVERVGRQPLRKLSAGDRLIKPLLGTLEYQLPHDSLVTGIAAAMSYRSEQDPQAQELVTLLAQLGPKAALAQISGLPADSEVVEQAVSVYNAMQQKLAH

SEQ ID NO: 10642 - protein, 122 aa, Pectobacterium carotovorum subsp. carotovorum
LLDALNSRKSYTVRIVGDNTQVDTVSNVSAVHSGSQDAVALIAVADLVTTAVGPQILEKIAGTIAQGLVKRHEDGNTRPLNIIACENMVRGTSQLKQHVLKLLPEGHQEWVVEHVGFVDSAV

SEQ ID NO: 10643 - protein, 153 aa, Selaginella moellendorffii
QDSPHSDDAGGHGGERDNSNVREQDRFLPIANISRIMKKALPANAKIAKDAKETVQECVSEFISFITSEASDKCQREKRKTINGDDLLWAMSTLGFEEYLEPLKIYLQKYRETEGDKGSGVKGEGKKDQSMAVPSPVQSSMYTSMSYLPQQAL

SEQ ID NO: 10644 - protein, 468 aa, Pseudomonas fluorescens Pf-5
MSKSVQLIKDHDVKWIDLRFTDTKGTQHHVTMPARDALDEDFFEAGKMFDGSSIAGWKGIEASDMILMPDDETAVLDPFTEEPTLILVCDIIEPSSMQGYDRDPRAIAKRAEEHLKATGIGDTVFAGPEPEFFIFDQVKFKSDISGSMFKIYSEQGSWMSDQDIEGGNKGHRPGVKGGYFPVPPFDHDHEIRTSMCNALEEMGLTVEVHHHEVATAGQNEIGVKFNTLVKKADETQTLKYVVHNVADAYGRTATFMPKPLYGDNGSGMHVHMSIWKDGKNTFAGEGYAGLSDTALYFIGGIIKHGKALNGFTNPATNSYKRLVPGFEAPVMLAYSARNRSASIRIPYVSSPKARRIEARFPDPAANPYLAFAALLMAGLDGIQNKIHPGDAADKNLYDLPPEEAKEIPQVCGSLKEALEELDKGRAFLTKGGVFSDDFIDAYIALKSEEEIKVRTFVHPLEYELYYSC

SEQ ID NO: 10645 - protein, 535 aa, Oryza sativa Japonica Group
MGMEVAAARLGPLYTTSDYASVVSINLFVALLCACIVLGHLLEENRWVNESITALIIGLCTGVVILLMTKGKSSHLFVFSEDLFFIYLLPPIIFNAGFQVKKKQFFRNFMTITLFGAVGTMISFFTISIAAIAIFSRMNIGTLDVGDFLAIRAIFPATDSVCTLQVLNQDETPFLYSLVFGEGVVNDATSIVLFNALQNFDLVHIDAAVVLKFLGNFFYLFLSSTFLGVFAGLLSAYIIKKLYIGRHSTDREVALMMLMAYLSYMLAELLDLSGILTVFFCGIVMSHYTWHNVTESSRVTTKHAFATLSFIAETFLFLYVGMDALDIEKWEFASDRPGKSIGISSILLGLVLIGRAAFVFPLSFLSNLTKKAPNEKRTWRQQVVIWWAGLMRGAVSIALAYNKFTRSGHTQLHGNAIMITSTITVVLWSTMVFGMMTKPLIRLLLPASGHPVTSEPSSPKSLHSPLLTRMQGSDLESTTNIVRPSSLRMLLTKPTHTVHYYWRKFDDALMRPMFGGRGFVPFSPGSPTEQSHGGR

SEQ ID NO: 10646 - protein, 528 aa, Cytophaga hutchinsonii ATCC 33406
MPIFLALAVICGIFIGAALSKKGTEQNIAGNYLRFAEILNYVQQDYVDTVDVDKLVDYSISQMLEKLDPHTSYIPASERQIADSHLESDFEGIGIEFNIIKDTIYVVSPISGGPSEKAGLMAGDKIIKVDSIQMAGNGVTSADVFKRLRGKKGTKVLLTVKRSNSSKLLTYTIIRDKIPTYSIDAAYMIDKTTGYIKISRFGDKTYNEFLTALTDLKTQGMQRLMIDLKDNGGGYLDRATNIADQLIDGNKMIVYTNGKGTKYDQEIRARVTGAFETGPVVVLINEGSASASEILSGALQDNDRGLIVGRRSFGKGLVQMPINLNDGSELRLTISRYYTPSGRSIQKPYDKEDASAYESDLLSRYEHGEFFHADSIHFNDSLKFKTLKGRTVYGGGGIMPDVFVGRDTSEYTKYLMELFNQNVIREYTLNYYQTNKAALTKMTFEEYFKSFTVTEAMLKDMLDLAAKTGVKYNEVQYKRSKDFIKNNIKAYIARSAWGNKGFYPIYNQKDEIYNKGLNAFKEAEKISQ

SEQ ID NO: 10647 - protein, 153 aa, Selaginella moellendorffii
QDSPHSDDAGGHGGERDNSNVREQDRFLPIANISRIMKKALPANAKIAKDAEETVQECVSEFISFITSEASDKCQREKRKTINGDDLLWAMSTLGFEEYLEPLKIYLQKYRETEGDKGSGVKGEGKKDQSMAVPSPVQSSMYTSMSYLPQQAL

SEQ ID NO: 10648 - protein, 373 aa, Arabidopsis thaliana
MISQREEREEKKQRVMGDKKLISSSSSSSVYDTRINHHLHHPPSSSDEISQFLRHIFDRSSPLPSYYSPATTTTTASLIGVHGSGDPHADNSRSLVSHHPPSDSVLMSKRVGDFSEVLIGGGSGSAAACFGFSGGGNNNNVQGNSSGTRVSSSSVGASGNETDEYDCESEEGGEAVVDEAPSSKSGPSSRSSSKRCRAAEVHNLSEKRRRSRINEKMKALQSLIPNSNKTDKASMLDEAIEYLKQLQLQVQMLTMRNGINLHPLCLPGTTLHPLQLSQIRPPEATNDPLLNHTNQFASTSNAPEMINTVASSYALEPSIRSHFGPFPLLTSPVEMSREGGLTHPRLNIGHSNANITGEQALFDGQPDLKDRIT

SEQ ID NO: 10649 - protein, 377 aa, Calymmanthium substerile; identical to SEQ ID NO: 7067

SEQ ID NO: 10650 - protein, 621 aa, Zea mays
MPSRSSLLPLLLLCAAAAAAAASSRNAELDALMELKAALDPAGRALASWARGGDPCGRGDYFEGVACDARGRVATISLQGKGLAGAVPPAVAMLPALTGLYLHYNALRGEIPRELAALPGLAELYLGVNNLSGPVPAELGRLGSLQVLQLGYNQLTGSIPTQLGLKKLNEGFLYENNPELCGAQFDSLKACPNDGNDDGRTPRKPESTSVIKPQQIQKAADLNRNCGDDGGCLKPSTLPTGAVVAGTFVIVAGAAACGLSAFSWHRRQKQKIGSSSVEHLEGRPSLDRSKEAYERSAVSSLINVEYSSGGWDTSSEGSQSQHGVARLSSAAECGSPSVRFNLEEVECATQYFSDVNLLGKSSFAATYKGVMRDGTAVAVKSISKSSCKSEEADFLRGLRALTSLRHENLVGLKGFCRSRASGGCFLVYEFMTNGSLSRYLDAKESDAADAAAVLDWPTRVSIIKGVAKGIEYLHSSKLAHQSISADKVLLDHLHAPRLSGAGLHRLLADDVVFAALKDSAAMGYLAPEYATTGRSTDKQGDVYAFGVVVLQVLAGRRAVSPPHLQQDGGGRLDDLVDPRLRGRFSRAEAAKLAGVALLCTAEAPAQRPAMAAVLQQLGTSS

SEQ ID NO: 10651 - protein, 505 aa, Arabidopsis thaliana
MEVLASSSLSPISFTKPNKINPNFSIQISKASKFSYARSRSNISRSNAANPGVVFVCNRFLCVIERNDQRKLSGKVMMKSSVNFRQNLSVALVRIVSVLLVSSISVVTTDSPPSWGLTEENLLFLEAWRTIDRAYIDKTFNGQSWFRYRETALRNEPMNTREETYMAIKKMVATLDDPFTRFLEPGKFKSLRSGTQGAVTGVGLSIGYPTASDGPPAGLVVISAAPGGPANRAGILPGDVIQGIDNTTTETLTIYDAAQMLQGPEGSAVELAIRSGPETRLLTLTRERVSVNPVKSRLCELPGSGSNSPKIGYIKLTTFNQNASSAVREAIETLRGNNVNAFVLDLRDNSGGSFPEGIEIAKFWLDKGVIVYICDSRGVRDIYDTDGSNAIATSEPLAVLVNKGTASASEILAGALKDNKRALVYGEPTYGKGKIQSVFELSDGSGLAVTVARYETPAHTDIDKVGVTPDHPLPKSFPKDEEAFCGCLKDPTAACYLNQGLLFSR

SEQ ID NO: 10652 - protein, 162 aa, Brassica napus
PRVRPRVRLISATMTKIIKEMLPPDVRVARDAQDLLIECCVEFINLVSSESNEVCNKEDRRTIAPEHVLKALQVLGFGEYIEEVYAAYEQHKYETMQDTQRSVKCNSGAQMTEEEAAAEQQRMFAEARARMNGGAPVPQPQHPETEHPESDHPETDQRSLQS

SEQ ID NO: 10653 - protein, 377 aa, Talinum paniculatum; identical to SEQ ID NO: 7072

SEQ ID NO: 10654 - protein, 164 aa, Vitis vinifera
MQYQNSIPSHLSMADKQDLLLPIANVGRIMKQILPPGAKVSKEAKETVQECVSEFVKFVTGEASAKCRKEDRQTVTVDDICWALSALGLDDYAGATVRYLHKYREFERERVNQKVQNEVHSTRAKSGASNYKCIQAGKQTETPTPLLLFKVTDQNGSSSLTKLS

SEQ ID NO: 10655 - protein, 448 aa, Streptococcus pyogenes M1 GAS
MAITVADIRREVKEKNVTFLRLMFTDIMGVMKNVEIPATKEQLDKVLSNKVMFDGSSIEGFVRINESDMYLYPDLDTWIVFPWGDENGAVAGLICDIYTAEGKPFAGDPRGNLKRALKHMNEIGYKSFNLGPEPEFFLFKMDDKGNPTLEVNDNGGYFDLAPIDLADNTRREIVNILTKMGFEVEASHHEVAVGQHEIDFKYADVLKACDNIQIFKLVVKTIAREHGLYATFMAKPKFGIAGSGMHCNMSLFDNQGNNAFYDEADKRGMQLSEDAYYFLGGLMKHAYNYTAITNPTVNSYKRLVPGYEAPVYVAWAGSNRSPLIRVPASRGMGTRLELRSVDPTANPYLALAVLLEAGLDGIINKIEAPEPVEANIYTMTMEERNEAGIIDLPSTLHNALKALQKDDVVQKALGYHIYTNFLEAKRIEWSSYATFVSQWEIDHYIHNY

SEQ ID NO: 10656 - protein, 695 aa, Coprinopsis cinerea okayama7#130
MPPHHATRRYDLHHDDHFEEPPPSYTGSTGLLTPNSSPARPSQNASTRQRSSRRSETLLDASELTDPAVNADIYQELPASSLEPFKELEYDDVPLVDLDPVEIQVDGQTSLSPSYLLPNGQTLKWYQALDSEVLVAETVARARMKIKGDPRLVDVAQGKILNYEMGAGKTHTALTVIDQTLIQLDDVFTKHGLEFEKKPVLIVVEKGLHEQWKRHAEELFNLRVKIYDKGNQPLPSGDYDILLVNIDLTRNQLGRILDNKLKEPSQRRNFKPHLAAPFFQTSFLYIIVDEFHKYSNPSTLSAWSLLSLRADHFLLLSGTPAQNKLDDLQVPFALLQHPSKRKNFREEQLRNRQINNALKKAKAPSGKTRTIHLKLEEVVHKLNFEYDNTILERTMITRRTEGLPVRKNFLVEVRLAETESALHDYMEDAYSDCIFVQFIRTRQACIHPGVLLRAGAVPPGAQMVRGRTGYYLTDSGNDDCEDVSNEFGDLDMDIDEDSVRDHPPLDEELGKPGDIFSDGFLSSKFQVVLGLLRRHYRKNEKTLIFSSFVTVLDVLSECLDAHGIGHVRYDGSMSTKARQEALDSIVQDDESMVMLVSIKSGGTGLNITSCNNVVILDPWWNPYVEEQAISRAHRLGQEKEVNVYRITAPNTVEDKICKTQHRKFNIIDPLQDRCAATTIHQDALRKTRQATGRSR

SEQ ID NO: 10657 - protein, 426 aa, Oryza sativa
  misc_feature (84)..(84): Xaa can be any naturally occurring amino acid
  misc_feature (106)..(106): Xaa can be any naturally occurring amino acid
  misc_feature (113)..(113): Xaa can be any naturally occurring amino acid
  misc_feature (122)..(122): Xaa can be any naturally occurring amino acid
MDADEVVEEKDSGILSQDFFCTPDYITPDAPQLGSGFDANKENIPCPNSPEKSVCRSKRYKRDCSPKGPWAPIDIFWIASWICXPFSFEGLDDSEEEQLKESSSHXKRGSYVXSQSAVALRXCRVMPPPCIRNPYLNTDHQIDDNVFGGRQCKSSGFSPSVDGDGLSRYRTDFHEIEQIGRGNFSVVFKVLKRIDGCLYAVKRSIRQLHNDRERRQAVKEVQALAALGCHENIVGYFTSWFENKQLFIQMELCDRCLSMDRNQPLKCGEALELLYQICKGLDFIHERGIAHLDVKPDNIYVRNGVYKLGDFGCATLIDRSLAIEDGDSRYMPPEMLNDKYEHLDKVDIFSLGAAIYELIRGTQLPDSGPQFTSLREGKIALLPGCPMQFQSLIKSMMDPDPVRRPSAKEVLRHPIFDKLHKAPAKK

SEQ ID NO: 10658 - protein, 259 aa, Oryza barthii
LSYFLLISILGSVLLMFLKPSNPEFRPGYIDMLFLSTSALTLSSLITIEMEVLSSSQIVVITLLMLLGGEVFVSFLGLMLRLNHKHNPEFSGDKVSSVPIELDTINSASTVISCEELQLEAAIPEVPSSTIKDLKRSKRLRWFLGFVVFSYFVVIHVAGFLLVLWYISRVSSAKAPLKKKGINIALFSFSVTISSFANVGLVPTNENMAIFSKNPGLLLLFIGQILAGNTLYPLFLRLLIWFLGKVTKLRELKLMIKNP

SEQ ID NO: 10659 - protein, 862 aa, Arabidopsis thaliana
MSLLHTFKETLKPCGSFPSSSSLRVSSTQELEPSRKPPKSSLSQQLLRLDDSYFLPSKHESKISKTQVEDFDHNEDDHKRNIKFDEEEVDEDDERSIEFGRPGLSRAEFDYSGPYEPLMLSSIGEIPIIHVPASINCRLLEHQREGVKFMYNLYKNNHGGILGDDMGLGKTIQTIAFLAAVYGKDGDAGESCLLESDKGPVLIICPSSIIHNWESEFSRWASFFKVSVYHGSNRDMILEKLKARGVEVLVTSFDTFRIQGPVLSGINWEIVIADEAHRLKNEKSKLYEACLEIKTKKRIGLTGTVMQNKISELFNLFEWVAPGSLGTREHFRDFYDEPLKLGQRATAPERFVQIADKRKQHLGSLLRKYMLRRTKEETIGHLMMGKEDNVVFCQMSQLQRRVYQRMIQLPEIQCLVNKDNPCACGSPLKQSECCRRIVPDGTIWSYLHRDNHDGCDSCPFCLVLPCLMKLQQISNHLELIKPNPKDEPEKQKKDAEFVSTVFGTDIDLLGGISASKSFMDLSDVKHCGKMRALEKLMASWISKGDKILLFSYSVRMLDILEKFLIRKGYSFARLDGSTPTNLRQSLVDDFNASPSKQVFLISTKAGGLGLNLVSANRVVIFDPNWNPSHDLQAQDRSFRYGQKRHVVVFRLLSAGSLEELVYTRQVYKQQLSNIAVAGKMETRYFEGVQDCKEFQGELFGISNLFRDLSDKLFTSDIVELHRDSNIDENKKRSLLETGVSEDEKEEEVMCSYKPEMEKPILKDLGIVYAHRNEDIINIGETTTSTSQRLNGDGNSADRKKKKRKGCSEEEDMSSSNREQKREKYKMLAEFKGMEILEFSRWVLSASPFDREKLLQDFLERVK

SEQ ID NO: 10660 - protein, 748 aa, Coprinopsis cinerea okayama7#130
MGNRSSGVGTRSRSAKLALNTPPPSTKQTFIGYNPSTGTLIKQEPGSEDEFPPSPTRVPVRRTAAPVKREQEAPLRTPLFLPPPSRKLHPSVKFENVNVPSTSKLEPTSSTSTPKRRGFLATGTTFPNGLATPESSPVKQAPASRPRSSDTDNMKQEDTNVDPSSSEPETQKTSAKKVRGPFQPFSVRPLKVARLKAKQKTEDGNLTVEYCTDNGHTLKWFQQLDFQDIVAETLARERMRLDKDDDLLKDVAQGKILNYHMGLGKTHVALAVVAESLRQLQMVCSRQRKAMGRKPVLVCAEKSLHEHWREHAIALFNFKVFVYTSGSQRIPEDADIVISTINMIGNHHKSAYFENQPHKAHMTQIHWFYVIVDEFQNHNNPETLGARALLRLEKDHVLLLSGTPAGNSLNDLQVPLALLQHPSKRPDFRRREYEAYHSGKKNRNPRAEHVVTYHNLENDVLIDLVFIRRLDEDKDLPPRTNLVIKIPFTEEERKAYDTVKDKVAGLPRLMRWRQGCLHPQLLVRAGILTPPGKTKSESEVDMDVVDEVKDEMDMDIDDDIVPYIHAKQETSEEDNVYSDKYLSGKFKVVLNLLRKIIGAREKVVIFSSYVTLLELLGECLDARRIKFIEFNGKKSTHERTGALDVIANDPRCHVMLISLKAGSVGLDITSCNNVILMDPWWNPFVEEQAISRVHRFGQTRPVTVYRIITPDTIEPRIQEIQQEKRTQVEAYLDMCAAITKQRDAVRLG

SEQ ID NO: 10661 - protein, 481 aa, Helicobacter pylori J99
MVVRTQNSESKIKEFFEFCKENEVEFVDFRFSDIKGTWNHIAYSFGALTHDMFKEGIPFDASSFKGWQGIEHSDMILTPDLVRYFIDPFSADVSAVVFCDVYDVYKNQPYEKCPRSIAKKALKHLRDLGLGDVAYFGAENEFFIFDSIKIKDASNSQYYEVDSEEGEWNRDKSFENGVNFGHRPGKQGGYMPVPPTDTMMDIRTEIVKVLNQVGLETFVVHHEVAQAQGEVGVKFGDLVEAADNVQKLKYVVKMVAHLNGKTATFMPKPLYGDNGSGMHTHVSIWKNNENLFGGETYKGLSEFALYFLGGVLRHARGLAAFTNASTNSYKRLIPGYEAPSILTYSASNRSASVRIPYGISKNSARFEFRFPDSSSNPYLAFGAILMAGIDGIKNKMDPGEAMDINLFKLTLDEIREKGIKQMPHTLRRSLEEMLADKQYLKEGQVFSEEFIQAYQSLKFHSEVFPWESKPHPFEFITTYSC

SEQ ID NO: 10662 - protein, 615 aa, Vitis vinifera
MYEPRNTKDREPTDDPSDGLGFSEHNLTVTEIHAHPRHSMQMKPHQVEGFNFLVSNLVAENPGGCILAHAPGSGKTFMIISFMQSFLAKYPQARPLVVLPKGILATWKKEFLTWQVEDIPLYDFYSVKADSRPQQLEVLKQWVAEKSILFLGYKQFSSIVCGDGASKATIACQEILLKAPQILILDEGHTPRNENTDVLYSLAKVQTPRKVVLSGTLYQNHVKEVFNILNLVRPKFLKLESSRAVVKRIMSKVDIMGVRKQLKSNAADAFYDLVENTLQKDDNFRRKITVIQDLREMTSKVLHYYKGDFLDELPGLVDFTVLLNLSARQKKEVGNLNKFERKFKKNSVGSAVYLHPQLKYFAEKLAANESKTDEMTCQKKMDEILEQLDVRDGVKAKFFLNVLALCQSSGEKLLVFSQYLLPLRFLEKLTMKVKGWSPGKEIFAISGESSSEQREWSMERFNTSPDARVFFGSIKACGEGISLVGASRVLILDVHLNPSVTRQAIGRAFRPGQKKKVHVYKLVAADSPEEEDHNSCFKKELISKMWFEWNEYCGHHEFEAETVDVSDSGDLFLESPLLREDITVLYRRLVIHYSSMSSPSSSLRISQLCCLTFII

SEQ ID NO: 10663 - protein, 259 aa, Oryza barthii
LSYFLLISILGSVLLMFLKPSNPEFRPGYIDMLFLSTSALTLSSLVTIEMEVLSSSQIVVITLLMLLGGEVFVSFLGLMLRLNHQHNPDFSGDKVSSVPIELDTIDSAGTVISCEELQLEAAIPEVPSSTIKDLKRSKRLRWFLGFVVFSYFVVIHVAGFLLVLWYISRVSSAKAPLKKKGINIALFSFSVTVSSFANVGLVPTNENMAIFSKNPGLLLLFIGQILAGNTLYPLFLRILIWFLGKVTKLRELKLMIKNP

SEQ ID NO: 10664 - protein, 804 aa, Ashbya gossypii ATCC 10895
MTRLRTRAAKSGVRVDYREQDQNFLYEVEASSSDEVDIIKDATATWLEDEKVELDITLDSDAEGDAELDAELDMNRRRAEKSAAAASEDAQDTEKDLDAYAVQERVDRLQEFVRQSKVYSGIIADTLLHRAQERQSEQASSAAAPGPARKKPKTVVEFFKRSKQQPADEKQPEPSIQQPTLVRNCTLKPYQVEGVNWLITLYENGLNGILADEMGLGKTIQSIALLAFIYEMDTRGPFLVTAPLSVVDNWITEFEKFAPSIPVLKYYSADGPGKRHAILKEFFRKNSGEGVVVTSYEIVMRDMNVILSHQWKFLIVDEGHRLKNINCKLIRELKRINTFNRLLLTGTPLQNNLAELWSLLNFILPDVFADFEIFSKWFDFSDLDLKTSSQRWDKIIGEELEKNLVTNLHTILKPFLLRRLKRVVLADALPPKREYIINCPLTPLQTRFYKMALAGKLKRTVFTQAIKEFFTLNREHIGSVSNKTIREFIDYKTSDEEIQASKVITDMEKLYEQHIHKELRNKRLQNLMMQLRQIVDSTFLFYFPYLKAEDLQLPVLLQTSGKLQILQQLLPRLLAAKHKVLIFSQFVSMLDLIEDWCELNNYSACRIDGSMDNETRREQINSFSEKGSPHSLFLLSTRAGGLGINLTAADSVILFDNDWNPQVDLQAMDRSHRIGQQHPVIVYRLYCDKTVESVILARATNKRKLEQLVIQMGKFSTLKKLALNEHSFLTLGTQTASNNNARELVQELSKLLLDSESTFSFSSAGPLTDEELEVLTDRSIQAYKITDTEYPHIKLFETSSGFDN

SEQ ID NO: 10665 - protein, 1040 aa, Microcystis aeruginosa PCC 7806
MKILHGTWIPESTDEFIQKGSFYLWGETSTPKKSRTTADNYHPFQLSKEELTSFLTGELGIVQSNYNPLSRQFVPRYFLLPSHDNQPLPSLELLRYLEKEPPENSQWQSWQIDCYPLNPVLKLLNDLHFICLYNSSEIQLGADLLFWYHYSQAFKEIILKDNYIPAFKYRELATNNKKTANFAIYPLWEIISATYETNLDRYLEYLPRICLAGAENSHASPQLYDPKTLLRHFSECLLNEIVTNTAIPASFDKKISETIIGDCFSVTKTAGFLQTAAALEKYQQWQTWRQQLLGDQNISSFSLGFKLTEAPENNIEQWQITFILISKQDPSLRLELDEYWYAVPETRTSIRAHFGQDLDKNILLSLGYAARIYPPIWQGLETDKPTGFSLNLTEAFTFLKETAWILEDAGYKVIIPAWWTPEGRQRAKVRLKTTSKSGKSTPVSKGIFSIENIIEYQYELAIGEETISQEEWQQLINTKTPLVKFRGQWVELEQNKMQQMLDFWQKYQQENPEMNLIELMKKAAEYPEEIIVETDDFLGSMLEKLQNPSQLEPIENPPQLQGTLREYQKRGVAWIQYLEQLGLNGCLADDMGLGKTLQVIARLIGEREGDNNVLPTLLVAPTSVVGNWAKEIEKFAPHLQVLIHHGSKRYQDENEFQTVASHKDIVITSFTLVRKDLKLFNSQSWQRLVIDEAQNIKNPKAAQTKAILSLSAQHRLALTGTPVENRLLDLWSIFNFLNPGYLGKETQFRKAFEVPIQKQNDRLQSTVLKKLVEPFILRRVKTDKQIIKDLPDKVENKQYCNLTKEQASLYEVVIKEVEKQLEEAEGIKRKGLILSTLMRLKQICNHPRQFLQDNSAFTPERSHKLERLGEMLEEVILEGDSLLIFTQFTEIGDSLQKYLKQTFRYNTYYLHGGTSQPKREQMIEEFQHPETEPSVFILSLKAGGVGITLTKANHVFHFDRWWNPAVENQATDRAFRIGQQKNVFVHKFVTLGTLEERIDEMIEEKKKVANAIVSNDESWLTELDNESFRQLIALNKQTII

SEQ ID NO: 10666 - protein, 446 aa, Mycobacterium smegmatis str. MC2 155
MDRQKEFVLRTLEERDIRFVRLWFTDVLGYLKSVAIAPAELEGAFEEGIGFDGSSIEGFARVFESDTVARPDPSTFQVLPWKTSDGNHYSARMFCDITMPDGSPSWADSRHVLRRQLAKASDLGFTCYVHPEIEFFLLKPGPNDGTPPEPADNGGYFDQAVHDAAPNFRRHAIEALEQMGISVEFSHHEGAPGQQEIDLRYADALSMADNVMTFRYLVKEVALADGVRASFMPKPFAEHPGSAMHTHMSLFEGDTNAFHSPDDPLQLSDVAKSFIAGILEHANEISAVTNQWVNSYKRLVHGGEAPTAASWGAANRSALVRVPMYTPHKVSSRRVEVRSPDSACNPYLTFAVLLAAGLRGVEKGYVLGPQAEDNVWSLTQEERRAMGYRELPTSLGNALESMENSELVAEALGEHVFDYFLRNKRSEWENYRSHVTPYELKNYLSL

SEQ ID NO: 10667 - protein, 145 aa, Populus trichocarpa
METEKVVAEAEELPKAIVRRVVKDTLSRCSPEDSDINVHKDALLAFSESARIFIHYLSATANDICKESKRQTMNADDVFKALEDIEFPEFVGPLKVSLSEFKRKNGGKKVGSAQNKEVQKKRKTGGPSKKSGGKSTPKKGDTGEK

SEQ ID NO: 10668 - protein, 382 aa, Klebsiella pneumoniae subsp. pneumoniae MGH 78578
MKALHFGAGNIGRGFIGKLLADAGIELTFADVNQTVLDALNARHSYQVHVVGENEQVDTVSGVNAVSSIGDEVVDLIAEVDLVTTAVGPVVLERIAPAIAKGLAQRKAQGTERPLNIIACENMVRGTTQLKGHVFNALAEEHKAWVEAHIGFVDSAVDRIVPPSASATHDPLEVTVETFSEWIVDKTQFKGALPTIPGMELTDNLMAFVERKLFTLNTGHAITAYLGKLAGHQTIRDAILDEKIRAVVQGAMEESGAVLIKRYAFDPQKHAAYIQKILGRFENPYLKDDVERVGRQPLRKLSAGDRLIKPLLGTLEYGLPHRNLVKGIAAAMHFRSEDDPQAQELAALIADKGPQAALAQISGLDAASDVVAEAVNDYNAEK

SEQ ID NO: 10669 - protein, 1241 aa, Zea mays
MDEEDDDQRLLHSLGVQTEPKRDDEPGAAVDDPSGSSVAPEFDAQANLHQKLRSVQLEIDAVASTIKRAKNASVDGQDKKKQKQANHTSQDEPHGGALQQALATERLKSLKKAKAQIQKEILQSDPYPSGSDNRKDKMLAMLVEEEPRRKKKSLMPARGPKKTSAPRLKTMSYDDDDDFDAVLDGASAGFMETEREELIRKGLLTPFHKLKGFEKRVELPGPSHRQNDPSEQAEEAIEASRIARVAQSMQQIAQSRPTTKLLDPESLPRLDAPTAPFQRLGRPLKRPVPPSSEGRERKRQRNKTKRPLPDKKWRKANSRKESLLETDGEDVGDFATSVSEDDDQAAEGGLSPVILEGGLRIPGTIYEQLFDYQKVGVQWLWELHCQRAGGIIGDEMGLGKTVQVLSFLGSLHNSGMYKPSIVVCPVTLLQQWQREASRWYPKFKVEILHDSANGSSKKSKAYSDSDSEGSWDSDQEEVRRAKPAKKWDDLISRVVNSGSGLLLTTYEQLRILGEKLLDIEWGYAVLDEGHRIRNPNAEITLVCKQLQTVHRIIMTGAPIQNKLSELWSLFDFVFPGKLGVLPVFETEFSVPITVGGYANATPLQVSTAYRCAIVLRDLIMPYLLRRMKVDVNAQLPKKTEHVLFCSLTAGQRSTYRAFLASSEVEQIFDGNRNSLYGIDVLRKICNHPDLLEREHAAQNPDYGNPERSGKMKVVEQVLKVWKDQGHRVLLFTQTQQMLDILENFLTACDYQYRRMDGLTPAKQRMALIDEFNNTDEIFVFILTTKVGGLGTNLTGANRIIIYDPDWNPSTDMQARERAWRIGQTRDVMVYRLITRGTIEEKVYHRQIYKHFLTNKVLKNPQQRRFFKARDMKDLFTLQDDEGNGSTETSNIFGQLSKDVNVGVPNDGQQHQVHIASALSSTSEAEPSNGGNSKVDDNSDQADEESSILKSLFGAQGIHSAINHDAIMDANDDQKVRLEAEASQVAQRAAEALRQSRMLRSHDSFAVPTWTGRSGAAGAPSSVRRKFGSTVNSQLIPSSQPSETSSSRNRSLPVGALSGKALSSAELLAKIRGTREASASDALEHQLNVGSSSNLVSSPSGNGGRASNPPNRSMIVQPEVLIRQLCTFIQHNGGSATSTSITEHFKSRIQSKDMLLFKNLLKEIATLQRGAEGDLTRRNLRRCVGVVNTRIGIPTCYDLGERIADSLQATKGSAAVGRKLGTDLHLPRAFIADKRVMLAVRI

SEQ ID NO: 10670 - protein, 169 aa, Nicotiana tabacum
MASQSSKPQSIYDFTVKDAKGNDVDLSIYKGKVLIIVNVASQCGLTNSNYTDMTEIYKKYKDQGLEILAFPCNQFGGQEPGSIEEIQNMVCTRFKAEYPIFDKVDVNGDNAAPLYKFLKSSKGGFFGDSIKWNFSKFLVDKEGNVVDRYSPTTTPASMEKDIKKLLGVA

SEQ ID NO: 10671 - protein, 402 aa, Thermotoga sp. RQ2
MRLNQISKFAIVSVVVLVLALLLGGSAKTNLTVEEVNKALEPFFDSLSYILNYYYEADKLDINKLIDHAIDGLVKGTGDDFSYYQDPETYRENQIEMKGEYGGLGIEVTYDAEHGAIKVVAPMYGTPAWRAGLKAGDLIITIDGTPVSKMTYMEAVNNLRGEPGTSVTIEVLRDGEKLTFTIVREKIEIKMVLYSFIETEKGSIGYVRITRFGEKADSDMKNALDKIFEKGVKGLIIDVRDNPGGYLDVALKIVSMFVDKGVILKVRNGFGEEDVYESYGNSYPNVPIVLLVNEGSASASEILTGALKDLGIATIVGRKTFGKGSVQTGFPLSNGGVLFLTTAHYLTPSGKDIHKIGIEPDVLVEESVEEELHAETREQIEVDPEKDPFVKKGLEVLLEKIK

SEQ ID NO: 10672 - protein, 128 aa, Oryza sativa Japonica Group
MKKDSESIALKFFLRIFEIAPAAKQMFSFLRDSGDDVPLENHPKACESATQLRKTGDVKVREATLRRLGATHVKAGVADAYFEVVKTALLDTIKDAVPEMWSPEMKGAWEEAYDQLAAAIKEEMKKAA

SEQ ID NO: 10673 - protein, 314 aa, Mesorhizobium huakuii
VMFDGSSIAGWKAINESDMVLMPDPDTVHMDPFFAQSTMVILCDILDPVSGESYNRDPRGTAKKAEAYMKSEGIGDQIFVGPEAEFFVFDDVKYKADPYNTGFKLDSTELPSNDDTDYETGNLGHRPRVKGGYFPVPPIDSAQDMRSEMLTVLAEMGVRVEKHHHEVAAAQHELGIKFDTLVRNADKMLIYKYVVHQVANAYGKTATFMPKPIFGDNGSGMHVHQSIWKGGKPTFAGNEYAGLSESCLFYIGGIIKHAKAINAFTNPLTNSYKRLVPGYEAPVLLAYSARNRSASCRIPFGSSPKAKRVEVRFP

SEQ ID NO: 10674 - protein, 314 aa, Mesorhizobium loti
VMFDGSSIAGWKAINESDMVLMPDPDTVHMDPFFAQSTMVILCDILDPVSGESYNRDPRGTAKKAEAYMKAEGIGDTIYVGPEAEFFVFDDVKYKADPYNTGFRLDSTELPSNDDTDYETGNLGHRPRIKGGYFPVPPIDSAQDMRSEMLTVLAEMGVRVEKHHHEVAAAQHELGIKFDTLVRNADKMLIYKYVVHQVANAYGKTATFMPKPIFGDNGSGMHVHQSIWKGGKPTFAGNEYAGLSESCLFYIGGIIKHAKAINAFTNPLTNSYKRLVPGYEAPVLLAYSARNRSASCRIPFGSSPKAKRVEVRFP

SEQ ID NO: 10675 - protein, 450 aa, Geobacter sulfurreducens PCA
MQTRTRITLGLVVAILCLTIGVAAGWRYYNPAADQVGAEHLRLFREVVSIVRSSYVEEVSGKKLLEGAINGMLASLDPHSSYLPPEPFTEMKTEISGSFGGLGIEISMRDGKLTVVAPIEDTPAWRAGIQSGDHIWKIDDTPTRGLTITQAVKQMRGEKGTQVSLSILRNGNGKPLVFPLVRDIIKTRSLKSRTLEPGYGYVRISQFQERTGDDFAAALAKLRSDNGGSLKGLVLDLRNNPGGLLDAAVAVAGRFVGERLDNGLIVYTEGREHFAKRSYSATIGEKEPRYPLVVLINGGSASASEIVAGALQDHGRAVIMGTTSFGKGSVQTVVPLKDGAGLKLTTARYYTPKGRSIQARGIEPDIVVERAGFKELPDKGRAGFLEKDLDNHLSGAESGEGEKTPEQDVKKLPAAPATPEHEVDKDYQLLRALELLKGWDAMRKVATAKH

SEQ ID NO: 10676 - protein, 314 aa, Mesorhizobium mediterraneum
VMFDGSSIAGWKAINESDMVLMPDTETVHMDPFFAQSTMVILCDILDPISGESYNRDPRGTAKKAEAYMKAEGIGDQIFVGPEAEFFVFDDVKYKADPYNTGFKLDSTELPSNDDTDYETGNLGHRPRIKGGYFPVPPIDSAQDMRSEMLTVLAEMGVRVEKHHHEVAAAQHELGIKFDTLVRNADKMLIYKYVVHQVANAYGKTATFMPKPVFGDNGSGMHVHQSIWKGGKPTFAGNEYAGLSESCLFYIGGIIKHAKAINAFTNPLTNSYKRLVPGYEAPVLLAYSARNRSASCRIPFGSSPKAKRVEVRFP

SEQ ID NO: 10677 - protein, 112 aa, Selaginella moellendorffii
HSDDAGGHGGERDNSNVREQDRFLPIANISRIMKKALPANAKIAKDAKETVQECVSEFISFITSEASDKCQREKRKTINGDDLLWAMSTLGFEEYLEPLKIYLQKYREVTEL

SEQ ID NO: 10678 - protein, 314 aa, Mesorhizobium ciceri
  misc_feature (100)..(100): Xaa can be any naturally occurring amino acid
VMFDGSSIAGWKAITKSDMVLMPDPETVHMDPFFAQSTMVILCDILDPVSGESYNRDPRGTAKKAEAYMKAEGIGDTIFVGPEAEFFVFDDVKYKADPYXTGFKLDSTELPSNDDTDYETGNLGHRPRIKGGYFPVPPIDSAQDMRSEMLTVLAEMGVRVEKHHHEVAAAQHELGIKFDALVRNADKMLIYKYVVHQVANAYGKTATFMPKPIFGDNGSGMHVHMSIWKNGKPTFAGNEYAGLSESCLFFIGGVIKHAKAINAFTNPLTNSYKRLVPGYEAPVLLAYSARNRSASCRIPFGSSPKAKRVEVRFP

SEQ ID NO: 10679 - protein, 314 aa, Rhizobium leguminosarum bv. viciae
VMFDGSSIGGWKAINESDMVLMPDTETVHMDPFFAQSTMVIVCDILDPVSGEAYNRDPRGTAKKAEAYLKASGIGDTVFVGPEAEFFVFDDVKYKADPYNTGFKLDSTELPSNDDTDYETGNLGHRPRVKGGYFPVPPVDSAQDMRSEMLTVLSEMGVVVEKHHHEVAAAQHELGIKFDTLVRNADKMQIYKYVVHQVANAYGKTATFMPKPIFGDNGSGMHVHQSIWKGGKPTFAGDEYAGLSESCLFYIGGIIKHAKAINAFTNPSTNSYKRLVPGYEAPVLLAYSARNRSASCRIPFGSNPKAKRVEVRFP

SEQ ID NO: 10680 - protein, 1152 aa, Medicago truncatula; identical to SEQ ID NO: 7100

SEQ ID NO: 10681 - protein, 339 aa, Arabidopsis thaliana
MGEAVEVMFGNGFPEIHKATSPTQTLHSNQQDCHWYEETIDDDLKWSFALNSVLHQGTSEYQDIALLDTKRFGKVLVIDGKMQSAERDEFIYHECLIHPALLFHPNPKTVFIMGGGEGSAAREILKHTTIEKVVMCDIDQEVVDFCRRFLTVNSDAFCNKKLELVIKDAKAELEKREEKFDIIVGDLADPVEGGPCYQLYTKSFYQNILKPKLSPNGIFVTQAGPAGIFTHKEVFTSIYNTMKQVFKYVKAYTAHVPSFADTWGWVMASDHEFDVEVDEMDRRIEERVNGELMYLNAPSFVSAATLNKTISLALEKETEVYSEENARFIHGHGVAYRHI

SEQ ID NO: 10682 - protein, 164 aa, Selaginella moellendorffii
SRNSDDANCSSIREQDRFMPIANVIRIMRKVLPAHAKISDDAKETIQECVSEFISFITSEANDKCQREQRKTITAEDLLWAMSKLGFDDYADPLSLFLHKYREIEGDHRGSIRGEPSLLVSTKKPSSSSSSPAPSDHLYAPGLGYYKDSSAAPLSFVPDPYGYK

SEQ ID NO: 10683 - protein, 938 aa, Elaeis guineensis
MMSLLLRIFYFVIFLPFLAESRNPALNDDVLGLIVFKADLREPDSKLVSWNEDDDEPCCWTGIKCEPKTNRVTELSLNGFSLSGKIGRGLLQLQSLRTLSLSKNNFSGTLSSDLLRLESLRNLDLSENKLSGPIPDDFFGQCRSIRAISLAKNAFFGAIPSNVGFCSTLAALNLSSNRLSGSLPWRLWSLNALRSLDLSDNTLVGEIPVGISKMYNLRSISLHGNRLSGHLPDDIGDCLLLKSLDLAGNSLSGSLPESMRKLSTCSYLSLSSNFFSGEVPTWIGEMKSLETLDLSRNGFFGQLPGSLGDLQLLKALKLSRNGFTGSFPESLCSCKSLVDVDLSQNSLTGKLPLWVFESGLQQVLVSENKLNGSIVIPSSSASNLQVLVLSSNAFSGSIPEGLGKLKSLEVLDLSGNRLNGSIPLEIGGAVSLKELRLEKNSLKGAIPTQIGNCASLTSLDLSQNNLTGPIPPTLANLTNLQIINFSRNRLTGTIPKQLSNLPHLLSFNIAHNVLSGDIPSGSFFNTIPPSFLSDNPGLCGSIVNRSCPGVLPKPIVLNPENSSPNSSSGSTFSPSGLHHKKIILSVSTLIAIGAAAIIALGVITITVLNFRARASASQSAAALALSDDFLSQSPTTDANSGKLIMFAGGDPEFSAGAHALLNKDCELGRGGFGAVYKTMLQNGRPVAIKKLTVSSLVKSQEDFEREVKKLGKVQHPNLVALEGYYWTPSLQLLIYEFVSGGSLYKHLHESSASNALSWQERFDIILGTAKSLAHLHRLDIIHYNLKSAYILLDGSGEPKTGDYGLAKLLPMLDHYVLSSKIQSALGYMAPEFACRTVKITEKCDVYAFGVLVLEIQARKRLLEYMEDDVVVLCDMVRGALEEGKVAECVDGRLMWEVPHRGGHCSDEAGFDLHVAGSIESARHGGGGEHPGTYQMPSG

SEQ ID NO: 10684 - protein, 122 aa, Pectobacterium carotovorum subsp. carotovorum
LLDALNSRTSYTVRIVGDNAQVDTVSNVSAVHSGSQDAVSQIAVADLVTTAVGPQILEKIAGTIAQGLVKRHNDGNTRPLNIIACENMVRGTSQLKQHVLKLLPEGHQEWVVEHVGFVDSAV

SEQ ID NO: 10685 - protein, 446 aa, Staphylococcus aureus subsp. aureus MRSA252
MPKRTFTKDDIRKFAEEENVRYLRLQFTDILGTIKNVEVPVSQLEKVLDNEMMFDGSSIEGFVRIEESDMYLHPDLDTWVIFPWTAGQGKVARLICDVYKTDGTPFEGDPRANLKRVLKEMEDLGFTDFNLGPEPEFFLFKLDEKGEPTLELNDDGGYFDLAPTDLGENCRRDIVLELEDMGFDIEASHHEVAPGQHEIDFKYADAVTACDNIQTFKLVVKTIARKHNLHATFMPKPLFGVNGSGMHFNVSLFKGKENAFFDPNTEMGLTETAYQFTAGVLKNARGFTAVCNPLVNSYKRLVPGYEAPCYIAWSGKNRSPLIRVPSSRGLSTRIEVRSVDPAANPYMALAAILESGLDGIKNKLKVPEPVNQNIYEMNREEREAVGIQDLPSTLYTALKAMRENEVIKKALGNHIYNQFINSKSIEWDYYRTQVSEWERDQYMKQY

SEQ ID NO: 10686 - protein, 377 aa, Portulaca oleracea; identical to SEQ ID NO: 7101

SEQ ID NO: 10687 - protein, 844 aa, Candida glabrata CBS 138
MNTRKRFLRSARKAAAVTVNYAEPDDNDLSANTFASDDENADVSVDAEDTPPVWLRDDVRPNEDVQLDSDDENGGDKDDDRDLDDLLLKEKEKHRLEAQTKEEDSDDEVNELDKASVTSKLKKLDEFVKQSQVYSSIIADTLLKRTLERTEESDASNNDPVKEPPAKKAKKSKSILDFFTRRQNTDDNRVEEMAVDVKKETEEERIAKEQPSYLKNCVLKPYQMEGLNWLITLYENGLNGILADEMGLGKTIQSIALLSFIYEMDTKGPFLIAAPLSTVDNWMNEFAKFAPEIPILKYYSQNGQDARQKLLKKFFKNNNREGVIVTSYEMIIRDANIIMGEQWKFLIVDEGHRLKNINCRLIQELKRINTSNRLLLTGTPLQNNLSELWSLLNFILPDIFADFEIFNKWFDFKDLDLQSNSAKLNKLINDELEKNLISNLHTILKPFLLRRLKSVVLKDVLPPKREYIVNCPLSPIQTKFYRMALSGKLKVTVFKELVKAFFTLNQEYIGTVSNKSIRDFIDYKLSEEPDEDKVTAVIKQMDDIYMEHLNTFTKNQRLQNMMMQLRQVVDSTLLFFFPYMEPEDITLDYLLASSGKLQMLQKLAIPLIKKGHKILIFSQFVGMLDLLEDWSELNSFNSLRIDGGVDNESRKEYIDEFNKKGDDHQIFLLSTRAAGLGINLVAADTVIIFDSDWNPQVDLQAMDRCHRIGQTKPVIVYRFCCDNTIEHVILTRAVNKRKLERMVIQMGKFSNLKKLALNERSFLQQSTGMNPNKTSNKELVQELSQLLMSKESSIGFETSKKPKQDDILTEAELKELSDRSLKFYSPDREVEFPHVRLFETTSGF

SEQ ID NO: 10688 - protein, 444 aa, Vibrio parahaemolyticus RIMD 2210633
MSVYHTLCFLSAAAMLIAFVNSKIGKMQTTIAITAGSMVLSLLILIAGQNNWFHLTEIATETVTRINFEDFLLKGILGFLLFAGGLGIKLPNLKDQKWEITVLALGATLFSTFFIGFVLYGLCMLIGIQFDLVYCLLFGALISPTDPIAVLAIVKKLDAPKRISTQIEGESLFNDGFGLVIFVTLFTIAFGSEAPTVGSVTLLFIQEAIGGIVYGFLLGLVFHYLISATDDHSMELLLTIGVPTAGYAFAEYIHVSGPLAMVVSGIMIGNWTRFIGFSKESEDHLDHFWELVDEFLNGVLFLLIGMSMLLFKFHEEDWIMMAIAVPLVLASRYLSVFISYIGFKRYRKYNPWSVKILTWGGLRGGLALAMALSIPSGIWVVQDKLIDVKEIILVMTYSVVVFSILIQGSTITPMIEKAKAEEKKMEDEKLAQSSLAEQREQTEA

SEQ ID NO: 10689 - protein, 644 aa, Chlorella pyrenoidosa
MSSPAIGIDLGTTYSCVGLWQHDRVEIIANEQGNRTTPSYVAFTDTERLIGDAAKNQVAMNPINTVFDAKRLIGRKFSDPTIQHDISHWPFKVVAGPGDKPMIQVSYKGEDKTFAPEEISSMVLVKMKEIAQAYVGADKEVKKAVVTVPAYFNDSQRQATKDAGVIAGLEVMRIINEPTAAAIAYGLDKKGTTSGEQNVLIFDLGGGTFDVSLLTIEEGIFEVKATAGDTHLGGEDFDNRLVNFFVQEFKRKYKKDISSNPRALRRLRTSCERAKRTLSSSTQASIEIDSLYEGIDFYSSITRARFEELNMDLFRKCMEPVEKVLRDAKMDKGQVNEVVLVGGSTRIPKVQQLLQDFFNGKELCKSINPDEAVAYGAAVQAAILNGETHEKVQDLLLLDVIPLSLGLETAGGVMTVLISRNTTIPTKKEQVFSTYSDNQPGVLIQVYEGERSRTKDNNLLGKFELTGIPPAPRGVPQINVTFDVDANGILNVSAEDKTTGNKNKITITNDKGRLSKEEIERMVQEAEKYKAEDETHRARVEARNGLENYAYSMRNTIKDANLADKLSAEEKEKIEKAVDKVVEWLDHNQLAEEEEITHQRTELEGVCNPIITKLYQGGAVPPDAAGAAPASAAGGQGPTIEEVD

SEQ ID NO: 10690 - protein, 676 aa, Ostreococcus tauri
MSASSSAKTRDEDDRVGAEDVDDEEGGGNVGDAGGDDDGGDDDNYEDKEEEEGDDDDDDDDDDGTRASNTAHVGAANCEGDDCSDSLNEQVYAVMEDVATKTALDTQTSVDDILALATGTSDQSPRTMQEEAMDERVAAFSMTVMICILLLTIVLGVVLKHYKSKWLHSSGAALLLGIAVGCFVFLTLEASYDTMPANMRYGIKAFASSMRFDTKFFFLVLLPPLVFEAGYTLHPTTFFNNADAVSMFAFVGSLSSAITTGVMMYVAGLTGLSYKFSLKSAMLFGALISSTDPVTTLSIFSSTPVSQDLHAIIMGESIMNDAITIVLFESLLLGASATDTMTVVDMLQQDASFLPLILEAIGTFMLAFSQATLVGVGIGCFSALLHKYVRTTNDFEEGWVVDSALVLLLPYLSYSLAESFELSGIVAVLFTGIVMGRYTRPNLARAPRMVTMCVFKIFSFLSETFVFVYMGSAMYSFRSAHIVTAIVGLLVTYISRAANIFPGSFLLNVTSARKNPAHSITPRMQIILWFSGLRGAVAFALAEKARRDLGEQGHVMFDVTLFIVAFTIVIQGGMTTWLLNKLSEPATTTSDPSNPEKRVLSNISRLISSVETNIIEPILSRTPAVNSSERTSLLHGDYAGGREEAAEPPLSGHSVGLASESVEAAVDGTFTQRGDL

SEQ ID NO: 10691 - protein, 122 aa, Pectobacterium carotovorum subsp. carotovorum
LLDALNSRKSYTVRIVGDNTRLDTVSNVSAVHSGSQDAVALIAVADLVTTAVGPQILEKIAGTIAQGLVKRHNDGTTRPLNIIACENMVRGTSQLKQHVLKLLPEGHQEWVVEHVGFVDSAV

SEQ ID NO: 10692 - protein, 377 aa, Quiabentia verticillata; identical to SEQ ID NO: 7106

SEQ ID NO: 10693 - protein, 461 aa, Synechococcus sp. WH 5701
MSSLPSPASADPLTEPQLSWQQRKLDLLSQGVSYALASFVDLHGTSKAKAVPLDHFEAMLAGSELFTGAALDGVPQDVSDDEVAAIPDLATATVLPWRRDVVWLASSLHLHGQPFEACSRNILIRALDEAQRMGFRFNLGIETEFFVLRRGADGALRPASSRDTLEKPCYDLTGLLDNLPWLDELVQAMNDLGWGVYSFDHEDGNGQFETDFAYAEALTMADRLTFFRLMLKEITHRHGLIASFMPKPFSDRTGSGAHFNMSLADPATGRNLFAGDTPGAITPLAEQFIAGILRHAPAICAVIAPTVNSYKRLVAQGSMSGFTWAPVFICYGNNNRTNMLRIPSAGGRVECRAADSACNPYLGAAMILAAGLEGIREELDPGDPNLVNAYRLSAEQRAERGLRVLPRTLGDAIEAFAADPLSRSVFGDAMADAFIDYKRAEWAEYHGCVSDWELTRYLEFL

SEQ ID NO: 10694 - protein, 627 aa, Ipomoea batatas
MEREWFLPFKVLGLGIWMLIATSCSATLSPSGVNYEVVALIAIKTGLHDPYNVLENWDVNSVDPCSWRMVTCSPDGYVSALGLPSQSLSGTLSPGIGNLTNLQSVLLQNNAISGHIPAEIGKLERLQTLDLSNNKFNGDIPSTLGDLRNLNYLRLNNNSLSGQIPESLSKVDGLTLVDVSFNNLSGRPPKLPARTFKVIGNPLICGQSSENNCSVIYPEPLSFPPDAGKGQSDAGAKKHHVAIAFGASFGALFLIIVLVSLIWWRYRRNQQIFFDLNDNYDPEVCLGHLRRYTYKELRTATDHFNSKNILGRGGFGIVYKGSLNDGTIVAVKRLKDYNAAGGEIQFQTEVEMISLAVHRNLLRLWGFCSTENERLLVYPYMPNGSVASRLKDHVHGRPVLDWSRRKRIALGTARGLVYLHEQCDPKIIHRDVKAANILLDEDFEAVVGDFGLAKLLDHRESHVSTAVRGTVGHIAPEYLSTGQSSEKTDVFGFGILLLELITGQKAVDFGRGANQKGVILDWVKTLHQEGKLNLMVDKDLKNNFDRVELEEMVQVALLCTQFNPSHRPKMSEVLRMLEGDGLAEKWEASQRNDTPRYRTHENTPQRYSDFIEESSLIVEAMELSGPR

SEQ ID NO: 10695 - protein, 122 aa, Pectobacterium carotovorum subsp. carotovorum
LLDALNRRTSYTVRIVGDNTQVDTVSNVSAVHSGSQDAVALIAVADLVTTAVGPQILEKIAGTIAQGLVKRHNDGNTRPLNIIACENMVRGTSQLKQHVLKLLPEGHQEWVVEHVGFVDSAV

SEQ ID NO: 10696 - protein, 280 aa, Desulfitobacterium hafniense Y51
MIKGRNDMNHYVEGKLLIIGGAEDKKGECKILKRFIQEAGGRESRVVVLTAATEMPEQVGSEYKELFENLGAAEVQVLDIAERVSANRESISQELQKATGIFFTGGDQLRITGILGGTRLGRTLHNLYQRGVIIAGTSAGASVMSDTMIVGGEAGTPKKDTLTMAPGLGLLHSVVVDQHFAQRGRIGRLLTAIAQNPYVLGVGIDEDTSILVYSDGHFTVVGSQTVTVVDASPTMASNVSEISPGQALVLTPVLMHILSDGYRFDLKRRAASLNETPSGG

SEQ ID NO: 10697 - protein, 901 aa, Nostoc sp. PCC 7120
MRILKIQTLRGPNYWSIRRHKLIVMRLDLETLAETPSNEIPGFYEGLVEALPSLEGHYCSPGCHGGFLMRVREGTMMGHIVEHVALELQELAGMHVGFGRTRETATPGIYQVVIEYLNEEAGRYAGRAAVRLCQSIVDRGRYPKAELEQDIQDLKDLWRDASLGPSTEAIVKEAEKRGIPWMQLSARFLIQLGYGVNHKRMQATMTDKTGILGVELACDKEATKRILAASGVPVPRGTVINFLDDLEEAIEYVGGYPIVIKPLDGNHGRGITIDIRSWEEAEAAYEAARQVSRSIIVERYYVGRDHRVLVVDGKVVAVAERVPAHVIGNGRSTVAELIEEINQDPNRGDGHDKVLTKIELDRTSYQLLERAGYTLNSVPPKGTICYLRATANLSTGGTAVDRTDEIHPENVWLAQRVVKIIGLDIAGLDIVTTDISRPLRELDGVIVEVNAAPGFRMHVAPSQGIPRNVAGAVMDMLFPNEQSGRIPILSVTGTNGKTTTTRLLAHIYKQTGKVVGYTTTDGTYIGDYLVESGDNTGPQSAHVILQDPTVEVAVLETARGGILRSGLGFESANVGVVLNVAADHLGIGDIDTIDQLANLKSVVAESVYPDGYAVLNADDRRVAAMAEKTKANIAYFTMNSESELVRKHIQKGGVAAVYENGYLSIVKGDWTHRIERAEQIPLTMGGRAPFMIANALAASLAAFVQNVSIEQIRAGLRTFRASVSQTPGRMNLFNLGNYHALVDYAHNPASYEAVGAFVRNWTSGQRIGVVGGPGDRRDEDFVTLGKLAAEIFDYIIVKEDDDTRGRPRGSASELITKGITQVKPDARYESILDETQAINKGLDMAPANGLVVILPESVSRAIKLIKLRGLVKEEIQQQNSSTTVIDNQNGVASSSVINTLL

SEQ ID NO: 10698 - protein, 293 aa, Methanocaldococcus jannaschii DSM 2661
MNQNNDFKCHIWFTEYHNNNVALSVRVKDILYREKSGFQEIEIIDTYDFGKALILDNTFQTTERDEFIYHELISHIPLFTHPNPRNVLVIGGGDGGTVREVVKHKSVETVDFVELDEKVIEACKKYMPKLSCEIDNEKVNLIITDGIKYVAETEKKYDVIIVDCPDPVGPAKGLFEKEFYKNVFKCLNDDGIMVQQSESPLYNLDLIQNICRYLKDAGFKIIMPYTYPMPTYPSGFWSFTLASKKYNPLEVDEARIKEALKDMETKYYDEEVHKGIFLAAPKFLKDAVKKALE

SEQ ID NO: 10699 - protein, 298 aa, Nostoc sp. PCC 7120
MAPKVVDRRNTMPQLQAKSLEMRTPQATKTAVLVIGGAEDKVHGREILRTFFGRAGASKAYITIIPSASREPAIIGGRYIRIFEEMGAEKVEILDIREREQCESSQVKASLEACSGVFLTGGDQLRLCGVLSDTPVMEIIRQRVRGGQLTLAGTSAGAAVMGHHMIAGGGSGETPNRSLVDMATGLGLIPEVIVDQHFHNRNRMGRLISAVAAHPDRLGIGIDEDTCAVFERDGWLQVLGKGSVTIVDPTELTHTNEPHVGANEPLTVHNLRLHILSYGDRFHLYQRTVLPAVHRISS

SEQ ID NO: 10700 - protein, 885 aa, Desulfitobacterium hafniense Y51
MEILKIQAIPGANVYSYRPVIRAVVDLQEWTERTSDTFGDFNTRLVQCLPSLYEHFCSRGKPGGFVERLKEGTLVGHIIEHVTIELLTRAGQNIPYGKTLCLPEHPGHYEIIFNYDSLEGGLEGFKQGYALVQELLAGQKPNVTNRIERIREVIQRFELGASTRAIIEAAEGRGIPVIRLNDSSLLQLGYGRNQKRVQAAMSDQTSCIGVDIACDKGLTKKLLYEGGIPVPDGVVTRNEDEAVEVFRQLDRLVVVKPYNGNQGKGVTLKLGTEAEVRAAFRVAQTYEEQVVVEEYIEGKNYRLLVVDGKMAAAAERIPAHVIGDGVSTVGELVQLANSDPQRGEDHEKALTKIKIDPVVLMTLTQKKIALETVPADGEVVYLRDSANLSTGGISVDVTERVHPDNAALAEYAARIVGLDIAGVDMVLEDIERPHQEQRGAIIEVNAAPGLRMHQYPTVGRPLDVGKIIVDHVMPKGNGRIPVISVTGTNGKTTTTRMIGKMLMDRELAVGMTTTDGIYVGGKLLLKGDTTGPESAQIVLRHPDVQVAVLETARGGILRAGLAYDYADVAVVTNVANDHLGQYGMESLEDIAHVKSLIAEVVRPHSYVVLNADDPLVASFARKTKGKVIFFSTEKDNLTIRKHLAVGGIAVFVRRGNILLCQGDQSHKICGVKDLPVTWNGKALHNLQNALAAIAVGWSLGLKAEGIRISLSEFTSDPECNRGRLNPYTIGGVQVFIDYGHNAAGIKAIAQTLRKFKAPAVVGCVTVPGDRPDETIREVARVAARGFHRLIIREDGDLRGRRPGEIAGMIMEEAIASGMDPRRISVVLPEREAFCHGLDTCKPGEIFVMFYEHLEPIEEEIALRLESGPLAKEEEGFLEVANLGAI

SEQ ID NO: 10701 - protein, 486 aa, Mycobacterium tuberculosis
MAHHHHHHGTEKTPDDVFKLAKDEKVEYVDVRFCDLPGIMQHFTIPASAFDKSVFDDGLAFDGSSIRGFQSIHESDMLLLPDPETARIDPFRAAKTLNINFFVHDPFTLEPYSRDPRNIARKAENYLISTGIADTAYFGAEAEFYIFDSVSFDSRANGSFYEVDAISGWWNTGAATEADGSPNRGYKVRHKGGYFPVAPNDQYVDLRDKMLTNLINSGFILEKGHHEVGSGGQAEINYQFNSLLHAADDMQLYKYIIKNTAWQNGKTVTFMPKPLFGDNGSGMHCHQSLWKDGAPLMYDETGYAGLSDTARHYIGGLLHHAPSLLAFTNPTVNSYKRLVPGYEAPINLVYSQRNRSACVRIPITGSNPKAKRLEFRSPDSSGNPYLAFSAMLMAGLDGIKNKIEPQAPVDKDLYELPPEEAASIPQTPTQLSDVIDRLEADHEYLTEGGVFTNDLIETWISFKRENEIEPVNIRPHPYEFALYYDV

SEQ ID NO: 10702 - protein, 260 aa, Magnaporthe grisea 70-15
MPSRGEPAALVSHIPRADGSAIYSHAGYTVTASANGPIEAQRRDEDPYEALVDVIVRPAAGVGGTRERHLESLLQATLRQIILVKNFPRGLIQVVLQVKSSPENDYASTKLVQANLNLPIIPALLQAAVLALLSAAIPLRATATCTVIAVVAGSDGEAESNLILDPSPREAEGARSVHALAFTSGDRLILAESEGHFTMQEWADVHAKALKICCEPVRDPGNNDMDMGDDNSTDVEGPNMRHFIRETMAAKVSADLHWKG

SEQ ID NO: 10703 - protein, 554 aa, Physcomitrella patens subsp. patens
MAKSNRVCELCDGVADLYCAADEAHICWTCDAKVHSANFLVARHTRLVLCEICGIQTPWKASGGNPTPLTGLCAECSQGESQDECTTHSHGGVIDTSRVTVRAHPIAGCADSGYESGCSSSKPESCESAVIVEMDLVQTSPCESSISQLSSEDMEGITVDSRGAQGSVSLGIPKSLKRKRSLDCFLPVSVPLSKQIVVSTLEDDMRSVAHGQCECDSTASFSSSTRRVSHANQDPSFEARDWNRPQSQEVESSNRDLTNLLLSSAKRQRVDRTQIRASFTRTQQSAVFSTSRVMRMLAKWHWDLHLSSPGTVPLALRMFRKISRAMAPTVLSNSGMRITLAACLHLASSLDEAQITVPRTSEVAGCAGVSTRKLATAEIHLLALLGWRSFPVRAGSRGFNIEIGCQVTVLVIQGGLPSKALLYPRDSRFVDMRIGSGFKLGALPDRQGRYASHLENSRESLDPSAVIINLGELSKLEVRNWSVKLMQCHTLCMCTNGGGHLPFPCQNPPSNCSRTGQLCSVGKEVFTAGISDNIIVEQKIFCTKLKYLPAMQDF

SEQ ID NO: 10704 - protein, 259 aa, Oryza glumipatula
LSYFLLISILGSVLLMFLKPSNPEFRPGYIDMLFLSTSALTLSSLITIEMEVLSSSQIVVITLLMLLGGEVFVSFLGLMLRLNHKHNPEFSGDKVSSVPIELDTINSASTVISCEELQLEAAIPEVPSSTIKDLKRSKRLRWFLGSVVFSYFVVIHVAGFLLVLWYISRVSSAKAPLKKKGINIALFSFSVTVSSFANVGLVPTNENMAIFSKNPGLLLLFIGQILAGNTLYPLFLRLLIWFLGKVTKLRELKLMIKNP

SEQ ID NO: 10705 - protein, 250 aa, Chlamydomonas reinhardtii
MSRRRDGEGDQALPLIEKPAPKKSTLLTVCPFILGNEFCERLAYYGLATNLVMYICNVMGGDPADAAIQVSVFEGTCYLTPLIGAYLADSRWGRYHTILVFSSIYLVGMVALALTSWLPGLTPAEGEQANGWQLAALIGSLSVIALGTGGIKPNVSAFGADQFNEADPQDRREKESFFNWFYLAINVGSLIACTVIVYIQDQISWTLGFAIPAVVMCMAVLLFVAGRKVYRHVAPTESPMERVVRVVAAA

SEQ ID NO: 10706 - protein, 479 aa, Helicobacter hepaticus ATCC 51449
MSRVSIDKQAVAEFFRFCDENEVEFIDFRFSDIKGVWHHLSFSRNAINEESFEGIPFDGSSIPAWQPVDKSDMMLIPEPVRYFIDPFTADTTAVVFCDIWDIYNNKPYEKCPRSIVKRAMKYLKESGIGDIAYYGPENEFFVFDSIKIKDSVNCQYYEIDSEEGEWNRAREFEGGVNMGHRPGTKGGYFPVPPVDSMVDLRAEIVKVLNQVGLETFVLHHEVAQGQNEIGVKFGDMLEAADNVQKLKYVVKMVAHLNGKTATFMPKPLYGDNGSGMHVHISIWKDGHNLFAGEAYQGLSEMALHFLGGVLKHARALAAFTNPSTNSYKRLIPGFEAPSILTYSAQNRSASIRIPYNSGEKAKRMEFRFPDSSANPYLAFASLLLAGIDGIKNKIDPGAPMEINLFELTLDEIREKGIKQLPHTLRHAIEEMLVDKAYLKEGGVFSEEFIQTYKAYKFETEIWPWEARPHPFEFLTTYSC

SEQ ID NO: 10707 - protein, 226 aa, Abies beshanzuensis
QAKAAGARIIVTQAAYVEKLADLQSDDVIVITIDGVPKDGCKHISVLTEADETQCPSVEIQPDDVVALPYSSGTTGLPKGVMLTHKGLVSSVAQQVDGENPNLYFHSEDVIVCVLPLFHIYSLNSVLLCALRAGAATLIMQKFNLTSFLELIQRYKVTIAPIVPPIVLDITKSPIISQYDVSSVRTIMSGAAPLGKELEDALRDLFPQAIFGQGYGMTEAGPVLAM

SEQ ID NO: 10708 - protein, 259 aa, Oryza nivara
LSYFLLISILGSVLLMFLKPSNPEFRPGYIDMLFLSTSALTLSSLITIEMEVLSSSQIVVITLLMLLGGEVFVSFLGLMLRLNHKHNPEFSGDKVSSVPIELDTINLASTVISCEELQLEAAIPEVPSSTIKDLKRSKRLRWFLGFVVFSYFVVIHVAGFLLVLWYISRVSSAKAPLKKKGINIALFSFSVTVSSFANVGLVPTNENMAIFSKNPGLLLLFIGQILAGNTLYPLFLRLLIWFLGKVTKLRELKLMIKNP

SEQ ID NO: 10709 - protein, 470 aa, Escherichia coli
MSAEHVLTMLNEHEVKFVDLRFTDTKGKEQHVTIPAHQVNAEFFEEGKMFDGSSIGGWKGINESDMVLMPDASTAVIDPFFADSTLIIRCDILEPGTLQGYDRDPRSIAKRAEDYLRSTGIADTVLFGPEPEFFLFDDIRFGSSISGSHVAIDDIEGAWNSSTQYEGGNKGHRPAVKGGYFPVPPVDSAQDIRSEMCLVMEQMGLVVEAHHHEVATAGQNEVATRFNIMTKKADEIQIYKYVVHNVVRNRFGKTATFMPKPMFGDNGSGMHCHMSLSKNGVNLFAGDKYAGLSEQALYYIGGVIKQPKAINALANPTTNSYKRLVPGYEAPVMLAYSARNRSASIRIPVVSSPKARRIEVRFPDPAANPYLCFAALLMAGLDGIKNKIHPGEAMDKNLYDLPPEEAKEIPQVAGSLEEALNELDLDREFLKAGGVFTDEAIDAYIALRREEDDRVRMTPHPVEFELYYSV

SEQ ID NO: 10710 - protein, 314 aa, Rhizobium etli
VMFDGSSIGGWKAINESDMVLMPDTETVHMDPFFAQSTMVILCDILDPVSGEAYNRDPRGTAKKAEAYLKASGIGDTIFVGPEAEFFVFDDVKYKADPYNTGFKLDSTELPSNDDTDYETGNLGHRPRVKGGYFPVPPVDSAQDMRSEMLTVLSEMGVVVEKHHHEVAAAQHELGIKFDTLVRNADKMQIYKYVVHQVANAYGKTATFMPKPIFGDNGSGMHVHQSIWKGGKPTFAGDEYAGLSETCLYYIGGIIKHAKAINAFTNPSTNSYKRLVPGYEAPVLLAYSARNRSASCRIPFGSNPKAKRVEVRFP

SEQ ID NO: 10711 - protein, 139 aa, Ashbya gossypii ATCC 10895
MAFPNASKKNRPTLKVGDLCYARVSSAEKDLEAVLECMDSSTGRDAGFGQLDGGMVAEVSLGFARELLLNEAFPLLPEMARHAQFEVAIGVNGKIWVKAETVRTTLCCIRAIEACQERPQAEFKTTVKRVFKELREGTE

SEQ ID NO: 10712 - protein, 314 aa, Rhizobium tropici
VMFDGSSIAGWKAINESDMVLMPDPDTVHMDPFFAQSTMVILCDILDPISGESYNRDPRGTAKKAEAYLKASGIGDTAFFGPEAEFFVFDDVKYKADPYNTGFKLDSSELPSNDDTDYETGNLGHRPRVKGGYFPVPPIDSCQDMRSEMLTVLTEMGVTVEKHHHEVAAAQHELGIKFDTLVRSADGMQIYKYVVHQVANAYGKTATFMPKPIFGDNGSGMHVHQSVWKGGKPTFAGDEYAGLSETCLYYIGGIIKHAKAINAFTNPSTNSYKRLVPGYEAPVLLAYSARNRSASCRIPFGSNPKAKRVEVRFP

SEQ ID NO: 10713 - protein, 554 aa, Oryza sativa Indica Group
MSSLDATTPRYDEFKRIYHLFLFHAHPFWLQLLYFLFISLLGFLMLKALPMKTSMVPRPMDLDLIFTSVSATTVSSMVAVEMESFSNSQLLLITLLMLLGGEVFTSILGLYFTNAKYSSKMIATLPDDDDHGGSGKPPPATTSPSSTLVELELAPPMDVVVVNPTTTATTHDEVELGLGRRNKRGCTCTTTHTSSSSSASKTTTTRLLMFVVMGYHAVVHVAGYTAIVVYLSAVGGAGAVVAGKGISAHTFAIFTVVSTFANCGFVPTNEGMVSFRSFPGLLLLVMPHVLLGNTLFPVFLRLAIAALERVTGWPELGELLIRRRRGGGEGYHHLLPSSRTRFLALTVAVLVVAQLALFCAMEWGSDGLRGLTAGQKLVGALFMAVNSRHSGEMVLDLSTVSSAVVVLYVVMMYLPPYTTFVPVQDKHQQTGAQSGQEGSSSSSIWQKLLMSPLSCLAIFIVVICITERRQIADDPINYSVLNIVVEVISAYGNVGFSTGYSCARQVRPDGSCRDLWVGFSGKWSKQGKLTLMAVMFYGRLKKFSLHGGQAWKIE

SEQ ID NO: 10714 - protein, 588 aa, Magnaporthe grisea 70-15
MATFSSSSDGAAAGRHGRVGYVDSLFLVVSAMTETGLNTVNLSELNTWQQTILFLLIVCGGSVWVSIWTVLARKWAFERRFDELVAAECAAAGVSPSPPGLLRRIASRLHTVSSGVEPGSLGRLDDAEGFGGVVLAGPSYSITRDTALSKSTSLTRRRRAGQGEAIAQMRADILRGVVDRQMRGGGGNRHVAKLTSEERCRLGGVEYRAIRLLAVVVPLYSALWQVLGCLALAAWIQVNLPHPPVSNGLSPIWLGIFNGASAFNNSGMSLLDANMVPFNQAYFVLATMGAMILAGNTAYPVFLRLVLWAALGLLRLASSDAVLPDLKTALAYALKHPRRVHPHLYPPRQTWWLAGSVVVLNAVMWVAFELLNLGNPIVESLPGAARVVDGLFQAIATRSGGFMVVPMAQVYIGMQVLYAIMMYIPVHPVSIKKSIVYRARRDVVLGIHSESEKTPPPTLGLEQEDAHGESTRAFLSRQLKASRVGRHDAWVLVAAVLVITTIETGHFLGDPVTWSVWNVLFEVVSAYGCVGVSTGVPFDSFSFSGGWNAPSKLVLCLVMLKGRHRGLPESVYPAVVLPGEEEDVEGVE

SEQ ID NO: 10715 - protein, 314 aa, Rhizobium tropici
VMFDGSSIAGWKAINESDMVLMPDTETVHMDPFFAQSTMVILCDILDPVSGEAYNRDPRGTAKKAEAYLKASGIGDTAFFGPEAEFFVFDDVKYKADPYNTGFKLDSSELPSNDDTDYETGNLGHRPRVKGGYFPVPPVDSAQDMRSEMLTVLAEMGVVVEKHHHEVAAAQHELGIKFDTLVRNADKMQIYKYVVHQVANAYGKTATFMPKPIFGDNGSGMHVHQSIWKSGKPTFAGDEYAGLSESCLFYIGGIIKHAKAINAFTNPSTNSYKRLVPGYEAPVLLAYSARNRSASCRIPFGSNPKAKRVEVRFP

SEQ ID NO: 10716 - protein, 1163 aa, Magnaporthe grisea 70-15
MASGEENDQDLSQESVSAEAELAGSTATSSVPPQADDEASALAGLTANVRDQDELERDITKQANEALIDVEDQKDQKRIIKAKAEQTKLTDKLNTLIQKKDSGNLRHAALQRVEVDIEKARSDIDQINRDILDLSERIARRHAVDGESTTADGNGSLSKRLPNETQREYLIRTGKITPFARIGRDRPAGVEGDLADAIIEAEDEAAAEKLESLDAQAPRSHQNLRAPGFANDAKELPESAVESEFSLRPRKKRKIQQASSSPRAGSDDDFRPSSGRASSEEAEEASEDGFDLVGVLFTDRKRKNGVKSRLTKDGAVDLSGIDDGSPAVYKRRLDIWVKRRREARMRYQLANGATAEDDKGKTGVRWLAELYEQNVGGIVGDEMGLGKTVQLISFVAALHYSKKLKKPVIVVAPATLLQQWVNEFHRWWPPLRVSILHSSGSGMYDIRNEGRIEDDDDGYSSDESTQKSKKSKGAAAAKRIVDRVVESGHVLVTTYAGLQTYGDILIPVEWDYAVLDEGHKIRNPNTSLTVYCKELRTPNRVILSGTPIQNNLVELWSLFDFIYPMRLGTLHEFRNNIEIPIKMGGYANATNLQIMAAQKCAETLKDAISPYLLQRVKADVATDLPKKSEQVLFCRLTESQRQAYEQFLASQAMDQILSGTRKSLFGIDYLRKVCNHPDLVEPSLRNDHHYNWGSANKSGKMQVVKALLQMWKKFGHKTLLFSQGTQMLDILEDFVRKQDDITYLRMDGKTAIKDRQAMVDQFNNSPGIDLFLLTTKVGGLGTNLTGADRVIIYDPDWNPSTDVQARERAWRLGQKKEVTIYRLMTAGTIEEKIYQRQIFKQFLTNKVLKDPSQRTAFATMNDLHDLFTLSSHENGKTETGKMFQDSEVKTKGGGVNVTQGASKVIIPGSDSYHVPSHPAMNSEGKSEHPKDDEKELRNIAGVAGLEDFKDENEEKPKNEEDRIMQGIFSRSVHSTLEHDVIMNESGGSKKPQASREMLKKEAERIAADAAASLRRAAERARHVEPGRVTWTGEVGDVGRPTAPNMRRGRGGGPSSGSIVPGLADRHGISAGGRGSGSSSRSGTPGIYATNDFMRMIPPFIRRHGGQAPSKTLVDHFNQYCTGPKQSADFKEALHKVAVLDKSGSTMRGIWKLKPEYKTTNPRV

SEQ ID NO: 10717 - protein, 287 aa, Synechococcus sp. RS9916
MSSAAQPNGGWIDEHHNGVRYGLEGRVLVEETSSFQRITVIESERYGNGLLLDGCWMTAERQERHYHESLVHPALCSAASIERVLVIGGGDGGTARECLRHAGVQHLDMVEIDGRVVELSQQHLPSIGGGCWSDPRFHLHVGDGIAWAAEAADGSYDVVLVDGSDPAGPAEGLFNRAFFNHCKRILKPGGVFATQSESPEAFRQVHLDTVKLIRELFGHADPLYGWVPMYPSGWWSWTFAASDGPRYRQPLPERAAAIASGCEIWSPRWQRGAFDAVPAFMDRELNG

SEQ ID NO: 10718 - protein, 193 aa, Oryza sativa Japonica Group
MIILIVPLHLFWMSGGRNMDQVKKAAVRSDGVGGSATNAELPMANLVRLIKKVLPGKAKIGGAAKGLTHDCAVEFVGFVGDEASEKAKAEHRRTVAPEDYLGSFGDLGFDRYVDPMDAYIHGYREFERAGGNRRVAPPPPAAATPLTPGGPTFTDAELQFLRSVIPSRSDDEYSGSSPAIGGYGYGYGYGKNM

SEQ ID NO: 10719 - protein, 314 aa, Sinorhizobium terangae
VMFDGSSISGWKAINESDMVLMPDPETAHMDPFFAQSTMVILCDILDPVSGEAYNRDPRGTAKKAEAYLKASGIGDTVFVGPEAEFFVFDDVKYKADPYNTGFKLDSSELPSNDDTDYETGNLGHRPRIKGGYFPVPPIDSCQDMRSEMLTVLAEMGVTVEKHHHEVAAAQHELGVKFDALVRNADKMQIYKYVVHQVANAYGKTATFMPKPVFGDNGSGMHVHLSIWKDGKPTFAGDEYAGLSETCLYFIGGIIKHAKALNAFTNPSTNSYKRLVPGYEAPVLLAYSARNRSASCRIPFGSNPKAKRVEVRFP

SEQ ID NO: 10720 - protein, 314 aa, Sinorhizobium fredii
VMFDGSSIAGWKAINESDMVLMPDPETAHMDPFFAQSTMVIVCDILDPVSGEAYNRDPRGTAKKAEAYLKASGIGDTVFVGPEAEFFVFDDVKYKADPYNTGFKLDSSELPSNDDTDYETGNLGHRPRIKGGYFPVPPVDSCQDMRSEMLTVLAEMGVTVEKHHHEVAAAQHELGVKFDALVRNADKMQIYKYVVHQVANAYGKTATFMPKPVFGDNGSGMHVHLSIWKDGKPTFAGDEYAGLSETCLYFIGGIIKHAKALNAFTNPSTNSYKRLVPGYEAPVLLAYSARNRSASCRIPFGSNPKAKRVEVRFP

SEQ ID NO: 10721 - protein, 397 aa, Puelia ciliata; identical to SEQ ID NO: 7128

SEQ ID NO: 10722 - protein, 560 aa, Schizosaccharomyces pombe
MSKRKSSSILDFFKKSNNGKNMWGNEAVSVEKTDSTTKPSTVKNAISSSQIKNEKFSQEVLLQFNDPSFTSEVGESPQWQSFGDANILEPLKNELVKNEESTMSELLLCPICGITLESLTVDANIHVNDCLDGRTTEAVSKKLKKDSVVKADPSNSSTFPISDSCKQALLPLPGKQINVRSVVPFYKLMPYNIPFAVDAFAYGAIDGVEAYFLSHFHSDHYGGLTPKWKHGPIYCSEVTGNLLINVMHVDEQYVKRLKLNQPYNIMGITVYVLDANHCPGSAMFVFETLQSNQTRRVLHCGDFRASKDHVMHPVLREKTIHKVYLDTTYLNPKYTFPPQADVVQACADKAISIKKSTDSRLLVVVSTYSIGKEKVAVAIAKSLSSRIYVVPRKMHIIKQLENQDLIDLLTDDPTQASVHMVTMMGIHPNSLLDYLEQYNSSFDKIIGYKVTGWTFQPLENRAQLSSSLDSIISRPPKFVEYDLRAIRGSTDKVAAFVAPYSEHSSFYDLTMFCLSMNIGHIIPTVNVGSQRSREKMNVWLDRWAWRRKKQGLLSLENVDW

SEQ ID NO: 10723 - protein, 314 aa, Sinorhizobium medicae
VMFDGSSIGGWKAINESDMVLMPDPETAHMDPFFAQSTMVIFCDILDPVSGEAYNRDPRGTAKKAEAYLKASGIGDTVFVGPEAEFFVFDDVKYKADPYNTGFKLDSSELPSNDDTDYETGNLGHRPRVKGGYFPVPPVDSSQDMRSEMLTVLTEMGVTVEKHHHEVAAAQHELGIKFDALVRNADKMQIYKYVVHQVANAYGKTATFMPKPIFGDNGSGMHVHLSIWKDGKPTFAGDEYAGLSETCLYFIGGIIKHAKALNAFTNPSTNSYKRLVPGYEAPVLLAYSARNRSASCRIPFGSNPKSKRVEVRFP

SEQ ID NO: 10724 - protein, 393 aa, Sesleria insularis; identical to SEQ ID NO: 7129

SEQ ID NO: 10725 - protein, 314 aa, Sinorhizobium meliloti
VMFDGSSIGGWKAINESDMVLMPDPETAHMDPFFAQSTMVIFCDILDPVSGEAYNRDPRGTAKKAEAYLKASGIGDTVFVGPEAEFFVFDDVKYKADPYNTGFKLDSSELPSNDDTDYETGNLGHRPRVKGGYFPVPPVDSSQDMRSEMLTVLSEMGVTVEKHHHEVAAAQHELGVKFDALVRNADKMQIYKYVVHQVANAYGKTATFMPKPIFGDNGSGMHVHLSIWKDGKPTFAGDEYAGLSESCLYFIGGIIKHAKALNAFTNPSTNSYKRLVPGYEAPVLLAYSARNRSASCRIPFGTNPKAKRVEVRFP

SEQ ID NO: 10726 - protein, 489 aa, Robiginitalea biformata HTCC2501
MKQLKDLLFGVSLHAVSGSTAVGIESIRFDSRETGASDAFVAIRGTEADGHRFIDGAVKNGVRAVICEELPQDLADGVTYVEVADTQLALAVMASNYYGNPSANLRLVGVTGTNGKTTVSTLLYQLFKKAGYKVGLISTIKIMVDDQEFPTRLTTPDSLTINKYLSRMNEAGVEFCFMEVSSHGIAQRRTEGLVFEGGIFTNLSHDHLDYHKDFADYRDTKKKLFDGLPKSAFALTNADDKNGLFMIQNTRARKLTYALRSYADFRAQILEQQLDGQLLKIQDNEVWTKLIGQFNAYNLLAIYATASLLGLGQLEILQLLSGLQTVDGRFQYFVSKQRITAIVDYAHTPDALKNVLVTINALRTGNESVITVVGCGGERDKSKRPVMGHIASDMSETAIFTSDNPRREPPRDIIAEMEAGVEPQNVRKVLVIEDREQAIRTACKMAGGGDIILIAGKGHETYQEIAGVRRDFDDYKLVSEVLERLASEV

SEQ ID NO: 10727 - protein, 382 aa, Sorghum halepense; identical to SEQ ID NO: 7130

SEQ ID NO: 10728 - protein, 229 aa, Abies beshanzuensis
IAKQAKAAGARIIVTQAAYVEKLADLQSDDVIVITIDGAPKDGCKHISVLTEADETQCPSVQIQPDDVVALPYSSGTTGLPKGVMLTHKGQVSSVAQQVDGENPNLYFHSEDVIMCTLPLFHIYSLNSVLLCALRAGAATLIMQKFNLMSFLELIQRYKVTVAPIVPPIVLDITKSHVVSQYDVSSVRLIISGSAPLGKELEDALRDLFPQAIFGQGYGMTEAGPVLAM

SEQ ID NO: 10729 - protein, 314 aa, Sinorhizobium saheli
VMFDGSSIAGWKAINESDMVLMPDPETAHMDPFFAQSTMVIFCDILDPVSGEAYNRDPRGTAKKAEAYLKASGIGDAVFVGPEAEFFVFDDVKYKADPYNTGFKLDCSELPSNDDTDYETGNLGHRPRIKGGYFPVPPVDSSQDMRSEMLTVLAEMGVTVEKHHHEVAAAQHELGVKFDALVRNADKMQIYKYVVHQVANAYGKTATFMPKPIFGDNGSGMHVHLSIWKDGRPTFAGDEYAGLSENCLFFIGGIIKHAKALNAFTNPSTNSYKRLVPGYEAPVLLAYSARNRSASCRIPFGSNPKAKRVEVRFP

SEQ ID NO: 10730 - protein, 541 aa, Trifolium repens
MAIEIASVVSKLQMLSTSDHSSVVSMNLFVALLCACIVLGHLLEENRWMNESITALLIGIATGVVILLLSGGKSSHILVFSEDLFFIYLLPPIIFNAGFQVKKKQFFVNFMIIASFGAIGTLISCVVITFGATQAFKMMDIGPLDIGDYLAIGAIFAATDSVCTLQVLNQDETPLLYSLVFGEGVVNDATSVVLFNAIQSFDLDRLNPSIAVHLLGNFLYLFIASTLLGVLTGLLSAYVIKKLYIGRHSTDREVALMMLMAYLSYMLAELFYLSGILTVFFCGIVMSHYTWHNVTESSRVTTKHSFATLSFVAEIFIFLYVGMDALDIEKWKFVSDSPGTSIATSAVLLGLILLGRAAFVFPLSFLSNLTKKSQHQKISFRQQVIIWWAGLMRGAVSMALAYNQFTRSGHTQLRSNAIMITSTITVVLFSTVVFGLLAKPLIRLLLPHQKATNSMTTTESSTPKSVIVPLLGEPRDSEADLEGHEIHRPNSIRALLSTPTHTVHRLWRKFDDSFMRPVFGGRGFVPVEPGSPTERNGNLWR

SEQ ID NO: 10731 - protein, 393 aa, Sporobolus giganteus; identical to SEQ ID NO: 7132

SEQ ID NO: 10732 - protein, 314 aa, Rhizobium galegae
VMFDGSSIGGWKAINESDMVLMPDPATVHMDPFFAQSTMVIFCDILDPISGEAYNRDPRGTAKKAEAYLKASGIGDTVFVGPEPEFFVFDDVKYKADPYNTGFKLDSSELPSNDDTDYETGNLGHRPRVKGGYFPVPPVDSLQDMRSEMLTVLAEMGVVVEKHHHEVASAQHELGVKFDTLVRNADKIQIYKYVVHQVANAYGKTATFMPKPIFGDNGSGMHVHQSIWKDGKPTFAGDEYAGLSESCLFYIGGIIKHAKAINAFTNPTTNSYKRLVPGYEAPVLLAYSARNRSASCRIPFGTGPKSKRVEVRFP

SEQ ID NO: 10733 - protein, 394 aa, Streptochaeta angustifolia; identical to SEQ ID NO: 7134

SEQ ID NO: 10734 - protein, 314 aa, Bradyrhizobium japonicum
TMFDGSSIAGWKAINESDMCLMPDPVTETIDPFFAETTMVIACDVLEPTTGEPYNRDPRGIAKKAEAMVKSMGVGDSVFVGPEAEFFVFDDVRFSSSPYNTGFRLDSSELPTNTDTEYEGGNLGHRIRTKAGYFPVPPQDSVQDMRSEMLGAMAKMGVKVEKHHHEVASAQHELGMKFDTLTLMADHLQIYKYCVHQVAHIYGKTATFMPKPVYGDNGSGMHVHQSIWKDGKPVFAGNKYADLSETCLHYIGGIIKHAKAINAFTNPSTNSYKRLVPGYEAPVLLAYSARNRSASCRIPYTASPKAKRVEVRFP

SEQ ID NO: 10735 - protein, 397 aa, Streptogyna americana; identical to SEQ ID NO: 7136

SEQ ID NO: 10736 - protein, 851 aa, Ostreococcus tauri
MSPTYVDEPNVPVPRDIGMDASSASSARPLRLKGKAEGPKFELHAELATRLYDHQRDGIRWMWGLHLAGRGGILADDMGLGKTLQACAFVTGLLRSGAAKRVLVLAPTTLLPHWLKEFETCGLKEGKTVFKYYSGTQSSRERNLRACVSGRGVLLASYGMVTTRASELGAPSDDDEAMKAMGREGRGGVPRDFAGTFRWDWVVMDEGHTLKNPATQLAQKVRQIPANLRMIVTGTPVQNVLSELWSLYDLTCPGLLGGENDFRRQFANKITAGQAASATQKQRAESKELTMTLRQLTRPYFLRREKSEILAKDDAKEEVTEDLSKASSSSMTSWKNVKNVPSALGQKNDFIAWIPLDPAQRALYTKFLASRPIQDAINKTGSAIACMNTLKKICDHPSLCVGAQAEDDSDAVTTEGPVDHAVEEDVELRKSCSGEAAAAACRGRSPSLSAKSKFLMSMLERFRIEGHRTLVFSQSQATLDIIEANIREANIDFVRIDGKVNVDERDRRVTKFRSQDDIPVMLLTARVGGLGLTLTEATRVIIFDPAWNPTTDNQSVDRAYRIGQTKDVVVYRMVTCGTIEEKVYRRQVFKGSLSKACTDGVSGRQYFDADDASQMFEITEHAASSSETMKQLNMLHAIDRKWTNELRREIPYVESLPCVCGVSDHDLLFSKEDEAVAPSQAAPKQSTGGVTTTPKGKAPGGAAWKDVNSAWGGDGGLLGGAFLRALTPSKGPSSAAKVKNIDVDEKSPEHVSGEAKLRAKIDLIASDVEKQRVILSMPDVVDKIPDKGESVRKAIETKLAEKRVLEAEYDAKYTKAEPVVVKDEFFTPEGSPEVQATLESVRSLSLDPRAL

SEQ ID NO: 10737 - protein, 396 aa, Thysanolaena maxima; identical to SEQ ID NO: 7137
  misc_feature (393)..(393): Xaa can be any naturally occurring amino acid

SEQ ID NO: 10738 - protein, 382 aa, Vibrio salmonicida LFI1238
MKAVHFGAGNIGRGFIGKVLSDSNVAVTFADVDAPLVDQLCHDQSYKVKVVGSKCQIDTVTHVTAVNSTSDDVIERIVHTDLVTTAVGPNVLNIIAKTIAKGLTKRFEANNESPLNIIACENMVRGTTHLKNEVYSHLDDSFHARCDELVGFVDSAVDRIVPPSEAANDDLLEVTVESFSEWIVDEKQFKGGVPNIAGMEKTDNLMAFVERKLFTLNTGHCITAYLGALKGHETVRDAIQDPEIRTEVKAAMEESGEVLIRRYGFDKELHAAYIEKILGRFANPYLRDEIDRVARQPIRKLGENDRLIKPLLGTIEYGIENKTLLKGIAAAFKYVNDTDPQAVELQTHLQESGLKATLAHYTGLNENSSEAKKIEAIFTTLN

SEQ ID NO: 10739 - protein, 394 aa, Zizania aquatica; identical to SEQ ID NO: 7138

SEQ ID NO: 10740 - protein, 582 aa, marine gamma proteobacterium HTCC2080
MIYAATLILAACSLLYELLIAQALATFAANTVTWYSVTVGLYLAGMGLGALLHDQHPTDNLWARFFKVEIALSAAGAIAVPLLHFSHTGALLLELYGLTFLGEVLFFGTGFLSITTIGILTGFELPVLIDLANTAKDKRRLTNRVLASDYTGSLLGGLAFPLILLPKLSLVAIGLIAATLNVFLAILALYFFLPKLHRSSFGFIVSGSLVIMLGLGLSLAPSLDRYFTKLYYFYWDQSEDFKQLFASMDNTEDVFRVRSPYQRIDLVHDKNGSGPSPVDDFYSSKFVDNPQQPKNYSLFLNGDFQLASNYEEYYHEFFAHIPIMTNGAVPRHVLVMGGGDGLLLRELVKYSDIKTIVHVDLDRELIEQATTHPVLLAMNEGALSDPRITRHFDDAYRFIRNSSEQFDAIYLDFPDPRDYNLSKLYSREFYHFVRQRLTSDGFIALDSPGLRHNKERREIYTSTLAAAGYKFVTPYISKIETINEAAYEFLLASGYEEEKARRLLASHAASMRLGFITARDNWPDRPIYQDPRVKLHVINDTRLYLTLRNLIPSLAPTDPDKINSIFRPTLPSGNIWHVRDPW

SEQ ID NO: 10741 - protein, 96 aa, Physcomitrella patens subsp. patens; identical to SEQ ID NO: 499

SEQ ID NO: 10742 - protein, 532 aa, Xylella fastidiosa 9a5c
MRIKTGIKKALILMLSVVLVSLVAIAAIAAHRFYIRLPQSRLFYAWKKMDEVYYDRTFAGFDWPAVLATYKKQLPRFDSDGQKTSPIINDMLSLLEVSHLQHFPAFMVSEEKKKTAVLANYFPELRDISGMVMVMDMLPRISRVLSLETWSPLYTHGVRVGDRILLETLDTDISDKNKPVRLYCYHINTAGVKKEFEFDLPAPPLGTQQTAVPAGDHVLHITRFDQGEIQALKHVSEDRNSSITQLHYISLGAVTTALHLPKNKVIDVVKDSEADKAGVEIGSIIGNGTNIKAGPENIGGKKVIKTNSRYEVVLPDGRKVTFSINKIIPKLNDFEGIRSAQLIGQTLVIAFNEMSDENTQWALQQIKNTPATAIVLDLRSNTGGSGIAGEKLLAGFLPSGTRIATEIRGKKTNVINVPSGYTPTDKPMAVLISLLSSSGAELAARTLQFHHRARIYGAQSSGQLLASRFYKLTDGTYMQIADTNLLDPAGKPLEWYGVMPDVKKWKALSDVRAGRDPVLECALTDLSGGQCH

SEQ ID NO: 10743 - protein, 538 aa, Acidobacteria bacterium Ellin345
MRSSRRTIFLVVLILLACGCLGMLFGQKITGASDNEIRDDLRTFSSVYDVVEQNYAEPVSADKAIYNGAIPGMLRVLDPHSNFFDPKQYALLREEQRGKYYGVGMQVGPRNNKVIVIAPFAGAPAYRAGIRPGDVIIAVDGKPTDNMSTSDVADLLKGPKGTTVRIAVIREGSEKPLEFSVIRDEIPRYSVDVHFMIRPGIGYMHVSGFQETTEHEVQEALDQMGDLKGLILDLRQNPGGLLSEGVGVADKFLKKGQVIVSHHGRSSPEKIYRAPHGNNGRDYPLVVLVNRGTASAAEIVSGAIQDHDRGLIAGETTFGKGLVQTVYPLSENTGLALTTAHYYTPSGRLIQREYAGVSLYDYYYNPADNDNNANKEVKLTDSGRTVYGGGGITPDVKIAPQKGNPFQDRLLIKYAFFNFSKHYMALHHTVDKGFNVDDAVMQEFRKFLDEQKIAFNEAELKDNDEWIRGNIKAELFVNQFGAQEGLRVHAETDPMVLKGLDLLPQAKQLADNARKTIAEKSAGTATASGAKVAANQNQ

SEQ ID NO: 10744 - protein, 276 aa, Bacillus subtilis subsp. subtilis str. 168
MSELWYTEKQTKNFGITMKVNKTLHTEQTEFQHLEMVETEEFGNMLFLDGMVMTSEKDEFVYHEMVAHVPLFTHPNPEHVLVVGGGDGGVIREILKHPSVKKATLVDIDGKVIEYSKKFLPSIAGKLDDPRVDVQVDDGFMHIAKSENQYDVIMVDSTEPVGPAVNLFTKGFYAGIAKALKEDGIFVAQTDNPWFTPELITNVQRDVKEIFPITKLYTANIPTYPSGLWTFTIGSKKYDPLAVEDSRFFDIETKYYTKDIHKAAFVLPKFVSDLIK

SEQ ID NO: 10745 - protein, 847 aa, Bordetella parapertussis 12822
MDIGFLVFGLAGLLTLVCFMPPLAGRLKLPYSVLLALVGCLLGIGVHLHGWAPPVLGDLLDTIEHFEISSETFLMVFLPVLLFETALSMNVRRLIDDIGPILMMAIVAVVVCTLVVGFAVDAVSSYGLIVCLLLGAIVATTDPAAVVGIFREVGAPKRLTTLVEGESLFNDAASIALYSVLLAALGGSGELSVGAVFNDFIFHFVGGGLAGFLMGRLACALFAWLRGFPTAEITLTLTLAYLSFFISEHYLGVSGVVATVIAGLVVGSTGRTRMSPTTFEFLSSAWGQFGFWANSLIFLFAAMLIPKLMAEADWQELLLVLVVFAATLAARAIVVFGLLPLLRVARIGAEVSNPYKSVMWWGGLRGAVSLALALAVTEQSSVPEQARQFVAVATTGFVLMTLMINGVSLRPLIRMLGLNQLSPVERTIRNQVLAAALEDLQGRTEEIAKVDHVNPEARDRIRAVFDASLTSVHDGQVGQMTLDQRVAVGLSIVARREEEMFFDILKAQIVDWRLAEGLLARAERLEDAVRAGGLAGFEAGIVADVRYSRLFRMALRTHYMFGFQGWLARELGKRFASLLTKRSVARDLMKFAREQVAPLLGEEAADRIIAAHQRRLDLIENALQALTLQYPSYSLWLQESHLGRVARELERRRYRDMLEQFLISGEVYADLMAQLKARWQHIDKHPPLDIELGSAELVKRVPLFEGLSQDSLRAICRLLKPRLALPDQHILTEGRHGQEMCIVASGAVVVHLPDHTTIELGSGEFFGELALLGEEQLVPDVTSLGYSKLLMLSARDFHALLARDEHLRERIQTVAKQRMRAIEVWKQYSQAAAAAAASTASEDSAPA

SEQ ID NO: 10746 - protein, 484 aa, Bacillus clausii KSM-K16
MKTKHLVWTVAVLAAVLVGGFFFIGGMNTGSPNPIQPNNGNESVVELSDDELMDKFERALATIESEYVTETDRQQLIEGAINGMVETLNDPFSDYMDVSSATDFQQSLSSHFEGIGAEVGMIDGNVSIISPMRESPAEKAGLLPNDAIIAIDGESIEGWSVNEAVANIRGEGGTTVTLTIARNGVKDPFDVKIERDTIEVESVRADTFEQDGKKIGRLEITSFSEDVGTQFEEQLQTLEEDGIDGLVIDVRGNPGGYLEGATKIGDAIIPEGKPVVQIEHGNGEIDSYLSKMKGKKPYPVVGLINESSASASEILAAALKESGDYDLVGETTFGKGTVQKSIPMDDGSALKITTDRWLTAGGNTIDQEGVEPTVKQRQPDYFYAVALTVEETFVKDQVSDQIGNAQKMLTGLGFDVGRDDGYFDEKTEEAIIAFQQSHDLQANGELNEETAGKLQEDILSHIRDTANDEQLKRAVELAAEQASQ

SEQ ID NO: 10747 - protein, 645 aa, Anaplasma phagocytophilum HZ
MAAERIIGIDLGTTNSCVAVMEAGTAKVIENSEGSRTTPSVVAFTDNERLVGELAKRQANINAQNTIYASKRIIGRRYDDMRDLKCPYEVFPAKNGDAWIRAKGEGYSPVQIGAFVLEKIKETAERYFGAPVKKAVITVPAYFNDAQRQATKDAGTIAGLDVVRIINEPTAAALAYGLDKGDKQRTIVVYDLGGGTFDVSVLEIADGVFEVKATNGDTKLGGEDFDNAIMEHMMESFQKETGINLRNDPMAVQRVKEAAEKAKIELSTRLETDITLPFISSDSTGAKHLSLKLSRAKFEGLVDELIERTIEPCKKALSDAGIKDNSKVDEVVLVGGMTRVPKVIQRVKDFFGKEPCQGVNPDEVVAVGAAIQGGILTGDVRDVLLLDVAPLSLGIETLGGVFTPLIERNTTIPTKKSQVFSTAEDGQTAVTIKVYQGERKMAIDNKLLGQFSLEGIPHAPRGVPQIEVTFDIDANGIVHVSAKDKASGKEQTIKIQSSGGLSDEEIKKMVKDAQDRAEDDEKRKKHVELKNSSEGLIHSVEKSLKDYGDKVAGADKSNIESAIKDLRECLNDSNCSTDTLQQKYDALMNLSMKLGEAAYAANKNDGAGSADQSGSSSGGSDGNPEERVVDSEYQEINKDEDKKNT

SEQ ID NO: 10748 - protein, 158 aa, Prochlorococcus marinus str. NATL2A
MSVNISKVEVFSFKNQKITFDHYKGNVLLIVNVASKCGFTKQYKALQYLQDKYESKGFKVLGFPCNDFGNQEPGQLEEIKEFCSTTYGVNFQLFQKVHAKGKTTEPFTTLNQVSPSGDVEWNFEKFLINTEGDAVARFKSSIEPDSPEVTQAIEKLLD

SEQ ID NO: 10749 - protein, 106 aa, Glycine max
TREYIETAMGKVLRDYPGLLILDEGHTPRNQRSYIWKVLSESRSQKRVLLSGTPFQNNFLELYNILCLMKPSFPDSIPQELKKFCQSRLRKERKASKYASYEPIYS

SEQ ID NO: 10750 - protein, 380 aa, Oryza sativa Japonica Group
MVAAEAAAAPAPPHDAVAAVAVGMVGAAGTVDEQKAAGVGILLQISMLVVSFVLGHVHRSRKVYYIPEASASLLIGMIVGGLAKISNTQRSISLAPKPFFSNFGAIITFAILGTFIASIVTGLLVYVGGLIYIVYKLPLVECMMFGALVSATDPVTVLSIFQELGTDVNLYALVFGESVLNDASLILSNLFKYAALGVENLHNLESCLFVLFPYFSYMLAEGFGLSGIVSILFTGIVMKRYTFYNLSEDSQRFTARFFHLLSSLAEAFVSLYYLQGLRGAMAFALALQSIHDLPEGHGETIFTATTSIVVLTVLLIGGSTGTMLESLQHNFDGNNAGYPGQRYGEETSTSSNFTMKLKELQRRYSSSHLILKLYLLIALL

SEQ ID NO: 10751 - protein, 314 aa, Mesorhizobium tianshanense
VMFDGSSIAGWKAINESDMVLMPDTETVHMDPFFAQSTMVILCDILDPISGESYNRDPRGTAKKAEAYMKAEGIGDQIFVGPEAEFFVFDDVKYKADPYNTGFKLDSTELPSNDDTDYETGNLGHRPRTKGGYFPVPPIDSAQDMRSEMLTVLAEMGVRVEKHHHEVAAAQHELGIKFDTLVRNADKMLIYKYVVHQVANAYGKTATFMPKPVFGDNGSGMHVHQSIWKGGKPTFAGNEYAGLSESCLFYIGGIIKHAKAINAFTNPLTNSYKRLVPGYEAPVLLAYSARNRSASCRIPFGSSPKAKRVEVRFP

SEQ ID NO: 10752 - protein, 226 aa, Keteleeria evelyniana
AKQAKAAGARIIVTQAAYVEKLADLQSDDVIVITIDEAPKDGCKHISVLTEADEKRCPSVDIHPDDVVALPYSSGTTGLPKGVMLTHKGLVSSVAQQVDGQNPNLYFHSEDVIMCVLPLFHIYSLNSVLLCALRAGAATLIMQKFNLTSFLELIQKYKVTVAPIVPPIVLDITKSPNFSQYDVSSVRIIMSGAAPLGKELEDALRDRFPRAIFGQGYGMTEAGPVL

SEQ ID NO: 10753 - protein, 3478 aa, Arabidopsis thaliana
MTSSSHNIELEAAKFLHKLIQDSKDEPAKLATKLYVILQHMKTSGKENTMPYQVISRAMDTVVNQHGLDIEALKSSCLPHPGGTQTEDSGSAHLAGSSQAVGVSNEGKATLVENEMTKYDAFTSGRQLGGSNSASQTFYQGSGTQSNRSFDRESPSNLDSTSGISQPHNRSETMNQRDVKSSGKRKRGESSLSWDQNMDNSQIFDSHKIDDQTGEVSKIEMPGNSGDIRNLHVGLSSDAFTTPQCGWQSSEATAIRPAIHKEPGNNVAGEGFLPSGSPFREQQLKQLRAQCLVFLALRNGLVPKKLHVEIALRNTFREEDGFRGELFDPKGRTHTSSDLGGIPDVSALLSRTDNPTGRLDEMDFSSKETERSRLGEKSFANTVFSDGQKLLASRIPSSQAQTQVAVSHSQLTFSPGLTKNTPSEMVGWTGVIKTNDLSTSAVQLDEFHSSDEEEGNLQPSPKYTMSQKWIMGRQNKRLLVDRSWSLKQQKADQAIGSRFNELKESVSLSDDISAKTKSVIELKKLQLLNLQRRLRSEFVYNFFKPIATDVEHLKSYKKHKHGRRIKQLEKYEQKMKEERQRRIRERQKEFFGGLEVHKEKLEDLFKVRRERLKGFNRYAKEFHKRKERLHREKIDKIQREKINLLKINDVEGYLRMVQDAKSDRVKQLLKETEKYLQKLGSKLKEAKLLTSRFENEADETRTSNATDDETLIENEDESDQAKHYLESNEKYYLMAHSIKENINEQPSSLVGGKLREYQMNGLRWLVSLYNNHLNGILADEMGLGKTVQVISLICYLMETKNDRGPFLVVVPSSVLPGWQSEINFWAPSIHKIVYCGTPDERRKLFKEQIVHQKFNVLLTTYEYLMNKHDRPKLSKIHWHYIIIDEGHRIKNASCKLNADLKHYVSSHRLLLTGTPLQNNLEELWALLNFLLPNIFNSSEDFSQWFNKPFQSNGESSAEEALLSEEENLLIINRLHQVLRPFVLRRLKHKVENELPEKIERLIRCEASAYQKLLMKRVEDNLGSIGNAKSRAVHNSVMELRNICNHPYLSQLHSEEVNNIIPKHFLPPIVRLCGKLEMLDRMLPKLKATDHRVLFFSTMTRLLDVMEDYLTLKGYKYLRLDGQTSGGDRGALIDGFNKSGSPFFIFLLSIRAGGVGVNLQAADTVILFDTDWNPQVDLQAQARAHRIGQKKDVLVLRFETVNSVEEQVRASAEHKLGVANQSITAGFFDNNTSAEDRKEYLESLLRESKKEEDAPVLDDDALNDLIARRESEIDIFESIDKQRKENEMETWNTLVHGPGSDSFAHIPSIPSRLVTEDDLKLLYETMKLNDVPMVAKESTVGMKRKDGSMGGLDTHQYGRGKRAREVRSYEEKLTEEEFEKLCQTESPDSPQGKGEGSERSLANDTSNIPVENSSDTLLPTSPTQAITVQPMEPVRPQSHTLKEETQPIKRGRGRPKRTDKALTPVSLSAVSRTQATGNAISSAATGLDFVSSDKRLEAASHPTSSLALTSPDLSGPPGFQSLPASPAPTPIRGRGRGRSRGRGAGRGRRVEGVLHGSNSSITQRTETATSLASDAEATKFALPRSASEIVSRVPKANEGSTSNPDQVSPVHSATTALRSDKAADKDLDAPPGFDSGSHVQTLNVLENSSERKAFAVKKRPLIQGVSSQHPGPNKQPLDLPVSTSSTLLGGGPVQNQNAVSSVCDGSKSPSEGRTYTALQGVTTAPSDATLPMSSQPSDATLPMSSQPVGSTVEAQEANVPSLPAALPAKRRVRNLPSRGETPKRQGKRRGQPLPATDASSARSTGLTPQIEVKVGNLSGTKAKFDAVAKEQPHFSQSVAPDIHSSGSLSQEIRRDTSGTGGSARKQTADVTDVARVMKEIFSETSLLKHKVGEPSATTRTNVPDAQSPGEMNLHTVETHKAEDSSGLKNQEALYNLSKADKLVSDIPHPVPGDLTTSGSVANKDVDIGSSKVAAENELVKIPGGDVDSSVIQLSLGNTLTAKSSLEKCTADQLLGEKLSQEGETTPASDGETCHLAEETASSLSYVRSEPTASASTTAEPLPTDKLEKNISFQDEVKTLNGDKREAILLSSEEQTNVNSKIETNSEELQASRTDEVPHVDGKSVDVANQTVKEDEAKHSVEIQSSMLEPDELPNAGQKGHSSIDLQPLVLVTSNENAMSLDDKDYDPISKSADIEQDPEESVFVQGVGRPKVGTADTQMEDTNDAKLLVGCSVESEEKEKTLQSLIPGDDADTEQDPEESVSDQRPKVGSAYTQMEDTDEAKLLMGCSVESEEKEKTLQSHIPGDDADTEKNPEESVSVQGVDRPKVGTTDTQMEDTNDAKLLVGCSVASEEKEKTLQSHIPGDDADTEQNPEESVSVQGVNRPKVGNANTQMEDTDEAKVLVGCSVESEEKEKTLQSHIPGDDADTEQNPEESVSNFDRPKDGTADTHMEDIDDAKLLVGCSVESEEKEKSLQSHMPSDDAVLHAPFENTKDSKGDDLHGESLVSCPTMEVMEQKGFESETHARTDSGGIDRGNEVSENMSDGVKMNISSVQVPDASHDLNVSQDQTDIPLVGGIDPEHVQENVDVPASPHGAAPNIVIFQSEGHLSPSILPDDVAGQLESMSNDEKTNISSEQVPDVSHDLKVSQDQTDIPPVGGIVPENLQEIVDVPASPHGVVPDVVVSQSEEIQSPSILPDDVPGQPDDGNCEKMDTMQNNTSIDIGITSGKTCQPSSSTQPEDENRNSLSHCEPSEVVEQRDSRDQVCIGSVESQVEISSAILENRSADIQPPQSILVDQKDIEESKEPGIESADVSLHQLADIQAEPSNLVDQMDIEESKEPGTESADVSLHQLADIQPGPSILVDQMDTEKSKEPGTESADVSLHQLADIQPGPSILVDQMDTEKSKEPAVQKNIEDKDQSHVETAGSELVDVSAECSTEPQVQLPPSSEPVGDMHVHLGASKSEIVAEGTDFSSSLPKTEEENAKSQLADTEPSSSLTAVQKNIEDQVETAGCEFVVVSTGCSTEPQVQLPPSAEPVVAEGTEFPSSLLMTGVDNSSHLMTGVDNAKTHLADVVPSSSPTTMEKNIEAQDQDQVTTGGCGLVDVLTECSSEPQLQLPPSAEPVISEGTELATLPLTEEENADSQLANIEPSSSPSVVEKNIEAQDQDQVKTAGCELVSTGCSSEPQVHLPPSAEPDGDIHVHLKETEKSESMVVVGEGTAFPSSLPVTEEGNAESQLADTEPFTSPTVVEKNIKDQEQVETTGCGLVDDSTGCSSEPQVQLPPSAEPMEGGCDLINVPSGCSTEPQIQLSSSAEPEEGMHIHLEAAMNSETVVTEGSELPSSLPMTEDENADGQLAEVEPSVSLTVEQTNIEEKDHIETAECELVDVSPGCSSQPEVKFPPSPDAVGGMDVHLETVVTEDTDSNSSLPKTEEKDAENPSDRLDGESDGTTVATVEGTCVESNSLVAEESNIEVPKDNEDV

SEQ ID NO: 10754 - protein, 498 aa, Alkalilimnicola ehrlichei MLHE-1
MMRLRTLLQPWLDLTDADDRPVGGLAVDSRDIEPGFVFVALRGSRHHGLGYLGDALAAGAGAVLWEPAGDVAPEPDERTAAERAGVPLIAVPDLGRRLGPIAARLYGDPSARMRVVGVTGTDGKTSVTQYLAQLLDREAHRCGLVGTLGSGFPDSLQPGTHTTPDAASVQRTLARLHRQGAAQVAMEVSSHALDQHRVAGVRFHTAVLTNLGRDHLDYHGDLAGYAEAKSRLFGVPGLQWAVLNLDDAFGRQVHGALAGGTRALGYSLAGHPQAGVRGEGLVLEPQGLRLRLSTEWGEAPVQAPLLGAFNAANVLAVAAAALSLGVALPVIVERLAGLRPVPGRMEPFTRPGRPSVIVDYAHTPAALRGALAAVRAHYRGAVWLVFGCGGDRDRGKRPLMGEAAAELADRVVLTDDNPRREDPDRIIDDIRQGAPGRDWPVLRDRAGAIRHAVERAGPEDVVLVAGKGHETVQQIGDRCLPFSDREAVVQALGEEEGA

SEQ ID NO: 10755 - protein, 223 aa, Zea mays
MPDSDNDSGGPSNAGGELSSPREQDRFLPIANVSRIMKKALPANAKISKDAKETVQECVSEFISFITGEASDKCQREKRKTINGDDLLWAMTTLGFEDYVEPLKHYLHKFREIEGERAAASAGASGSQQQQQQGELPRGAANAAGYAGYGAPGSGGMMMMMMGQPMYGGSQPQQQPPQPQPPQQQQQQHQQHHMAMGGRGGFGQQGGGGGSSSSSGLGRQDRA

SEQ ID NO: 10756 - protein, 620 aa, Methanococcoides burtonii DSM 6242
MGKILGIDLGTTNSCMAVIEGGKPTVIPNAEGGRTTPSVVGFSKKGDKLVGQVAKRQMIANPGNSVSSIKRHIGEGDYKVNLSGKDYTPQEVSAMILRKLKDDAEAYLGETITQTVITVPAYFNDSQRQATKDAGQIAGLEVLRIINEPTAASLAYGLDKEEGDHKILVYDLGGGTFDVSILELGDGVFEVLSTSGNTHLGGDDFDQRITEFLVEEFKKAEGIDLSNDKAALQRLNDAAEKAKIELSGVASTNVNLPFITADSNGQPKHIDIDITRAQFEKMTEDLVAKTLESMKMALSDAKLTTKDIDRVLLIGGSTRTPAVYNLVKNFIGKDPYKNINPDEAVAVGAAIQAGVLSGEVHDVLLLDVTPLTMGIETLGGVATPLIERNTTIPVKKSQIFSTAADSQPSVEIHILQGERGIASANKTLGRFVLDGIPPAPRGLPQIEVTFDIDSNGILHVNAKDLGTGKEQSISIQKPGGLSDEEIERMVKDAELHAEEDKARKEEVETRNNADSLVNAAENTLKEAGDVATNEQKEQIEAAIADLKTALEGEDLEAIKSKTEALQESVYKVSAAMYEKAQKEASAGAEASEDASGPSSTGSASDDDVVDADYEVVDEDK

SEQ ID NO: 10757 - protein, 577 aa, Mesotaenium caldariorum; identical to SEQ ID NO: 7162

SEQ ID NO: 10758 - protein, 1142 aa, Mesotaenium caldariorum; identical to SEQ ID NO: 7164

SEQ ID NO: 10759 - protein, 145 aa, Medicago sativa
MGFTDKQEALVNSSWESFKQNPGNSVLFYTIILEKAPAAKGMFSFLDSAGVQDSPKLQSHAEKVFGMVRDSAAQLRATGGVVLGDATLGAIHIQKGVVDPHFAVVKEALLKTIKEVSGDKWSEELNTAWEVAYDALATAIKKAMV

SEQ ID NO: 10760 - protein, 213 aa, Pinus thunbergii
QAQAAGARIIVTLAAYVEKLADLQSHDVLVITIDDAPKEGCQHISVLTEADETQCPAVKIHPDDVVALPYSSGTTGLPKGVMLTHKGLVSSVAQQVDGENPNLYFHSEDVILCVLPLFHIYSLNSVLLCALRAGAATLIMQKFNLTTCLELIQKYKVTVAPIVPPIVLDITKSPIVSQYDVSSVRIIMSGAAPLGKELEDALRERFPKAIFGQ

SEQ ID NO: 10761 - protein, 1064 aa, Bacillus cereus ATCC 10987
MSFTLNKSIIKEVCGETSYKRGEAYYKSNKVIVNYYDETKEICEATVKGNEDFRVTVEKAKKGDVVARCSCPSLASFQTYCQHVAAVLIQINYNQQTGGMGSVSSRNDQLTNGMFQLFADKPLRPKSKQHRFDTREILDVAFICSPVAKKSGGALLGIQLKLAKTYFINHIREFLSKVEKREAFHCSNEFTYTPDVHSFKQETDAIIQQFIKIYHNEKMYEDALEVHAKQDESMIFIPPASWNDMLSALSRAEYVQLKQNEQLFQGLHISKGLLPLHFEFTKGNNGGFTLHIDGLNRVRVMEMYNNALYDGKLYHLPMEDCMRLIELQKMMSRSNSNQFYIPENKMEHFVAKVVPGLMKLGTVRIDEVISDRVETPSLKAKLYLDRVKNRLLAGLEFHYGNVVINPLEEDGQPSVFNRDEKKEKEILDIMSESAFAKTEGGYFMHNEEAEYNFLYHIVPTLKGLVDIYATTAIKLRIHKGDTAPLIRVRRKERIDWLSFRFDIKGIPEAEIKGVLAALEEKRKYYRLANGSLLSLESKEFNEINQFVKESGIRKEFLHGEEVNVPLIRSVKWMNGLHEGNVLSLDESVQDLVESIQNPKKLKFTVPPTLHAVMREYQVYGFEWMKTLAYYRFGGILADDMGLGKTLQSIAYIDSVLPEIREKKLPILVVSPSSLVYNWFSELKKFAPHIRAVIADGNQTERRKILKDVAEFDVVITSYPLLRRDVRSYARPFHTLFLDEAQAFKNPTTQTARAVKTIQAEYRFGLTGTPVENSLEELWSIFHVVFPELLPGRKEFGDLRREDIANAVKPFVLRRLKEDVLQELPDKIEHLQSSELLPDQKRLYAAYLAKLREETLKHLDKDTLRKNKIRILAGLTRLRQICNHPALFVDDYKGSSAKLEQLLDILEECRSTGKRILIFSQFTKMLSIIGRELNRQAIPYFYLDGNTPSQERVELCNRFNEGEGDLFLISLKAGGTGLNLTGADTVILYDLWWNPAVEQQAADRAYRMGQKNTVQVIKLVAHGTIEEKMHELQESKKHLIAEVIEPGEEKLSSITEEEIRDILMI

SEQ ID NO: 10762 - protein, 472 aa, Mycobacterium sp. JLS
MKLDGSTLPDIPIAKPTYARGDVSVGIVHFGVGGFHRAHQAMYVDALLEKGLAAEWGICGVGVLPGDRKMADALGAQDGLYTLLLEKPDGTRDARVIGSIVDYRYAPDDPEGVVELLAAPSTRIVSLTITEGGYEVDKVDADSVNVFGLITDALALRRDRGVRPPTIVSCDNIEGNGDVARAAFMCYADRTHPGLSEWIGANTRFPNSMVDRITPVTTPEVIATVRDEFGVDDAWPVVAEPFTSWVLEDTFTDGRPPFEDVGVLLVDDVTPYELMKLRLLNASHQALCYFGYLAGYRLVHDAAADPLFAELLRRYMDSEATPTLRPVPGIDLPDYKRTLIERFANPGVRDTIARLCYGSSDRIPKWLLPVVRENLRTGAPIQLSAAVVASWARYAEGVDEQGQPIDVQDQLADELVPLARAQRDNPTSFIENRSVFGDLVDEKRFVDEYVATLESLHRVGARATLEALVGKP

SEQ ID NO: 10763 - protein, 125 aa, Zea mays
  misc_feature (86)..(86): Xaa can be any naturally occurring amino acid
MSQRDVDYSCGFCGYPLNLSSSNRSTSEVGSSYKKSLKKGLISFISVDLSRFTQVDKVSCFPLTWRSYRPKTKLLCRKCGASIGYXDTVGQLALCSFDPASSSSSSTSQKYLIKIQALQPSDGTQ

SEQ ID NO: 10764 - protein, 539 aa, Zea mays
MSIGLTAETVTNKLASAEHPQVVPNSVFIALLCLCLVIGHLLEENRWVNESITAILVGAATGTVILLISKGKSSHILVFDEELFFIYLLPPIIFNAGFQVKKKQFFRNFITIILFGAIGTLISFVIISLGAMGLFKKLDVGPLELGDYLAIGAIFSATDSVCTLQVLNQDETPLLYSLVFGEGVVNDATSVVLFNAVQKIDFEHLTGEVALQVFGNFLYLFSTSTVLGIATGLITAFVLKTLYFGRHSTTRELAIMVLMAYLSFMLAELFSLSGIITVFFCGVLMSHVTWHNVTESSRITSRHVFAMLSFIAETFLFLYVGTDALDFTKWKTSSLSFGKSLGVSSVLLGLVLVGRAAFVFPLSFLSNLSKKHPGEKITIRQQVVIWWAGLMRGAVSIALAFNKFTRAGHTQVRGNAIMITSTIIVVLFSTVVFGLLTKPLINLLIPHRNATSMLSDDSSPKSLHSPLLTSQLISSIEEPTQIPRPTNIRGEFMTMTRTVHRYWRKFDDKFMRPMFGGRGFVPFVPGSPTERSSPDLSKA

SEQ ID NO: 10765 - protein, 435 aa, Fulvimarina pelagi HTCC2506
MTLSLSAFAQERGVKYFMISFTDLFGAQRAKLVPAEAIDDMQKDGAGFAGFATWLDLTPAHPDLFAMPDGDAAIQLPWKPEVAWVPADCVMEDKPVAQAPRVVLKRLVDQAADEGLRVKTGVEAEFFLITPNGERISDEFDTAVKPCYDQQAVMRRYDVIAEICDHMLSLGWKPYQNDHEDANGQFEMNWEYDDALATADKHSFFKFMVRSVAEKHGLRATFMPKPFTDLTGNGCHCHISVWNKDSSVNAFADKDAPFGLSAKGKTFLGGIMRHGPALAAITNPTVNSYKRINAPRTTSGATWAPNAITWTGNNRTHMVRVPGPGRFELRLPDGAANPYLLQAVIIAAGLSGMKANADPGPHSDLNMYEEGHRAKNTPRLPLNLLDALRALERDEPFCEALGGEFVSSYLKKKREEWTSYASAITQWEHDNTLDI

SEQ ID NO: 10766 - protein, 568 aa, Leifsonia xyli subsp. xyli str. CTCB07
MIAVAVIVGVAAFARKLGVAAPIILAVVGVTLSWLPGVPEIVVPPEVILDGLLPPILYAAAISVPLTDFRRNLAPIAGLSIVLVIITAFAVGFVLYALLPDLNLAAAIALGAIISPPDAVAATSIGRKLGLPPRLLTVLEGEGLVNDATALVLLRTALAAAVGALATPLDGVLDFLSAVLIALVIGLVVGFLSVWVRSKLNDTALDTALSVIVPFAAFAPTEALHGSGVLAVVITGLYTGHASSKHFTAQARISDQINWRTIQFLLENGVFLLIGLELRTLIADVEHPEVLSVWDAVGIGLVGLLCLVAIRSLLIVPLIYFLKHRGERAEKSVLREWLMISYFRDHPVRFRWQAIRKQRAELRYERHRSDLEEFRQEAIDWRGGIVLGWSGMRGVVTLAAAQSLPADIPYRPQLILIAFTVAFVSLVLQGGTLPGLIRALGVQGIDAKDDRRLLAQLLDDLSETGLAVLDDPEATSGSAKPVDPEVVERVRQTTYLGAEAAWERIILYDEPAESRPHHVYRTLRLAVVDAERDRLLLERSRGAYPSRILSEAQAMLDIEETRLRSRAR

SEQ ID NO: 10767 - protein, 638 aa, Klebsiella pneumoniae subsp. pneumoniae MGH 78578
MGKIIGIDLGTTNSCVAIMDGTTARVLENAEGDRTTPSIIAYTQDGETLVGQPAKRQAVTNPQNTLFAIKRLIGRRFQDEEVQRDVSIMPYKIVAADNGDAWLDVKGTKTAPPQISAEVLKKMKKTAEDYLGEPVTEAVITVPAYFNDAQRQATKDAGRIAGLEVKRIINEPTAAALAYGLDKEVGNRTIAVYDLGGGTFDISIIEIDEVDGEKTFEVLATNGDTHLGGEDFDTRLINYLVDEFKKDQGIDLRNDPLAMQRLKEAAEKAKIELSSAQQTDVNLPYITADATGPKHMNIKVTRAKLESLVEDLVNRSIEPLKVALQDAGLSVSDINDVILVGGQTRMPMVQKKVAEFFGKEPRKDVNPDEAVAIGAAVQGGVLTGDVKDVLLLDVTPLSLGIETMGGVMTALISKNTTIPTKHSQVFSTAEDNQSAVTIHVLQGERKRASDNKSLGQFNLDGINPAPRGMPQIEVTFDIDADGILHVSAKDKNSGKEQKITIKASSGLNEEEIQKMVREAEANAESDRKFEELVQTRNQGDHLLHSTRKQVEEAGDKLPADDKTAIESALTALESSLKGEDKADIEAKMQALAQASQKLMEIAQQQHAQQQAGSADAQASNAKDDDVVDAEFEEVKDKK

SEQ ID NO: 10768 - protein, 484 aa, Clostridium perfringens SM101
MILKSLLKGLDYEVIKGNEESKVQNIRYDNRKIEQGDAFVCVKGFKVDGHSFIGDAIKKGAKTLIVQEDVSVQEDITIIKVRDTRKALAIMSSNYFGNPKDKLKIIGITGTNGKTTSAFIIKSILEKAGFMTGLIGTIANYIGNKKVDAVRTTPESYELHELFKNMVDAGVEYCVMEVSSHSLELDRVYGIQFEEGIFTNLTRDHLDFHKTFENYYNAKFKLFERSNHSIINLDDPYGANIVKDIEERGVKTKVSTFSIEKESDFKAFEIKSHSNGSEFKVNLEEVEDFSINIPGEYNVYNSLGCIICAYNLNIPMNKIKEGLSDVVIPGRCELVAKEKNLPYSIIIDYAHTPDGLENILSTVKAFTRNRMISVFGCGGDRDKVKRPQMGKIGCELSDIAIITSDNPRSEEPMDIINDIVKPLNYDNFVIEVNRKEAIRKAMNMALEGDVIVIAGKGHETYQILKDETIHFDEREVVYDILEGK

SEQ ID NO: 10769 - protein, 149 aa, Oryza sativa
MASSMLSSAAVVTSPAQATMVAPFTGLKSSAAFPVTRKTNKDITSIASNGGRVSCMKVWPPIGKKKFETLSYLPDLSDVELAKEVDYLLRNKWIPCVEFELEHGFVYREHGNTPGYYEGRYWTMWKLPLFGCTDSAQVLKEVEECKKEY

SEQ ID NO: 10770 - protein, 443 aa, Dehalococcoides sp. VS
MTRAESVEYVLKTAKDHNVRFIRLWFTDILGTLKSYSIAYNELERALEDGMGLDGSSIEGYARIDESDMVALPDPDTFRIMPWSNGEYQVARMFCDIKHPSGEQFEGDPRYVLKRNLKKAADMGFTFYVGPELEYFYFKNDRSTEFLDEGGYFDLTPRDLATDLRRETIVALQDMGIIVEYAHHEVAPSQHEIDIRYTDALTMADNVMTYRLLVKEVALRHGLHASFMPKPVASVNGSGMHTHQSLFKGDKNAFFDAKDSYYLSPMAKQYVAGILKYAPEFTAVTNQWINSYKRLVPGFEAPVYLSWARRNRADLVRVPEYKPGHEKSTRIELRSADPGCNPYLAFSVMLAAGLKGIEDKLTPPAPIEENVYEMTEAERAKRGIGTLPGSLLEALKLTEGSALMREALGEHVHEAFIANKKIEWTQYSMAVTDWELKRYLPVL

SEQ ID NO: 10771 - protein, 223 aa, Oryza sativa Japonica Group
MEAIIAAMGGPHGLSAGREIRYIPPFPPKKMSRDLNFSGFNQLGRLQPMQGLPRASSSSTSASRDRDGGDGDGGGGGVTMTNGQDNLLPIANVGRIMKDGLPPQAKISKRAKETIQECATEFISFVTGEASERCRRERRKTVNGDDVCHAMRSLGLDHYADAMHRYLQRYREGEELAASLNSSSSAAAAAAAAGSRGGGAIQIDVRAELSIFRSGNNQGRPNN

SEQ ID NO: 10772 - protein, 216 aa, Zea mays
  misc_feature (106)..(106): Xaa can be any naturally occurring amino acid
MATGLALAAAPHVASVTGSGTVEEQAAGVGILLQISMLVLSFVLGHILRRRKFYYIPEASGSLLIGMIVGGLANISNTQKSIRRWFNFREDFFLLFLLPPIILYPXSPKPFFSNFDAIITFAILGTFIASIVTGLLVYLGGLLYIVYRLPLVECMMFGALVSATDPVTVLSIFQELGTDTNLYALVFGESVLNDAVAISLYRSMASMRTHHSGKNF

SEQ ID NO: 10773 - protein, 355 aa, Physcomitrella patens subsp. patens
MVEFFEESSSNGVHVNGTTHQTSASNRTSHQPSATKTAAAAEAEPKKRCLWFEEELEEDLRWVFGVSKILHTGVSEFQDIELVESGPFGKVLILDGKLQSAEADEFVYHESIVHPALLYHSNPKSVFIMGGGEGSTAREALRHRSVEEVVMCDIDEEVVNFCRKHLTVNAEAFRSNRLELVINCARAELENRTEQFDIIIGDLADPVAGGPCYQLYTKSFYEHVLKPRLKDGGILVTQGGPAGILTHTEVYSSIYNTLRQTFKYVVPYAAHVPSYADTWGWIMASDQPIPAISAEETNLRIKQRINGELKFLDGQTLSATHALNKHVRNSLAAERHVYTEETARFIHGHGTASKN

SEQ ID NO: 10774 - protein, 538 aa, Arabidopsis thaliana
MLDSLVSKLPSLSTSDHASVVALNLFVALLCACIVLGHLLKENRWMNESITALLIGLGTGVTILLISKGKSSHLLVFSEDLFFIYLLPPIIFNAGFQVKKKQFFRNFVTIMLFGAVGTIISCTIISLGVTQFFKKLDIGTFDLGDYLAIGAIFAATDSVCTLQVLNQDETPLLYSLVFGEGVVNDATSVVVFNAIQSFDLTHLNHEAAFHLLGNFLYLFLLSTLLGAATGLISAYVIKKLYFGRHSTDREVALMMLMAYLSYMLAELFDLSGILTVFFCGIVMSHYTWHNVTESSRITTKHTFATLSFLAETFIFLYVGMDALDIDKWRSVSDTPGTSIAVSSILMGLVMVGRAAFVFPLSFLSNLAKKNQSEKINFNMQVVIWWSGLMRGAVSMALAYNKFTRAGHTDVRGNAIMITSTITVCLFSTVVFGMLTKPLISYLLPHQNATTSMLSDDNTPKSIHIPLLDQDSFIEPSGNHNVPQPDSIRGFLTRPTRTVHYYWRQFDDSFMRPVFGGRGFVPFVPGSPTERNPPDLSKA

SEQ ID NO: 10775 - protein, 1353 aa, Oryza sativa Indica Group
MPCRKGKGKGVEDEVEVYEPASPPERVLIILDSSEDDLDLQERERQGRGARQGGAAFRKRLGLQWCERSCACAGAGAGRRHRREEEEEETRKEAPSRAQESREVVRVKEEPNSDGNGAGGRARARSPVAAAAKQRKRGGREAPSRAQESRVPVQIKEEPYSGSDSDGNVAGGRAVVPAADAKQGKRGKKTPSRGKGRRVVVRETSTPAAPSNGAPSVGRGKGRGPGRGRQRSKGAVRGRATPVNRVSTGVGSRTRSRLAEQGRAFAQEEEEQVEEREEEEEEEEQGRAFAQVKEEQVEEQEEDEEEGEEEMEMEVEVEVRSDDNDHGNGGIRGEGGGTDDVAEIEEEELGTDEDETSDDSDENFSDEEGDEEELEEEEEEEEEDDDDDDDEEEEEPGVAPDQPGEAGEESPPRSRIMAMPLMGKRMFEGFSFLQQVDTSTGRDIRARTRSNFKRKKLLDKKLLKRGTFAKPYCIDVSSSGSEEDVPQPEQSAYGGDCGDDDGGSDGNEEHRAVKRRKLNRRQSAHSDSEEDTTFVCDVKEGSGSRRVQEGAPRRQVKKEGSNKKKDGSTPQCVRNNGPKVGRQTNGLNGQGGVSFKRNVKIAQRRKRRRATADQEKYGHLLDPMFDEIESNQYEPVPEEQIDRRLPLVFAFGDDDKLEEKSKHDKLQDEDELWKEFDFALESINVCSHNCEEGEKEDEQEIPADKAASCIQGKHELIIDEQIGLRCKHCNFVDLEIRFVLPSMVKSCTERDMRKDHELDLFFDDILTSAGYEGPRDFGGQKTGLVWDLVPGVREDMFPHQQEGFEFMWRKLAGGTSIEQLRNNANTIEGGCVISHAPGTGKTRLAITFVQSYFAFFPECCPVIIAPRGMLATWEQEFRKWKVKVPFHVLNSKEINWKEDRTIKQLAIMDENLAQSLARNKLDHKFRRKLKLASWRKGSSIIGVSYTLFRKLANQSSMDGNMVRNLLLEKPDLLVLDEGHTPRNKKSLIWKVLEEVRTKKRIILSGTPFQNSFLELSNVLYLIRPKFARHFASKSFKKIGLEDYWTSLTLNNITEKKIDEIRQILDPIVHIHNGDILQKSLPGLRESVVILNPLPHQKEIITAMENTVTMGTLDAEYKISLASIHPFLVTCAKLSEKETSSVDVSLLKSLRPNPCVGVKTKFVLEIVRLCEAMKERVLVFSQYLEPLSLIMDQLSKMFNWTEGEEILLMSGNVLVQNREALMEAFNNMKSNAKVMLASTKACCEGITLIGASRVVLLDVVWNPSVGRQAIGRAYRIGQEKIVYTYNLITEGTKEKDKYDRQAKKDHMSKLLFSKEPHAAGFNLSQEVIFNDKILEAMTSHRELKDMFVKILHSH

SEQ ID NO: 10776 - protein, 942 aa, Candida glabrata CBS 138
MARRRLPDRPPNGIGAGERPRLVPRPINVDESISKLTKPFKVPVKSQRSQTVPANSDLSRQRQLRQRSQTVSYAGLDVDSKDEVDGKENIYDELGERVIKKRRVDALSARRLMEDPTRLDTIEVTLKKSFHVPIKGYVQRHSLPLTLGTKVKVIPEPRPLHDPTDEFAIVLYDPSVDGEMIIQDDTETVQNVQSSEDQNAQEAEAEKSKYKHPKILSNGVKNKTLQELLGNSPFNPTESMKKKFANVPVVIDPKLAKILRPHQVEGVKFLYRCVTGLVMKDFLDQQLASQSSNINFLECSDDDVCSKEVSPIDGGGAHDNSEANNDEAGNAIQNAKKNVKSKKQKKTITKKQQSENDFLEALKKSQSNNRGAYGCIMADEMGLGKTLQCIALMWTLLRQGPQGKRLISKCIIVCPSSLVNNWANELVKWLGPNTLSPLAVDGKKSSLASGATSVAEAIKNWAQAQGRNIVKPVLIISYDTLRRNVKQLQNTEVGLLLADEGHRLKNGDSLTFTALDSINCPRRVILSGTPIQNDLSEYFALLNFSNPGLLGTRNEFRRNFEIPILRSRDADATDNDVKSGEQKLQLLSNIVSKFIIRRTNDILSKYLPCKYEHVIFVNLTPFQKQVYNMLIKSRDIKKVVKGDGGSQPLKAIGVLKKLCNHPDLIKLDEELDNYNDLDIPDDYSIPTGKSRDVQTQFSGKFAILERFLHKIKTESDDKIVLISNYTQTLDLIERMCRNRHYASVRLDGTMSINKRQKLVDRFNDPEGQEFIFLLSSKAGGCGINLIGANRLILMDPDWNPAADQQALARVWRDGQKKDCFIYRFISTGTIEEKIYQRQSMKMSLSSCVVDAKEDVERLFSVDNLRQLFQFNDKTICDTHETFQCKRCNKHGQQIMRAAAMLYGDATTWNHLNHKALEKTNDHLLKNEFYHNDISYAFQYISH

SEQ ID NO: 10777 - protein, 384 aa, Vibrio cholerae O1 biovar eltor str. N16961
MKKNAVHFGAGNIGRGFIGKLLADADIAVTFADVNEPLVDQLSHQQEYKVKVVGSECKMETVSHVTAVNSASEALIERIIKTDLVTTAVGPTVLDIIAKTIAKGLSARFAAGNTQPLNIIACENMVRGTTHLKQQVYQFLTTEEQQQADALVGFVDSAVDRIVPPLQAANDDPLEVTVESFSEWIVDEQQFKGEIPQIEGMEKTDNLMAFVERKLFTLNTGHCVTAYLGCLKGHRTIREAIEDPCIHAQVKQAMQESGEVLIRRYGFDRALHSAYIEKILSRFANPYLVDEVDRVGRQPLRKLSANDRLIKPLLGTIEYGLPNGMLLKGIAAALKYRNSSDPQAVELQQSIEKEGVRSTLARYTGLAAESVEAQQIEALYQQMD

SEQ ID NO: 10778 - protein, 196 aa, Chlamydomonas reinhardtii
MGSASGGRPYALVWTPIPIISWLMPFIGHLGVCASSGRTYDFAGPYTVNEDDLLFGRPMRRWVGASAVDTAPELVPEALQRCWDQRLAFAAATYRLMPYNLLTTNCHCFVAHFLNEVGYRGGGWHTVHLAALVCVSGRHVSLGALLYTWLPWLLLVTLGPYYGGTIFMWVYLGLCGTLTAWFFFYNYCIWRDLSFT

SEQ ID NO: 10779 - protein, 226 aa, Tsuga mertensiana
AKQAKAAGARIIVTQAAYVEKLADLQSDDVIVITIDSAPKDGCKDISVLTEADETQCPSVEIQPDDVVALPYSSGTTGLPKGVMLTHKGLVSSVAQQVDGENPNLYFHSEDVVMCVLPLFHIYSLNSVLLCALRAGAATLIMQKFNMTSFLELIQKYKVTVAPIVPPIVLEITRSPAISRYDVSSVRIIMSGAAPLGKELEDALRDRFPQAIFGQGYGMTEAGPVL

SEQ ID NO: 10780 - protein, 473 aa, Synechococcus elongatus PCC 7942
MPETAQEVLQLIQEKGIQLVDLKFIDMPGIWQHLTLHVSQIDENSFVEGVPFDGSSIRGWKAINESDMTMVPDPTTAWIDPFMKEPTLSMICTIYEPRTNTPYERCPRAIAQKAVDYLKASGIGDTAYFGPEAEFFIFDDVRFDQAENKSYYYVDSIEGRWNSGREEEGGNLGYKPRYKEGYFPVAPTDTSQDMRSEMLLTMADCGVPIEKHHHEVATGGQCELGFRFGKLIEAADWLMTYKYVIKNVGRRYGKTITFMPKPLFNDNGSGMHTHQSIWNDGQPLFAGDQYAGLSQMALWYIGGILKHAPALLALTNPTTNSYKRLVPGFEAPVNLAYSQGNRSASVRIPLSGTNPKAKRLEFRCPDATSNPYLAFAAMLCAGIDGIKNQIDPGEPLDVDIYDLSPEELAKIPSTPGSLKDALKALEADHDFLTVGGVFTEDFIQNWIEYKLDNEVIPISLRPHPYEFALYYDC

SEQ ID NO: 10781 - protein, 140 aa, Arabidopsis thaliana
MADTPSSPAGDGGESGGSVREQDRYLPIANISRIMKKALPPNGKIGKDAKDTVQECVSEFISFITSEASDKCQKEKRKTVNGDDLLWAMATLGFEDYLEPLKIYLARYRELEGDNKGSGKSGDGSNRDAGGGVSGEEMPV

SEQ ID NO: 10782 - protein, 296 aa, Yersinia pestis CO92
MSQKELWYETLHANFGQYFSVENVLFREKTEHQDLVIFENPELGRVMALDGVVQTTERDEFIYHEMMTHVPLLAHGQAKKVLIIGGGDGAMLREVSRHKNIEQITMVEIDAGVVEFCRQYLPNHSAGAYDDPRFKLVIDDGVNFVNQTTEKFDVIISDCTDPIGPGESLFTSVFYEGCARSLNEGGIFVAQNGVCFLQQDEAVNSHNKLSHYFSDVSFYQAAIPTYYGGIMTFAWATQNPALRQLDLATLQNRFAQAGLACRYYNPAIHVGSFALPQYLLDALTTIPKVIGVDSSE

SEQ ID NO: 10783 - protein, 469 aa, Blastopirellula marina DSM 3645
MTPKEVLALCREKDVKAVDFRFMDFPGMWQHTTIPVGKLVEDIFEDGLGFDGSSIRGWQAINESDMLIVPQADTAFIDPFCTLPTLVLICNIQDPITREDYSRDPRNVARKAVNYLRSTGIADRAFFGPEAEFFVFDDVRFDQNSHQGFYFLDSCEGEWNRGRDEGPNLGYKLRHKEGYFPVPPSDQMMDIRNEMMQTMIECGLDVECQHHEVATGGQCEIDLKFQEMVKMADQMLIYKYIVKNVAKKYGKTATFMPKPMFGDNGSGMHTHISFWKDDTLMAGSGYAGLSETALYMIGGILKHAPALLAFTNPTTNSYKRLVPGYEAPVNLAYSQRNRSASCRIPMYSPSPKAKRIEFRCPDPSCNPYLAFAALTMAAIDGIQNKLDPGDPLDKDIYDLPPEEMAAVPKTPGSLEDALVALQDDHDFLLKGDVFTQDVVDTWIHYKKKNEADAIRLRPHPYEFCMYYDI

SEQ ID NO: 10784 - protein, 343 aa, Physcomitrella patens subsp. patens
MVECLDKEINRVHVNGTSHQTPTPKTVDAEVEPRKRCLWFEEELEEDLRWVFGVSKILHTGVSEFQNIELVESGPFGKVLILDGKLQSAEADEFVYHESIVHPALLYHSNPKSVFIMGGGEGSTAREALRHRSVERVIMCDIDEAIVEFCRKHLTVNGEAFRSDRLELIINCARAELVKTTEKFDILIGDLADPVEGGPCYKLYTKSFYERVLKPRLKDGGILVTQGGPAGILSHTEVYSSIYNTLRKTFKYVIPYAAHVPSYADTWGWIMASDQPFPKISAEETDSRIKHRIDGELKFLDGEALFASIALNKHVRKSLAAERHVYTEESARFIHGHGTALKN

SEQ ID NO: 10785 - protein, 428 aa, Desulfovibrio vulgaris subsp. vulgaris str. Hildenborough
MRVTLWVVSLGLCAAVAFSGGAVFATTEESKYDALKRFSQVLDIVERYYVRDVPRKDLMNGAVKGMLQGLDPHSTFLSPEEFKEMQETTSGEFFGIGIEISSENGQLTVVSPIEDTPAFKAGLKAGDLILAVDGQPTQEMSTQEAVSRIRGPKGSEVELLILHREAKAPSTVKIVRDAIPLVSVKSKQLEQGYVWVRLTRFSERTTSDLLEALREANKRGPVKGVVLDLRNNPGGLLDQAVSVSDVFLRDGGIVSIRGRGDDTGREYNAKAQSTDVTAPMVVLINAGSASASEIVAGALRDQKRALLVGERSFGKGSVQNVIPLSDGAGLKLTVALYYTPNGRSIQAEGIDPDIEIPFEAPREDDAKPMQRFNMLREKDLSRHLENGAGGKQGKNDQSDEVRDLLERDNQLRMALQFVKRLPALKEIR

SEQ ID NO: 10786 - protein, 161 aa, Xanthomonas axonopodis pv. citri str. 306
MSDISTFAFTDLEGRTQSMRDYAGNVLLVVNVASKCGFTPQYAGLQALWQRYRERGLVVIGFPCDQFGHQEPGDAAQIRQFCSLDYAVDFPLAAKIDVNGNGAHPLWQWLKHEQRGVLGSEAIKWNFTKFLIGRDGRVLERYAPTTKPEALATEIERALDA

SEQ ID NO: 10787 - protein, 342 aa, Legionella pneumophila subsp. pneumophila str. Philadelphia 1
MFLPVIPVEEFDGFILKLGKNNYHFCKNETPFNNSCSANIAIDKYCTSKLLEKAGIPVPKAISLNCSEFQRNLHKDKIAQLNFPLVIKPIDGSLGIGVLCNIKTWEELESHLTKYFSSYQCLIIEEFHGKLNSYRVLVFNNRILGIVQRYPAAVTGDRVHPIHELIKQENLNRKRINEALGEITLDEEARIKLQELGITENYIPSFGEQIVLCYTSNATRGGSYVTINKKMCKQNRKLLLQAAKILDLQLVGIDVECSDIINIPIEQSNGVILEVNHKPSIRIHEFPMKGTPQKVTKKIMRSFITRHPLSYLYSIYNNQPTAFYVRSSILIIIMGLILLAVW

SEQ ID NO: 10788 - protein, 439 aa, Thiomicrospira crunogena XCL-2
MFFGAILGAMAVVGTTVWAEGDNADAGTETTKEVSVPLEELRAFVEVFDRISTDYVEPIEDKKLLEGAIDGMLSSLDPHSAYLPPKNYKRMEEHTTGQFGGLGMEVGMEDGFVKVVSPIDDTPAQKAGVKAGDLIIKLDEHPVKGKSLAEAVKIMRGKPGSKITLTIVRDGVDKPIVMVLTRAIIKVKSVKEQLLKDGMGYVRISQFQLRTGEDLIKSIKALEKKNKKPLNGLVLDLRNNPGGVLRAAVQVSDAFLNDGLIVYTKGRVKNSEMRFEAEEGDVLNGKPIVVLINEGSASASEIVSGALQDQKRALIAGRTSFGKGSVQTLIPLNNGGAIKVTTARYFTPSGRSIQAEGIVPDIKIDQVKIEKLKAADFTRIKEKDLSGHLDNEDDKIQAEKVVQKADKALEELLANDYELHEALSLLKGMYFTQQMRGHE

SEQ ID NO: 10789 - protein, 344 aa, Erwinia pyrifoliae
  misc_feature (2)..(2): Xaa can be any naturally occurring amino acid
  misc_feature (25)..(26): Xaa can be any naturally occurring amino acid
  misc_feature (29)..(29): Xaa can be any naturally occurring amino acid
MXSIVGLNQRSHRTKQFLCKTGHTXXHVXKHRRRIIVTLARQNMAAEQQGSPLFQRGLYLRIQLIAQIVTRHRADPGAGFARVAYFHLFDGTDELIPERVEHRRFNNDALRGNTQLTVIHKAARNRPFYRSINIRISQHDKGIRTAQLQHAFFYRCTGQGCNRRTGAHAAGHGHGSNTPIVNRLRHAVIIRIHHRKKPFRHADTGQDLLQQQRTSHHIRCRFQQVAVTGQQDRYRAAQHLPDGEVPRHHRQNRTQRQIVDKGFVTLDQGRLTLKESRAMPSVPFAQSGTFLDFGQPLIDRLAHFTGHHLRQLSRLLTQGVRNVAQQLNAIAHCAVTPVLKCTIG

SEQ ID NO: 10790 - protein, 778 aa, Clostridium perfringens SM101
MVNLDNGLLKIIKDESLEDYFIKANFGLEKENVRVTERGNLALTPHPKAFGDRENNPYIKTDFSESQLEMVTPICNTLEEVYSFICNLNKVVSLEIMKNGEFLWPQSNPPILPREEEIPIAKLSNREDELYRENLSYKYGKKKQVISGIHYNFSFKEEFIKLLYKELKVKKDFREFKDDIYLRMARNFQKYHWLLIYLTGASPVFHESYIDEIKEEGEKLGEDSYYIKDDTSLRNSSYGYKNKKDYYVSYNSIEEYASDIKNLVKDKEIQSIKEYYNPIRLKSLGSEDMLESLLNKGIDYLEVRLLDLDPLSVQGVNKETLYLVHLFMIYTLLKENKEITYKDQEEFFKNHDMVALKGRNEEAVIHENGIPVLLKDKGREILSEMDEIVEILFSNNEKFKNVIKRALEKINNPHDTISEKLIKDIKEEGYINFHMRLAKEYLNNFKNKEFNLVGYEDLELSTQILILDAIKRGIEFNMMDRLENFISLSDGEKVEYVKQATKTSKDSYITALIMENKLVTKDILRENNIRVPKGKDYENIDEAKKDFRLFKDEKIVIKPKSTNFGLGISIFPGEYSREDYDKAVEIAFREDSSILIEEFMTGKEYRFLVIGEEVVGILHREPANVIGNGESTIEELVFEKNKDPLRGKGYKTPLEKIKLGEIEEMFLKNQGLSFKSIPKNGEKIYLRENSNISTGGDSIDFTDKIHPSYKDVALKSAKAVKALICGVDMVIDDIEEEAKEKNHGIIELNFNPAIHIHCFPYKGENRKAGEKILDLLFN

SEQ ID NO: 10791 - protein, 175 aa, Vitis vinifera
  misc_feature (156)..(156): Xaa can be any naturally occurring amino acid
MVDDIGTNABRDYDHKYNYAGGSSVSAEDGIIKEQDRLLPIANVGRIMKQILPPNAKISKEAKETMQECVSEFISFVTGEASDKCHKEKRKTVNGDDICWALGTLGFDDYAEPLKRYLHRYRELEGEKANQSKASEENDEPSNYRGEPPMKHTVSXAPLKFNVLERSNSSLSKRL

SEQ ID NO: 10792 - protein, 954 aa, Mycobacterium tuberculosis CDC1551
MLLPSLRSAPLDSPELIRLAPRPAARTDPMLLAWTVPVVDLDPTAALAAFDQPAPDVRYGASVDYLAELAVFARELVERGRVLPQLRRDTHGAAACWRPVLQGRDVVAMTSLVSAMPPVCRAEVGGHDPHELATSALDAMVDAAVRAALSPMDLLPPRRGRSKRHRAVEAWLTALTCPDGRFDAEPDELDALAEALRPWDDVGIGTVGPARATFRLSEVETENEETPAGSLWRLEFLLQSTQDPSLLVPAEQAWNDDGSLRRWLDRPQELLLTELGRASRIFPELVPALRTACPSGLELDADGAYRFLSGTAAVLDEAGFGVLLPSWWDRRRKLGLVLSAYTPVDGVVGKASKFGREQLVEFRWELAVGDDPLSEEEIAALTETKSPLIRLRGQWVALDTEQLRRGLEFLERKPTGRKTTAEILALAASHPDDVDTPLEVTAVRADGWLGDLLAGAAAASLQPLDPPDGFTATLRPYQQRGLAWLAFLSSLGLGSCLADDMGLGKTVQLLALETLESVQRHQDRGVGPTLLLCPMSLVGNWQQEAARFAPNLRVYAHHGGARLHGEALRDHLERTDLVVSTYTTATRDIDELAEYEWNRVVLDEAQAVKNSLSRAAKAVRRLRAAHRVALTGTPMENRLAELWSIMDFLNPGLLGSSERFRTRYAIPIERHGHTEPAERLRASTRPYILRRLKTDPAIIDDLPEKIEIKQYCQLTTEQASLYQAVVADMMEKIENTEGIERRGNVLAAMAKLKQVCNHPAQLLHDRSPVGRRSGKVIRLEEILEEILAEGDRVLCFTQFTEFAELLVPHLAARFGRAARDIAYLHGGTPRKRRDEMVARFQSGDGPPIFLLSLKAGGTGLNLTAANHVVHLDRWWNPAVENQATDRAFRIGQRRTVQVRKFICTGTLEEKIDEMIEEKKALADLVVTDGEGWLTELSTRDLREVFALSEGAVGE

SEQ ID NO: 10793 - protein, 78 aa, Gossypium barbadense; identical to SEQ ID NO: 571

SEQ ID NO: 10794 - protein, 389 aa, Schizosaccharomyces pombe
MGGIGKKRVKKRTHLKADPIQEAAIPKSMVIRSGASEVGRSLSLLTRDLRHMMEPHTAIRLKERKANKIKDYLTMAGPLGVTHLLVLSRTDNNANLRIIRAPRGPSLHFRIHEYMLNKDVRRLQKNPKSPTTEFLTPPLLVMNHFNQNSSKDSPHEALLTTTFQNMFPPISVQHTNINSVKRVLLLNRRDDGYIDLRHFIISTKPVGISRPIRHLLKGEKKDSDIPDLHNVRDISDYVLHGDGISGAASDSEIEEDATVEIDRPVPTKTEENLLSASQLLKPKQQAIKLIEIGPRMTLELIKITEDAMGGKVLYHSHVHKSKEEIKQQDNFHEQSRALKEKRKKEQDENVRRKRENKKRRKDQKKEGITSSNKNDDSGNEGSSAYSDTE

SEQ ID NO: 10795 - protein, 495 aa, Haemophilus somnus 2336
MKKLTALWDIDEQLDSVHRDIELQEMILDSRLAKTGCLFVAIKGHRVDGREFIMQAIQNGASAVLFETDLVEQHLTVSFEQNIPLIAYYELSKHLSHIADRFYSSPSQRLTLVGVTGTNGKTTIAQLLAQWTQILGHTSAVMGTIGNGLFGQIKEASNTTGSAIEIQSSLDKFIRQGADFAAIEVSSHGLVQHRVEALTFRAGIFTNLSRDHLDYHHTMENYAQAKKRLFSELNCQHKILNVDDEIGATWLIELSKDDPDVVAVSCRADYQPDTKNWLKATALSFHSKGTTIEFASSWGNGILSSPLIGGFNVSNLLLVLATLLSLGYDIDKLLATVRQLTGVCGRMEMLSAKHKATVIVDYAHTPDALENALQSAAVHCQGKLWCIFGCGGDRDRGKRPLMAAIAEKFADSVIVTDDNPRTENPEQIMQDILTGFQQSSAVQIIHQREQAIKTALQSAVENDVVLIAGKGHENYQIIGTTKYHFSDQEIVKKYF

SEQ ID NO: 10796 - protein, 801 aa, Physcomitrella patens subsp. patens
MDERTNEQVNEYADVRMNTWMGRWMDGWKEEGIIGKGGEWLGGDRAGEVVIWPSLGSSLLWSLNRSFLCNCRTMSLCVPEWDRNNDMLDVVIPSNDFHGPVNWKGEDVRSMKIHFSQLALAPVPDQDTLGVGWNDNEHVGMHGQGCKGNKSQWDVNYSSGWNSGQETEDGVTPCKPDTPKTGASPEAVANETATEPHPPHNIDVDSDEMVSWLQYPLDDTLERNYCSDFFGELPDANTQLLKESFAHGSTKISPRISFSGASGLDGGSNRGTTADAAMLLGAGRAAGFFPQAGVEAFSKVRTIHSPQQHSSLPRWPQPHNPNSPNGSSECATSYLTSAKVSTSTSASPSSPMLPPRMLLGSPIPNSSNTPQASRPGSMNFSHFSRPAAMVKANLHSLAGMNCTPPPCGRFKQQQGLPGCRPIIEACTSTESSIAESTTTGQGPLVSHQEVKTQPAVLEREQINNVEESRWPSAPGLSPTKDRDCVVSGGDCKSLTPDQETCRLSGVTNGAVLASSEKGASHCTQHLDIQEPTITSSSGRYATSAEPPKEPVTGTKRKSSEREEPECQSEDMEDESVDTKQKPATTGRVSTTKRSRAAEVHNQSERRRRDRINEKMRALQELIPNSNKTDKASMLDEAIEYLKMLQLQLQMMSIRTGMTLPPMVMPPGLQHMQMPQMGAIPSMGMVQMGLGMGMMDMAAQGRAVMSMQSHAGPSLNGNMASTSSMIDPHDLRYQQPGDMDFNTYTAHQHQSMPMTQALNTDKYNAYMLQQHQFILQQQQQHLHQQPQQHHQQAPNMSGVPPH

SEQ ID NO: 10797 - protein, 962 aa, Streptomyces avermitilis MA-4680
MTGRMGDGVVPGGAARAAGAVAVRPGVVVDASVPVRLAAVFLPAPLPRQGRVAFWDPAGGPLPPLPGTPLSDEELTVVRPHGAGVRRGTVPAVSLPLDAALPLLARSRRDPAAHPATACWGAAALHALRLVARGRLLPGLTADGLDAWRAGPLDPEDIAHLRAVAAALPYEGHAVPLPGPGPLRLPEPEALMRSFLDAVADTLPRTPAAAYTSGKPFAAREPQRLPGAHDWAAEVAAGMDAGVRVSLRLDLSAYQLFDDGEGARRAGAAVVQVHSLADPTLVVDAAALWAGEADATFGPRARVDAALAVRRAARVWPPLDRLAEQDVPDVLALSEQELSELLGVAATRLGAAGVAVHWPRDLAHDLTAAAVVRPAPGSATDGTGFFESEELLQFRWQLALGGDPLTEAEMDTLAEAHRPVVRLRDQWVLVDPALVRKARKRELGLLDPVDALSAALTGSTEVDGETVEAVPAGALAVLRDRLTAGVRPAEPPEGLQARLRDYQLRGLAWLDLMTSLGLGGCLADDMGLGKTVTVIALHLRRARSEPTLVVCPASLLGNWQREIIRFAPGVPVRRYHGPDRSLEDLDGGFVLTTYGTMRSAAPRFAEQKWGMVVADEAQHVKNPYSATAKALRTIPTPARVALTGTPVENNLSELWALLDWTTPGLLGPLKSFRARHARAVENGEDEEAVERLARLVRPFLLRRKKSDPGIVPELPPKTETDHPVPLTREQASLYEAVVRESMLAIETAEGIGRRGLVLKLLTSLKQICDHPALYLKEDAGGTAGLAARSGKLALLDELLDTLLSEDGSALVFTQYVGMARLITAHLASRAVPVELLHGGTPVPERERMVDRFQSGTTPVLVLSLKAAGTGLNLTRAGHVVHFDRWWNPAVEEQATDRAYRIGQTQPVQVHRLITEGTVEDRIAEMLEAKRALADAILGSGESSLTELTDRDLSDLVSLRRPT

SEQ ID NO: 10798 - protein, 472 aa, Haemophilus influenzae R2866
MPNANAIANVFKLIEENNVKFVLLRFTDIKGKEHGVSIPVSLVDEEMFEDGKMFDGSSVEGWKTINKADMLLMPMAETAVVDPFAQIPTLSIRCSVYEPTTMQSYDRDPRSIAIRAENYMRSTGIADQAFFGPEPEFFLFDDVRFNVSMNKASFSIDDIEAAWNTNKKYEEGNNAYRPLKKGGYCAVAPIDSAHDIRSEMCLILEEMGLVIEAHHHEVATAGQNEIATKFNTLTLKADETQIYKHVVQNVALEHGKTACFMPKPITGDNGSGMHCNMSLSKDGKNIFQGDKYAGLSETALYYIGGIIKHAKALNAFTNPSTNSYKRLVPGYEAPVLLAYSASNRSASIRIPAVTNPKAIRVEARFPDPLANPYLAFAALLMAGLDGVVNKIHPGDAMDKNLYDLPPEELKDIPAVASSLEEALNSLEKDYEFLTQGGVFAKDFIDAFISIKRKEVERLNMAPHPVEFEMYYA

SEQ ID NO: 10799 - protein, 273 aa, Thermoplasma acidophilum DSM 1728
MKLIENWFSERYSDNLQLSFRVSDQLLSIKTDYQRIDLFDTYDFGKLLAIDGTVQLTERDEFIYHELITMVPYHLTPRPPENALIIGGGDGGAARRLIDLGLKHIVNVEIDDQVVEVSKRFFPSLSSAFNDSHVKLLIQDGIKYVKNTSEKFDLIIIDSTDPEGPAEGLFSKDFYNDTRKIMNEGAVIVSQSGSPFYQPKAIKLAYSGMREVFSDVRVYTGFIPTYPSGFWSFTVASPWTMKPRPVNMSGKYFNADVMEGSFRLPQFVKELIT

SEQ ID NO: 10800 - protein, 333 aa, Picea sitchensis
MAHKCLEPSFLVHNPVLWDDEDALNRNYNYNYYTDLWGGLPLSSSAATTARTSAEDSRPEVVAVSEALESDYGRLNNNNNNNVSADTQLSCETAATSSSGGSMSSPSNGNKVIKSSKKKVLMGTKDIECQSQKAQEDSGENFKQCSTGTSSSKRSRAAEVHNLSEKRRRNRINEKMKALQNLIPNSNKTDKASMLDEAIEYLKKLQLQVQMLSARSGIDISSMRWLAQMPHLQIQQMPKACMTTDQHAGVSISMPVGSGLMNTNQGSEKRPLPLHDLYISGALGNTAIPINLSSARIDDHQSCKMDRPQGHFTLPQLPTTTQEVHSALSLQEK

SEQ ID NO: 10801 - protein, 1364 aa, Oryza sativa Japonica Group
MAQQAPVKPPAAAEEAPSRRRKRKGAASAEAGGGGPSKRRVRSSGSAGGRGARKRKEAEADEEEAEAEAEEEAEAEAGTPARGESMEVSQVDGGGSSGRADDASHNGNGESRVCNADGIDQASEERPSVAGGDLIEEEHYGNGEASVAGGDRIEEHCGNVEASVANSNRDGGEIIAGEGTEDRGNTELSVVDPVNEELASDEDDYDDEMLEEKLVGDVIRAYSNGADLDTNGVDWEAEDEMEFADLDTNVVDWEAEDEMEFDDDNDNDADDDGDNFGGDADEGDKSVQMHDFSKVETQDLVSHNVNVSEVRPHEDEEAIKDEMESKGKGSLSFNEGSSYIEILDSDEEVKVVNDTGNALRRKPLVPAKLPIVPSCVAWRTRSSWGMKEERISYNTYFEVLSDEPKEDDDDTEVELDDEEDDENDDDCNSASCDEEDEEEEEEREEEEEEAQRRKQKKGIDSSDDEMIDDAVDCGIDWEEDYPEVDFTRPLTFQKDGSEAPVGSEAFTEQQKRSRFTWELERRKKLKLGMMTNHRLYERDLESDSNSSDSSQNRKNGCQGSGDHRTGRKRKNPLSKSGKKSSRMLKRQSLMKLLMDKMCSNDDGKSTPFDQKPQIEYSFKDLHPLVFSFGDDDPSPTDRSEQDAALDMLWADLDFTLESENIGTYYDDEGQEDSLLDHALAPITPCSRGKHEFIIDEQIGIRCKYCSLVNLEIRFILPLLASNFAEKPAWRNSSCLKTALMCPDLYEQTGTGDGQSQDFHINGTVWDLIPGVITDMYQHQREAFEFMWTNLVGDIRLNEIKHGAKPDVVGGCVICHAPGTGKTRLAIVFIQTYMKVFPDCRPVIIAPRGMLFAWEQEFKKWNVNVPFHIMNTTDYSGKEDRDICRLIKKEHRTEKLTRLVKLFSWNRGHGVLGISYGLYMKLTSEKVGCTGENKVRTILLENPGLLVLDEGHTPRNERSVIWKTLGKVKTEKRIILSGTPFQNNFLELYNILCLVRPRFGEMFLTKTRVGRRHCVSKKQRDKFSDKYEKGVWASLTSNVTDDNAEKVRSILKPFVHIHNGTILRTLPGLRECVIVLKPLPLQKSIIRKVENVGSGNNFEHEYVISLASTHPSLVNAINMTEEEASLIDKPMLERLRSNPYEGVKTRFVMEVVRLCEALKEKVLIFSQFIQPLELIKEHLRKIFKWREGKEILQMDGKILPRYRQNSIEVFNNPDSDARVLLASTRACCEGISLTGASRVVLLDVVWNPAVGRQAISRAFRIGQKKFVYTYNLITYGTGEGDKYDRQAEKDHLSKLVFSTEDEFSNVRNMLSKAEMEHCSKLISEDKVLEEMTSHDQLKGMFLKIHYPPTESNIVFTYNQIAPELS

SEQ ID NO: 10802 - protein, 106 aa, Glycine max
LRPGGVFSAPADSLWHKNFVVADTIANCKKIFKGSVNYAWTTVPTYASGVIGFMLCSTEGPPVNFKHPINKLNPEKNGVAKGPTKFYNPEIHAAAFCLPSFVDKVD

SEQ ID NO: 10803 - protein, 452 aa, Geobacillus kaustophilus HTA426
MSKSFVSSTQTGLLEQIKETIQQKNVELLHLQFVDIEGILKHVTVTAEQLDDVVEGKIMFDGSSIKGFSPINRSDLYLLPDLNTFAVLPWTVEEGYAEARFLCSVTNPDGTLFEGDPRNVLKKTVERAAEKGYAISVGPELEFFLFKADENGNPTLELHDGGGYFEPSPKDLGERVRLEIYRALKAMGFTIEASHHEVAEGQHEINFKYADALGAADNATTYKWVVKTIASKFGLHATFMPKPVFGINGSGMHVNISLFKDGENAFFDPNDANQLSETAYQFIAGLLKNVKHFAAVTNPLVNSYKRLVPGYEAPCYIAWSASNRSALIRIPAKRGVATRVELRCPDPSANPYLAYAIIAAAGLDGVEKGLTAPAPIDEDIFHMSEERRAELGIDNLPENLGEAIAAFESGDIGRATLGEHVFNEYVAMKKDEWNSYRTAVHAWEVERYQGKF

SEQ ID NO: 10804 - protein, 1136 aa, Oryza sativa
PATLDTHAPHAAALCLCLGLGLRLPRRGHAMAAAGRDPPATPSSRMYYCRQRKASSEVNANVFVPGGQNGISFPASNRAHDWGYGGVREEWEASYARKLQLINFLSSLHQRTANSLITTRMDANMDTPLEQKQKDSSAIIVLDSDDEDEAERCEQLASENNKQQAPSGPTSPCTTWIVSSAKDQVNGTLHVDGVQSTQIVPYGQNAPLINQSPLQTSWQPSIQYERVILQRRPEEQRVQDLVAASHAEKIAETQVFLTLPTLPNERKRRKSEPTTLVDGDGGTNLGKGKRKNHQNQAAVDSILDLQQTVVPLQQNDVPSQSYRTMIEEEKPVKESDGLEDLWKDFSLAAECTKLDTNEDMSNEKDVDDENEMDDDCNHDIRIHEDLGHVCRICGMIVRKAETIIDYQWKKKNLLWGIFSLLKYFLKWESVFITNYIDIDTALEYIASRTRTNYYESRSKDADDIDTGAVKVSEDFIVSDIAIHPRHAKQMRPHQLEGFSFLVKNLVGDKPGGCILAHAPGSGKTFMLISFIQSFLAKYPSARPLVVLPKGILGTWKREFQRWQVEDIPLYDFYSVKADKRTEQLEVLKSWEARMSILFLGYKQFSRIICGDGDGNIAAACRDRLLMVPNLLILDEGHTPRNRETDVLASLKRVQTPRKVVLSGTLFQNHVSEVFNILDLVRPKFLKMESSRPIARRIMSQVAISGIRSLKGVHDSAFTESVEDTLLNDDNFTRKSHVIRSLRELTKDVLHYYKGDILDELPGLVDFSVFLKLSTKQKEIVHKIEAYEKFKRSAVGTALYIHPCLSEISEGDAADRATNLTDATVDSLIESIIIKDGVKAKFFFNILSLANSAGEKLLAFSQYILPMKFLERLLVKRLGWHVGKEIFMISGDTSADDREVAMDQFNNSADAKVLFGSIKACGEGISLVGASRVIILDVHLNPSVTRQAIGRAFRPGQQKKVFVYRLVAADSPEVKFHETAFKKEVIPKLWFEWSELCTTEDFKLNQVDIDDSEDELLEANAIRQDIKALYRRVGKGLSAAAAASKRRWTLALAAKKVVGRKLGGPKKPVPRSVKAGLQFLVSRYLENGRHAQRVGTGTPVYLAAVLGVAVAAAARRREGSSSSAGTPMAVAATAARW

SEQ ID NO: 10805 - protein, 215 aa, Arabidopsis thaliana
MTEESPEEDHGSPGVAETNPGSPSSKTNNNNNNNKEQDRFLPIANVGRIMKKVLPGNGKISKDAKETVQECVSEFISFVTGEASDKCQREKRKTINGDDIIWAITTLGFEDYVAPLKVYLCKYRDTEGEKVNSPKQQQQRQQQQQIQQQNHHNYQFQEQDQNNNNMSCTSYISHHHPSPFLPVDHQPFPNIAFSPKSLQKQFPQQHDNNIDSIHW

SEQ ID NO: 10806 - protein, 92 aa, Arabidopsis thaliana
MASSMLSSATMVASPAQATMVAPFNGLKSSAAFPATRTANNDITSITINSGRVHCMHVWPPIGKKKFETLTHHPDLTDSDLAIEVNYIIRIN

SEQ ID NO: 10807 - protein, 695 aa, Haemophilus influenzae Rd KW20
MVMKFKMSKNVICYTWLSVCLSSAIPAFAVQPTLKPSDISIPAISEESQLATKRATTRLTQSHYRKIKLDDDFSEKIFDRYIKNLDFNHNTFLQSDIDELRQKYGTKLDEQLNQGDLSAAFDIYDVMMKRRYERYTYALSLLDKEPDLNGQDQIEIDREKAAAPQTEADANKLWDARVKNDIINLKLKDKKWSEIKAKLTKRYNLAIRRLTQTKADDIVQIYLNAFAREIDPHTSYLSPRTAKSFNESINLSLEGIGTTLQSEDDEISIKSLVPGAPAERSKKLHPGDKIIGVGQATGDIEDVVGWRLEDLVEKIKGKKGTKVRLEIEPAKGGKSRIITLVRDKVRIEDQAAKLTFEKVSGKNIAVIKIPSFYIGLTEDVKKLLVKLENQKAEALIVDLRENGGGALTEAVALSGLFITDGPVVQVRDAYQRIRVHEDDDATQQYKGLLFVMINRYSASASEIFAAAMQDYRRGIIIGQNTFGKGTVQQSRSLNFIYDLDQSPLGVLQYTIQKFYRVNGGSTQLKGVAADINFPEIIDAKEYGEDKEDNALAWDKIPSASYMEVGNINYIDNAVNILNEKHLARIAKDPEFVALNEELKVRNERRDRKFLSLNYKMRKAENDKDDARRLKDLNERFKREGKKALKDIDDLPKDYEAPDFFLKEAEKIAADFVIFNSDQKINQANGLSEAKTESKK

SEQ ID NO: 10808 - protein, 240 aa, Saccharomyces cerevisiae
MSTFIFPGDSFPVDPTTPVKLGPGIYCDPNTQEIRPVNTGVLHVSAKGKSGVQTAYIDYSSKRYIPSVNDFVIGVIIGTFSDSYKVSLQNFSSSVSLSYMAFPNASKKNRPTLQVGDLVYARVCTAEKELEAEIECFDSTTGRDAGFGILEDGMIIDVNLNFARQLLFNNDFPLLKVLAAHTKFEVAIGLNGKIWVKCEELSNTLACYRTIMECCQKNDTAAFKDIAKRQFKEILTVKEE

SEQ ID NO: 10809 - protein, 687 aa, Microcoleus chthonoplastes PCC 7420
MNSVHHPLLTAEIEILVLLLVACLGAVTFKRLHFPYTVGLVIIGFIFGLLTQTGLPLETLNALTLSPELILYAFVPPLIFESAINLDNRVLLKTLTPALILAGPGLLVSVVIVGGTLSWLTPLSLGGALLFGTLISATDPVAVISLFKEFGVPKRLTMLVEGESMLNDATAIVMFDLVIAAIAAQEFGVDTVEQGSVNVFVVLGGGLLVGAVTASIMDYAIAQARRNPLIQTTVTVVVAYAAFIVADHFFHVSGVISVMMAGLVVGRYMNHSLTPEVRRYLHEFWEYAAFITNSLIFLLVGINTAGFTFRIEIGSVGLWQSVAWAIVAAIVARAVVVFGLTPISNWLQRKTEPIGWRFQVVTFWGGLRGAVALALALSLPGTFPNRELIIAMTLGVALFTILVSGSTMGTVIHRLKLDEPPIFDSLGKVQATVLAKREVLRFLHKLNEVDLFEEEVIQDLRQDYEQALLRAETEVKAIWEDLKANPELVQVFWLQGLAIEQQTYQDLYDQGLLSESVLRKLNLIIEAKRDDVLENKIPPKIPSMWVLKTPLETLAMKYLQHFAVGRRWCNQRRLWRLKVRYEYYAATAYVCRKVAQRIYDLEEEQAVDPLIAGDFIQFYQSKSERAFHQLSVMGTNRHELAIALQTQVANHVVHISEEEVFEKLVSEGIVSESALDDIRALIEMESR

SEQ ID NO: 10810 - protein, 200 aa, Arabidopsis thaliana
MEDALMALEFIKNIHDMMVNKMVDSLVTSETGTTDRISLEKNGIALGFFPGEVSSDRISAIEEAYKSMASALSEADGIDYTDPEELELLVTTLIDLDAMDGKSSASLLAECSSSPDVNTRKALANALAAAPSMWTLGNAGMGALQRLAEDSNPAIAAAASRAINALKKQWEVEEGDSLRFMMNFERPNDDDDVDSDLDEI

SEQ ID NO: 10811 - protein, 122 aa, Arabidopsis thaliana
  misc_feature (58)..(58): Xaa can be any naturally occurring amino acid
MASSMLSSATMVASPAQATMVAPFNGLKSSAAFPATRKANNDITSITSNGGRVNCMQXVWPPIGKKKFETLSYLPDLTDSELAKEVDYLIRNKWNSFVLNSELEHGIFCTREQRVNLTPGYL

SEQ ID NO: 10812 - protein, 1307 aa, Ceratodon purpureus; identical to SEQ ID NO: 7216

SEQ ID NO: 10813 - protein, 258 aa, Oryza sativa Japonica Group
MESRPGGTNLVEPRGQGALPSGIPIQQPWWTTSAGVGAVSPAVVAPGSGAGISLSGRDGGGDDAAEESSDDSRRSGETKDGSTDQEKHHATSQMTALASDYLTPFSQLELNQPIASAAYQYPDSYYMGMVGPYGPQAMSAQTHFQLPGLTHSRMPLPLEISEEPVYVNAKQYHGILRRRQSRAKAELEKKVVKSRKPYLHESRHQHAMRRARGTGGRFLNTKKNEDGAPSEKAEPNKGEQNSGYRRIPPDLQLLQKET

SEQ ID NO: 10814 - protein, 649 aa, Volvox carteri f. nagariensis
MGREAPAIGIDLGTTYSCVGVWQNDRVEIIANDQGNRTTPSYVAFTDSERLIGDAAKNQVAMNPRNTVFDAKRLIGRKFSDPIVQADIKLWPFGVRAGAGDVPEIVVTYKGEEKVFKAEEISSMVLIKMKETAQAYLGADREVKKAVITVPAYFNDSQRQATKDAGMIAGLEVLRIINEPTAAAIAYGLDKKDSGLGERNVLIFDLGGGTFDVSLLTIEEGIFEVKATAGDTHLGGEDFDERLVNHFANEFQRKYKKDMKTSPRALRRLRTACERAKRTLSSAAQTTIELDSLFEGIDFATSITRARFEELCMDLFRKCMDPVEKCLRDAKMDKSTVHDVVLVGGSTRIPKVQQLLQDFFNGKELNKSINPDEAVAYGAAVQAAILTGEGGEKVQDLLLLDVTPLSLGLETAGGVMTVLISRNTTIPTKKEQVFSTYSDNQPGVLIQVYEGERARTKDNNLLGKFELTGIPPAPRGVPQINVIFDIDANGILNVSAEDKTTGNKNKITITNDKGRLSKEEIERMVQEAEKYKADDEQLKKKVEAKNSLENYAYNMRNTIREDKVASQLSASDKETMEKALTGAMDWLERNQMAEVEEFEHQLKELENVCNPIITRLYQGGAGGMPGGPAPGAGASSGGSGAGPKIEEVD

SEQ ID NO: 10815 - protein, 561 aa, Populus trichocarpa
MDDRGHMELVWENGQVLMRVLPSTSSSCTSYTPHPKKNVSEVENNSDGYTTKRPRLGTGDSILGDFPLIDDRELAKRDKSSQDDHHPELFSELCETNLNMLLENNENNIYEKNITDAHVVPGYKDANWRPGKASEFAAEVPQLTTASNGQLYQSFLEQHKASAPLFHGLPTSKLQQVDSGSDNHSRLQNLSRILRPALPKPSHGSNTTRPTSGPGSSRLQQLKSNTDEPPAGCRNLVESGQMVPTYASKVFKYFNDQQYLMASQIVPIGPIDRSAEASPPDEQSEAVLHNYATTSKRCCDRVFGSTSGSAEKKIKGKPDRGKSIDQLTATSSICSRGASNDPTSSLERQYEDTEGTAYSSDDLEEEEQVPARGSAGSKRRRATEIHNLSERKRRDRINKKMRALQDLIPNSNKVDKASMLGEAIDYLKSLQLQVQMMSMGTRLCMPLMMLPTGMQHIHAPLLAQFSPMGVGMDTRLMQMGVGCSPATFPASGMFGLPAGQMLPMSVSQAPFFPLNIGGHSTHSSVPMPAMSGVASTPLEFMRSAVFPSSKDIIHSNTSARK

SEQ ID NO: 10816 - protein, 451 aa, Thiomicrospira crunogena XCL-2
MNHDIESKKQALKDMGVKYCLGAYVDIHGIPKGKFVPIDHLGHMLEGSELYTGYALDGLGQMPNEDEIASVPDLDSLIQLPWQPEVAWMAADNTLHGEPYEINTRVALKKVLAEAEEMGFGFNLGIECELFVLKEEEDGSLSVPDRDDKLIKPCYDVRSFMNRFTWLDKMSTTINDLGWDLYSLDHEDANGQYEFDFQYSDALTMCDRFIFFRYMAKHYAQEEGLLATLMPKPFADKTGNGAHFNMSLFDKETGKNVFACDPKDDPRGLGLTELGYQFIAGVLKHGPALCAVFSPTVNSYKRLIRQGAMSTFSWAPVFNSFGSNNRTNSVRVPLGGGRFESRNADGSVNPYLASALVLAAGLEGIKEKLDPGLPQEENLYELSESERMEKGIEFLPQNLGEAVRAFADDPFVEKVLGKGLSDEFIKYKSQEWEEYHRTVSAWEIERYSHLF

SEQ ID NO: 10817 - protein, 443 aa, Silicibacter pomeroyi DSS-3
MKKVVLAGLAGTLAGIIATTQIAGPLVAQEAKANSNVYEQLDLFGDIFERIRAQYVEEVDAGELIEAAIDGMLTSLDPHSSYLSPDDAAQMRVQTRGEFGGLGIEVTQEEGFVKVVSPIDGTPADEAGIEAGDFITHVDGESVLGLTLDKAVDLMRGPVGSEIVITVVREGEDEPFDVSIIRDTIKLTAVRARTEGTSVVLRVTTFNDQTYSNLEDGLAKQVEAAGGIDKINGFVLDLRNNPGGLLTQAIKVSDAFLDSGEIVSTRGRNPEDGERFNATLGDLAQGKPVVVLINGGSASASEIVAGALQDHRRAIVVGTKSFGKGSVQTVMPLRGDGAMRLTTARYYTPSGRSIQALGVSPDIVVEQPRRRPEAEEERVTPRSRSEADLRGRLNNDSLSEDEIRQIEEDRAKAEATAELRQEDYQLAYAIDILKGLSAFAPAD

SEQ ID NO: 10818 - protein, 187 aa, Arabidopsis thaliana; identical to SEQ ID NO: 603

SEQ ID NO: 10819 - protein, 616 aa, Glycine max
MDKEVELGSLEGEMATQHISQPQKRKGGLVTMPFIIANEALARVASLGLLPNMILYLMGTYRLHLAQATQILLWSHATSNFTPVVGAFIADSYLGRFLAVGLGSAITFLGMTLLWLTAMIPQARPPTCSSNKAGGCKSATGGQMAILISALALMSVGNGGLSCSLAFGADQVNRKDNPNNRRVLEIFFSWYYASAAISVIIALTGIVYIQDHLGWKVGYGVPAALMLLSTVSFLLASPLYVKNKVESSLFTGFVQVIVVAYKNRKLPLPPNNSPEHYHHKKESDLVVPTDKLSFLNRACVIKDREQEIASDGSASNPWKLCTVDQVEELKAIIKVIPLWSTGIMMSVNIGGSFGLLQAKSLDRHITSHFQVPPGSFSVVMVLTIFLWIALYDRAILPLASKIRGKPVRISAKRRMGLGLFFSFIHLVTSAIVESVRRRRAIKEGYLNNANGVLHMSAMWLFPQLCLGGIAEAFNAIGQNEFYYTEFPRTMSSVAASLSGLGMAAGNLVSSFVFSVVQNATSRGGKEGWVLDNINKGRYDKYYWVISGLSALNIVYYLICSWAYGPTVEQVQVRKLGEENGSRELEPSTEFRNGSQVDKEFQISKENGSKEEEELTR

SEQ ID NO: 10820 - protein, 279 aa, Nicotiana benthamiana
EISPLWPGEAHSLKVEKILFQGKSDYQNVMVFQSSTYGKVLVLDGVIQLTERDECAYQEMIAHLPLCSILNPKKVLVIGGGDGGVLREVSRHSSVEQIDICEIDKMVVEVSKQFFPDVAVGYEDPRVNLHIGDGVAFLKNVAAGTYDAVIVDSSDPIGPAQELFEKPFFESIARALRPGGVVSTQAESIWLHMHIIEEIVVNCRQIFKGSVNYAWTTVPTYPSGMIGFMLCSTEGPAVDFKNPINPIDDDDVSHNKTLGPLKFYNSELHKASFCLPSFA

SEQ ID NO: 10821 - protein, 616 aa, Frankia sp. CcI3
MIERHTDMARAVGIDLGTTNSVVSVLEGGEPTVIANAEGSRTTPSVVAFAKNGEVLVGEVAKRQAVTNVERTIRSVKRHMGTDWKMKVDAKDLTPQEISAFILQKLKRDAESYLGETVTDAVITVPAYFDDAQRQATTEAGTIAGLNVLRIVNEPTAAALAYGLDKGEKEQTILVFDLGGGTFDVSLLEIGDGVVEVKSTSGDTHLGGDDWDQRITDHLIKTFNGQHGVDLGKDKMALQRLREAAEKAKIELSQSTQTAINLPYITASAEGPLHLDVSLSRAEFQRMTSDLIDRCRHPFQQAVKDAGIKVSDIDHVVLVGGSTRMPAVVELVRELTGGKEPNKGVNPDEVVAVGASLQAGVLKGEVKDVLLLDVTPLSLGIETKGGIMTKLIERNTTIPTKRSEIFTTAEDSQPSVQIQVFQGEREMAAYNKKLGMFELTGLPPAPRGMPQIEVTFDIDANGIVHVSAKDLGTGKEQSMTITGGSALPKDDIDRMVRDAEQYAEEDRRRREEAETRNKAETLVYSTERFLAENGEKIDAAVKSDVEEKLGTLRGAVAGTDTAAIREAADALAAASQAMGQAMYAQAAQEGAGASGGAGAADDDVVDAEIVDEEDKK

SEQ ID NO: 10822 - protein, 1411 aa, Oryza sativa Indica Group
MDPRRPPSRGGAAANGGGLSYSTLFNLEPLLNFKVPLPEDLDRYRLSSPNGSMSSQGQGSLSDQYNGISDASHGLHRKRKRNLDGASDDDEVDAYSNQITEEHYRTMLSEHVQKYRRSKFKEDVFSSDPPQVIVPQKHKNGSARVTKYRSDTRNVAMLGGVEATAEYNGTKSTNAYGGFNKVVASLDSSYLDMGDNVSYKIPEGYDKLALSLNLPVFSDIRVEETFLNGTLDLRTLAAMLSTDQKFETTNRAGLAEPQPQYESLQERVKVQKFSLQVTEDPFAIPEGAAGRIRRFIISESGSLHVHYVKVLEKGDTYEIIERSLPKKQIIRKDPSEIAREESEKTIKLWHAIAVKGIPRHHRNFMALLKKRQVDAKRFSENCQREVKFKVSRSLKLMRSAAIRTRRLARDMLIFWKRVDKEQNKAGESAPSDEASVPEEDEEDPEEAELKREALRAAQHAVSQQKRMTNAFDSETGRFRQSSDSGIPTDDLASMEPNKIDLLHPSTMPEKSSVQTPELFKGALKEYQLKGLQWLVNCYEQGLNGILADEMGLGKTVQAMAFLAHLAEDKNIWGPFLVVAPASVVNNWAEEILVNEEKLLRRVKWQYMVLDEAQAIKSSSSQRWKTLLSFNCRNRLLLTGTPIQNNMAELWALLHFIMPTLFDSHEQFNEWFSKGIEGHAEHGGALNEHQLSRLHAILKPFMLRRVKIDVIAEMTKKKEEIVPCRLSSRQQVFYQAIKNKISLNELLDGSRGNLNDKKLLSLMNIVMQLRKVCNHPELFERNEGSSYFYFADIPNSLLSPAFGELQDVHYAGKRNPIMFEIPKLVYKGIVSNMEMPVRGCGFLYGSFNRMFNIFSPSYIHQSAFPEAISPNNTVLLSGAFGFTRLINLSPVEASFLATCSLFNRLAFSAVRWNKKYTDELVDVFLDSESTDLESTHNDLTTVRAVVRLLLSPTKAESSFLRTKIETGPSDSPYEALVLSHHERLVSNIRLLRSTYAFIPPARAPPINVWCADRNFAYKLTDEMHDPWAKKLVLGFARTSEFNGPREPTSPHPLIEELHTDLPFPEPMLQLPYRIFGSSPPMSNFDPAKMLTDSGKLQTLDILLRRLRAENHRVLLFAQMTKMLDILEDYMNFRKFKYFRLDGSSAISDRRDMVRDFQNRNDIFVFLLSTRAGGLGINLTAADTVIFYEIDWNPTQDQQAMDRTHRLGQTKEVTVYRLICKDTIEEKILQRAKQKNAVQELVMKGKHVQDDHLMRQEDVVSLLIDDTQISHKLKEISMQAKDRLKKRRTKGIKVDKEGDLMLEDLDDQTSGAAEHDNTSSKKKKSSQKKLPKLQDNGSVDKNAEAEGGEVEDEDSIAAPRPKRSKRLMKNLNEDKEPEQEPTTDGDNPAEAAENNISPDDNDTEEAKDRTPSA

SEQ ID NO: 10823 - protein, 119 aa, Nicotiana benthamiana
GKVLVLDGIVQLTEKDECAYQEMIAHLPLCSVKSPKNVLVVGGGDGGVLREISRHSSVELIDICEIDKMVIDVSKKFFPDLAIGFEDPRVNLHVGDAVEFLRNTPEGKYDAIIVDSSDP

SEQ ID NO: 10824 - protein, 170 aa, Mesembryanthemum crystallinum
MASQSTDQPKSIHDFIVKDARGNDVDLSIYKGKVLLIVNVASQCGLTNSNYPELTKLYEQYKDKGLEILAFPCNQFGNQEPGDNEQIMEFACTRFKAEFPIFDKVDVNGSNAAPVYKYLKSSKGGLFGDGIKWNFTKFLVDRDGKVVDRYAPTTSPASIEKDIKKLIGTS

SEQ ID NO: 10825 - protein, 228 aa, Pseudolarix amabilis
EIAKQAKAAGARIIVTQAAYVEKLADLQSDDVIVITIDAAPKDGCQHISVLSEADETQCPSVEIQPDDVVALPYSSGTTGLPKGVMLTHKGMLSNVAQQVDGENPNLYFHSDDVIICLLPLFHIYSLNSVLLCALRVGAATLIMQKFNMASFLELIQRYKVTVAPIVPPIVLEIRKSIIISQYDVSSVRFIMSGAAPLGKELEDALIDRFPQAISGQGYGMTEAGPVL

SEQ ID NO: 10826 - protein, 431 aa, Prochlorococcus marinus str. AS9601
MNSSFNKLLTFKNLITASMIIVFSINLLLMERVDALSDSRQLVLDAWTLVNEGFYDPEKFDEIQWKRIRQKTLQKQIETSEEAYSAIEDMLRPLDDPYTRVLRPKDYELLKSSNFGSEINGVGLQLGEDDNNKVKVISTLGGSPAEEAGIVSGDIIETVDGISSEKLGLASTASKLRGESGTKVLVELSTESGEIREVDLERRSVDLRPVRTKRLRDDSHTIGYLRITQFSESVPKKVEEALQELKEKEVEGLILDLRNNSGGLVSSGIAVADTLLSEKPVVETKDRNGIKDAIISQKETSFDGPMVTLVNKGTASASEILAGSLKDNERSILMGEQTYGKGLIQSLKSLGEDSGIAITVASYLTPDGNNIQGQGITPDKLLELPEASDFGSTDDKWVRNAELLLGSLLEKEEVPVQTIDLNNEEIKSLNG

SEQ ID NO: 10827 - protein, 469 aa, Psychrobacter arcticus 273-4
MSNKLLDLIKSSNAKWVDFRFTDTRGKEHHMSFPAHSVDEESMEDGKMFDGSSIAGWKGIEASDMILRPDPETAFIDPFFDAVTVVVTCDIIEPSTLQGYDRDPRSIARRAEEYLKSTGIGDTAFFGPEPEFFVFDEVKWSVGMSGVSHEIVAEEAAWSTNKDYEWGNMGHRPRVKGGYVPVPPVDSSQDMRTVMCDRIEDMIGEGCIEVHHHEVAPCQLEIGVAFNTLVRKADEVQKLKYAVHNVAHQFGKTATFMPKPIVGDNGSGMHVHISISKDGVNTFSGDEYAGLSETALYFVGGIIKHARALNAITNPSTNSYKRLVPHYEAPIKLAYSASNRSASIRIPHVSSPKAVRVEARFPDPAANPYLAFAALLMAGLDGIQNKMHPGEAADKNLYDLPPEEEALIPTVAENLEVALQALKDDHEFLLKGDVFTKEMLEAYIALKQEEVQRVNITVHPVEFDLYYSC

SEQ ID NO: 10828 - protein, 520 aa, Arabidopsis thaliana
MAQVSRICNGVQNPSLISNLSKSSQRKSPLSVSLKTQQHPRAYPISSSWGLKKSGMTLIGSELRPLKVMSSVSTAEKASEIVLQPIREISGLIKLPGSKSLSNRILLLAALSEGTTVVDNLLNSDDINYMLDALKRLGLNVETDSENNRAVVEGCGGIFPASIDSKSDIELYLGNAGTAMRPLTAAVTAAGGNASYVLDGVPRMRERPIGDLVVGLKQLGADVECTLGTNCPPVRVNANGGLPGGKVKLSGSISSQYLTALLMSAPLALGDVEIEIVDKLISVPYVEMTLKLMERFGVSVEHSDSWDRFFVKGGQKYKSPGNAYVEGDASSASYFLAGAAITGETVTVEGCGTTSLQGDVKFAEVLEKMGCKVSWTENSVTVTGPPRDAFGMRHLRAIDVNMNKMPDVAMTLAVVALFADGPTTIRDVASWRVKETERMIAICTELRKLGATVEEGSDYCVITPPKKVKTAEIDTYDDHRMAMAFSLAACADVPITINDPGCTRKTFPDYFQVLERITKH

SEQ ID NO: 10829 - protein, 698 aa, Kluyveromyces lactis NRRL Y-1140
MSSADEVNISLLTKASGYGVLIGVGALFAVGIIVATKLMGKYLHEDSQSTENFMVANRNVGIGLTGSVVFSSWYWATEILWVVTMVYSYGVMSSFWYFAGLSVQICLMALLGIQAKKKIPNGHTCLEIVELRYGKSAHILYMFMCLVNNLLSSSSMILGSAAAISIISGNLHIVASTMLIPFGVMCYTVVGGLKATFLTDYMHSLIALIILVYFNTAVISSDKIGGISGLYDKVIQHEGDRYIEGNYQGSFLTGKSQGAIFFGIIHCVGDFGLTVMDSSFWQKAFSANVKASVPGYLIAAALIPAIVWPLGTIIGLSNIVLEGESFFPTYPRAMTSYEINNGFGLPYTLMAVLGKSSLGGLLLAIYLAVTSTVSAQMIAVSSIISFDIYRNYFKPNANNSQLITVSHIGVIFFGLFAAGFTVMLHYVGVDMTWMGYFYSMIICPGVIPLVLTILWDRQTPLAAIISPVIGFLAGIAVWLGTAYKFYGEVTITSTGSQLPCMYGGLTALFLPGVLTVPISLLDKNYKFDWSDFKKAKLIVEEEEEEEDSFDDNNRFKEATPSIEEKSSKSIKPSVELETKTENAVEILKEDSAFYETEVSSNPANTPFTAEEVRIINIYTKIAAGASVFVLLITWVVWPLPLYRDYIFSKTFFAGWTVVSIIWVYLALIFIGLYPLWDGRHSLIKIFNGVKNDIFKSKN

SEQ ID NO: 10830 - protein, 482 aa, Oryza sativa Indica Group
MGMEVAAARLGALYTTSDYASVVSINLFVALLCACIVLGHLLEENRWVNESITALIIGLCTGVVILLMTKGKSSHLFVFSEDLFFIYLLPPIIFNAGFCLLEFYSWSIYSAAIAIFSRMNIGTLDVGDFLAIGAIFSATDSVCTLQVLNQDETPFLYSLVFGEGVVNDATSIVLFNALQNFDLVHIDAAVVLKFLGNFFYLFLSSTFLGVFAGLLSAYIIKKLYIGRHSTDREVALMMLMAYLSYMLAELLDLSGILTVFFCGIVMSHYTWHNVTESSRVTTKPGKSIGISSILLGLVLIGRAAFVFPLSFLSNLTKKAPNEKITWRQQVVIWWAGLMRGAVSIALAYNKFTRSGHTQLHGNAIMITSTITVVLFSTMVFGMMTKPLIRLLLPASGHPVTSEPSSPKSLHSPLLTSMQGSDLESTTNIVRPSSLRMLLTKPTHTVHYYWRKFDDALMRPMFGGRGFVPFSPGSPTEQSHGGR

SEQ ID NO: 10831 - protein, 232 aa, Pseudolarix amabilis
YKPGEIAKQAKAAGARIIVTQAAYVEKLADLQNDDVIVITIDAAPKDGCQHISVLTEADETQCPSVEIQPDDVVALPYSSGTTGLPKGVMLTHKGLVSSVAQQVDGENPNLYFHSDDVIICVLPLFHIYSLNSVLLCALRAGAATLIMQKFNMASFLELIQRYKVTVAPIVPPIVLDITKSPIISQYDVSSVRIIMSGAAPLGKELEDALRDRFPQAIFGQGYGMTEAGPVL

SEQ ID NO: 10832 - protein, 663 aa, Zea mays
MDRVRGSAFLLGVLLAGSLFAFSVAKEETKKLGTVIGIDLGTTYSCVGVYKNGHVEIIANDQGNRITPSWVAFTDSERLIGEAAKNQAAVNPERTIFDVKRLIGRKFQDKEVQRDMKLVPYKIINKDGKPYIQVKIKDGENKVFSPEEISAMILGKMKDTAEAYLGKKINDAVVTVPAYFNDAQRQATKDAGVIAGLNVARIINEPTAAAIAYGLDKKGGEKNILVFDLGGGTFDVSILTIDNGVFEVLATNGDTHLGGEDFDQRIMEYFIKLIKKKYSKDISKDNRALGKLRREAERAKRALSNQHQVRVEIESLFDGTDFSEPLTRARFEELNNDLFRKTMGPVKKAMEDAGLEKSQIHEIVLVGGSTRIPKVQQLLKDYFNGKEPNKGVNPDEAVAFGAAVQGSILSGEGGDETKDILLLDVAPLTLGIETVGGVMTKLIPRNTVIPTKKSQVFTTYQDQQTTVSIQVFEGERSMTKDCRLLGKFDLNGIPSAPRGTPQIEVTFEVDANGILNVKAEDKGTGKSEKITITNEKGRLSQEEIDRMVREAEEFAEEDKKVKERIDARNQLETYVYNMKNTVGDKDKLADKLEAEEKEKVEEALKEALEWLDDNQSAEKEDYEEKLKEVEAVCNPIVSAVYQRSGGAPGGDADGGVDDDHDEL

SEQ ID NO: 10833 - protein, 429 aa, Desulfovibrio desulfuricans subsp. desulfuricans str. G20
MRLSLWTATFIVFLTLTVSIGPGNATDGPGRFESLKRFSQVLDLVERFYVSDVSRDELMEGAIRGMLQNLDPHSAFLDAAEYREMQESTSGEFFGIGIEITQQNDRLVVVAPIADTPAARAGLRAGDIILAVDGKLTQEMTLRESVSRIRGPRGSTVKLTILHEGENSPETVSIERDSIPLISVKSHELEPGYLWVRLSRFSERTTNELHDAIREERKRGPIKGLILDLRNNPGGLLDQAVHVADTFLSEGTIVSIKGRIESNNRDFKATAQATDVKAPLVVLVNAGSASASEIVAGALRDHKRGLLLGERTFGKGSVQNVIPLADGSGLKLTIALYHTPDGTSIQAEGVEPDIKLPFVQPAREEESKAKHPFGIMREKDLARHLENGEDKKSPETERDKESVASLERDNQLRMALQLVKQLPRLQAIH

SEQ ID NO: 10834 - protein, 1078 aa, Methanosarcina acetivorans C2A
MIILHAGRVGKQFFLWGESPAENETPPVRRGRKPKKPVAKPYPYDSGVENLSSALELLLGSTGRKKAEEINVWIPTAGWNPIPSSPLVAEIPASKAELSLAPWTVHAYPLEAEEAIVLLCACMGKKVLAPGIISGNDLLWWADALKFAGSLVAGQKYLPGVRGGEGEYKAFWEPVFSGEDAGELARLAKQMPPAAKALALETSSVQPEILAAVAARQFIEEALDWIVRSEIGEKELAKEARKRKSFDSVHDAWVSALKSPDGLIHGEEKELLQLAFRTREWQRPLTVLTTSPFRFCFRLEEPAAEEELEETEESEAGKMDTKKGRKGIADIEVPEELWYVRYMLQSYEDPSLLIPVKEAWKPKKGSPLKRYDVKNIRQFLLSSLGQAAGISAGIASSLEAPNPSGYSLDTKEAYRFLTESAADLSQAGFGLLLPGWWTRKGTKTHLKAQANVKGKKLKAGYGLTLDKIVSFDWEIALGDRALTVRELQALAKLKAPLVKFRGQWVEVNDAEIRAALEFWKKNPHGEASLREVLKLAVGVSEKADGVDVEGLNAAGWIEELIRRLKDKTGFEELPAPDGFSGTLRPYQFRGYSWLAFLRQWGIGACLADDMGLGKTIQTLALIQHDLEQVKGQVEEKVIENAEEKVEGLKAAKPVLLVCPTSVINNWKKEAARFTPELSVMVHHGTSRKKEEEFKKEATNHSIVVSSYGLLQRDLKFLKGVSWAGVVLDEAQNIKNPETKQAKAARALEADYRIALTGTPVENNVGDLWSIMEFLNPGFLGNQAGFKRNFFIPIQAERDQEAARRLKEITGPFILRRLKTDTSIISDLPEKMEMKTYCTLTKEQASLYAAVLEDIEETMEEAEEGIQRKGIILSALTRLKQVCNHPAQFLKDNSAVPGRSGKLARLTEMLDVILENGEKALVFTQFAEMGKMLKEHLQASFGCEVLFLHGGVPRKQRDRMLERFQEGKEYLPIFVLSLKAGGTGLNLTGANHVFHFDRWWNPAVENQATDRAFRIGQTKNVEVHKFICAGTLEEKIDEIIERKVQVAENVVGTGEGWLTELSNEELKDILALREEAVGE

SEQ ID NO: 10835 - protein, 440 aa, Synechococcus elongatus PCC 6301
MGVERDMDSLAALARDRGIRYFLIAFTDLFGVQRAKLVPASSIDLMATSGAGFAGFAAWLDLSPADADVLAIPDRDSLFQLPWQPEVAWMPADLYLNDQPLEQAPRWVLKRVLSVAESLGYRPKTGVECEFFLLDETGDAIADPRDRQAKPCYDQQSLMRRYDLITQISEAMEELGWGPYQSDHEDADGQFEMNWTYADALVTADRQAFFKYMVKTLAERQGLRATFMPKPFADLTGNGCHMHLSLWNREGTTNTFVDPVATAPLSTLGYQFIGGLLHSAASLCALTNPTINSYKRINAPATTSGATWSPNGISYSGNNRTHLIRIPDAGRFELRLADGAANPYLLPAAAIAAGLDGIQNKRDPGPRYDNDNYAQPLPPGTVPTLPEHLLDALRSLQESTVLTEGLGAAFTSAYLKLKHQEWRSFCAEITPWERATTLDC

SEQ ID NO: 10836 - protein, 468 aa, Salmonella typhimurium
SAEHVLTMLNEHEVKFVDLRFTDTKGKEQHVTIPAHQVNAEFFEEGKMFDGSSIGGWKGINESDMVLMPDASTAVIDPFFADSTLIIRCDILEPGTLQGYDRDPRSIAKRAEDYLRATGIADTVLFGPEPEFFLFDDIRFGASISGSHVAIDDIEGAWNSSTKYEGGNKGHRPGVKGGYFPVPPVDSAQDIRSEMCLVMEQMGLVVEAHHHEVATAGQNEVATRFNTMTKKADEIQIYKYVVHNVAHRFGKTATFMPKPMFGDNGSGMHCHMSLAKNGTNLFSGDKYAGLSEQALYYIGGVIKHAKAINALANPTTNSYKRLVPGYEAPVMLAYSARNRSASIRIPVVASPKARRIEVRFPDPAANPYLCFAALLMAGLDGIKNKIHPGEPMDKNLYDLPPEEAKEIPQVAGSLEEALNALDLDREFLKAGGVFTDEAIDAYIALRREEDDRVRMTPHPVEFELYYSV

SEQ ID NO: 10837 - protein, 919 aa, Cryptococcus neoformans var. neoformans B-3501A
MKRPRFRVRKAFRKPKMPTVAEARDTWQKLKCHFNFFRIHLLVFTFIPIIAACIFYAANGSASGNANSGLTGRQKVTFIDSLFLCFSAMTTTGLCTVNLSALHPFQQVILFFLFIVGDYSFVSLIMVLVRKHYFRTHCEQLLINDLFRRIPTISYDTGAQGGLNYSSKSFKSTIKKLRGKNIAISGPIDGHKMDNFAEDGLVTAGDQEQHMMTDSPVDMTFEERGRRERAEASEIPADNQTPGPRVPSTLGKSTAALLNPANAAPPPATSSAQAEDHRSPFVDPLFQARQRLRTQTRAKSISAAQHGRSTSDHRPTPPHVTSDVPNHMGGGAIPPKRKNNVHIKDYSHHDQSQHPHLHTAAQIVTHHTIDPTRGLPIPFGHKNTGYGGFPSLLHIFHHFLPERAKQRLYRPVRRVGIVMHPTYAHEFENGHAGHEESWSEAIRGSVAKWMPEGLQGLVIGRNSRFWTEELDDEELEQIGGVEYRALKLLSSIVSSYIFLYQMIPFAILSIYFAKVDYWNSALLETAGEQAGTVNKTWFSLFLSASAYTGCGMVLTDEGLVPFQTCYLMIYVLIVALLVGNHALPIMLRFIIWIGTKITRKGVKHESLHFLLDHPRRHQTWYLLFILLAFTVVELFSFLVLNIGLPVVDSLGGWERFSDGLLQSLSVRASGFGIITISDMAPSVLFLYIIFMYVAIYPIAMSVRSTNVYEERALGLYEHDDPDTSGQDEPQFKGHRREVFSKYLMWHMRRQLAFDVWPLALAVLTISMLERGKLLDPQKSSWFTIFRIIFECTSGYGTIGLTLGTPNNNYAFSGEFGTASKLVMIVIMLRGRHRGLPVAIDRAILLPREYSRIVKPSEGLQPTLSHSDPFTRASNEDDRSRPIEMELEGGFGERDLPEKLAKKRELKKDGAGAAEADRQG

SEQ ID NO: 10838 - protein, 517 aa, Saccharomyces cerevisiae YJM789
MSTSADTDTIKKPILAVPEPALADTHSEEISRSGEEHESENNEHSDEEGDNYSEREQSVSTEPLDTLPLRKKLKNLSYITFFAIGIGLLWPWNCILSASQYFKHDIFKDTSIWAKIFTSSMMSFSTISSMLFNIYLAKRQYKYSRRVINGLVWEIIVFTVMCFFTILHFLLPKWFNFMFIMVLVVISSMGTAMTQNGIMAIANVFGSEYSQGVMVGQAVAGVLPSLVLFALAFIENSSVSTTGGILLYFFTTTLVVTICVVMFSVSKISRKVNENWNVEDGHITDVLLGSLRSNEEEIRIVGRIDQMEDEDHRRTNGTRDDNDEGEELQLKVPFEVLFAKLKYLVLSIFTTFVVTLVFPVFASATYVTGLPLSNAQYIPLIFTLWNLGDLYGRVIADWPMFRDQKFTPRKTFIYSLLRVAAIPLFLMFTAITSSSSGDEEHNGSVIVDLCYMLLQFLFGVTNGHVISMSFMKVPEQLDNDDEKEAAGGFTNIFVSTGLALGSIISYVFVFIIDFIIR

SEQ ID NO: 10839 - protein, 635 aa, Haloarcula marismortui
MASNKILGIDLGTTNSAFAVMEGGDPEIIVNGEGERTTPSVVAFDDGERLVGKPAKNQAVKNPDETIQSIKRHMGQDDYSVELDGEEYTPEQVSAMILQKIKHDAEEYLGDEIEKAVITVPAYFNDRQRQATKDAGKIAGFEVERIVNEPTAAAMAYGLDDESDQTVLVYDLGGGTFDVSILDLGGGVYEVVATNGDNDLGGDDWDHAIIDYLADEFEAEHGIDLRDDRQALQRLTEAAEEAKIELSSRKETRINLPFIATTDDGPLDLEQKITRAKFESLTEDLIERTLGPTEQALADADYTKSDIDEVILVGGSTRMPQVQDQVEEMTGQEPKRTSNPDEAVALGAAIQAGVLSGDVDDIVLLDVTPLSLGVEVKGGLFERLIDKNTTIPTEESKIFTTAQDNQTQVQIRVFQGEREIAEENELLGRFALSGIPPAPAGTPQIEVSFNIDENGIVNVEAEDKGSGNKEDITIEGGAGLSDDQIEEMQQEAEQHAEEDEQRRDGIEARNEAEASVRRAETLLDENEEEIDEDLQSDIEAKIEDVEEVLEDEDATKEDYEAVTETLSEELQEIGKQMYQDQAQQAQAVPRALVRVARPAPGALPDRAAQQAAAEQGAEEYVDADFEDVEESDEDE

SEQ ID NO: 10840 - protein, 239 aa, Asparagus virgatus
MGRGRVELKRIENKINRQVTFAKRRNGLLKKAYELSVLCDAEVALIIFSNRGKLYEFCSSSSMLKTLERYQKCSYGAPDTSVQIRESQMLQSSHQEYLRLKARVEALQRSQRNLLGEDLGPLSSKELEQLERQLDSSLKQIRSTRTQYMLDQLADLQRREQMLCEANRSLRKRLEESSQANQQQVWEDANAMGYNRQPNQPQGDQFFHPLECQPTLQIGFQPDQMPGPSVSNYMPGWLA

SEQ ID NO: 10841 - protein, 205 aa, Brassica napus
MSSKVSVSPTSLIDQIVVPGDVVLDLSNMTNQTIKLGSGLRQDSDAISAMRAGKFSYSKPNKYWVESSHKRYIPRTEDHVLGIVVDYKADNFWVDIKGPQIALLPGLAFEGATRRSIPKFEVGTLLYLRVVKTNIGMNPELSGTDASGKASVFGPLKDGFMFETSTGLSRMLLSSPTCPVLEALGKKLSFEIATGLNGRVWVNAA

SEQ ID NO: 10842 - protein, 484 aa, Clostridium perfringens ATCC 13124
MILKSLLKGLDYEVIKGNEESKVQNIRYDNRKIEQGDAFVCVKGFKVDGHSFIGDAIKKGAKTLIVQEDVSVQEDITIIKVRDTRKALAIMSSNYFGNPKDKLKIIGITGTNGKTTSAFIIKSILEKAGFMTGLIGTIANYIGNKKVDAVRTTPESYELHELFKNMVDAGVEYCVMEVSSHSLELDRVYGIQFEEGIFTNLTRDHLDFHKTFENYYNAKFKLFERSNHSIINLDDPYGANIVKDIEERGLKTKVSAFSIEKESDFKAFEIKSHSNGSEFKVNLESIEEFSINIPGEYNIYNSLGCIICAYNLNIPMDKIKEGLSDVVIPGRCELVAKEKNLPYSIIIDYAHTPDGLENILSTVKAFTKNRMISVFGCGGDRDKVKRPQMGKIGCELSDIAIITSDNPRSEEPMDIINDIVKPLNYDNFVIEVNRKEAIRKAMNMALEGDVIVIAGKGHETYQILKDETIHFDEREVVYDILEGK

SEQ ID NO: 10843 - protein, 503 aa, Ralstonia metallidurans CH34
MRDRTLVLSVLIVASCGLGYELIAGALSSYLLGDSILQFSSIIGCYLFAMGVGSWLSRYVKDEDVLTRFIDIEILVGLLGGISAALLFVVFAWLSAPFRTALYALVFVIGMLVGMEIPLVMRILNARRAQFSDLVSRVLTFDYLGALAVSLVFPLVLAPRLGLSRTGFLFGMLNVAVALFTLRIFRDEVSRTTLRTLRAGMVLAVLTVGFAGSNYLTHWAERGLFGDEIIHSETTPYQRLVITRWKDDLRLYINGNLQFSSRDEHRYHEALVHPVLQALPWARRVLVIGGGDGLALREILKYRNIEHVTLVDLDPAMTTLFSRSEPLRALNHGSLTDQRVTVVNADAAQWLEQNQDSFDAIIVDLPDPSNFGLGKLYSVPMYRLMSRHLAEKGYAVVQSTSPYYAPRSFWDIDATLREAGLHTWPYHTYVPSFGEWGYILVGKRNDYTPPTRYDVPMKFLDGDTTALMFRFPADMAPRQGEPNRLNEQTLVHDFERDWRNVIR

SEQ ID NO: 10844 - protein, 415 aa, Lentisphaera araneosa HTCC2155
MIKKLLLLVTVINLAFGAYYYYKKNSMNPKFSENFYLLEEASDKLKSSYVDESKVGNEDLTKGALKGMLKGLDPYSTYYTPSQNKDQEEDLKGKFAGVGILFRVEDDGVYVRKVYEDSPAEKAGVQGGDYVVQANEVSLVGLDSRGVVGELKGEPGSKLDVHVIRGEDKLTLTLERGYVSVPTIKLAKMLDDEIAYMYISQFGASTSSEFRKKIGALTEAGMKGLILDLRFNGGGYLNSAVGICSVFLEYGSLVAYKEGRDADREDLLDMTDESLDHIPLVVLVNEDSASASEVTAACLRDYERCILVGEKTFGKGSVQVITQLSNGGSIRFTIAKYFTPGGYIIHGKGLDPDVEVELNSTEKQDLSKQISNYSTVDSEDPKDKQFVKAYEALQVELQSSRTKAPFFVELTNDEK

SEQ ID NO: 10845 - protein, 339 aa, Physcomitrella patens subsp. patens
MGRTRRKKKRTQDPTQDNAGALPGDKIPKSFVFSRGKLPALLRNLEKDLRKVMMPHTALNLRESKRNSMKDFVHVAAPLGVTHFMILSNTKTSPYLRLARSPHGPTLTFKIHAYSLAADVARAQTRPRAPPAIFKSPPLVVMNGLTTGEEHLKLIAVVFQNIVPPINVNTVKLSNCQRVLLLNYDKTTKCIDFRHYSVSAQPVGVSRNIRKLVQRKKLPDLSKLSDVSEFVNKTGYGSESEAEDEASKVELADDFGKGNHASQRSAVKLHEIGPRMTLQLVKVEEGLCDGAVMFHEYVKKTEEEILALRNSKEQREALRKQRRAEQEANVKRKEEERNS

SEQ ID NO: 10846 - protein, 615 aa, Thermus thermophilus HB8
MAKAVGIDLGTTNSVIAVLEGGKPVVLENAEGERVTPSVVAFRDGETLVGRMAKRQAVLNPEGTIFEIKRFIGRRFEEVQEEAKRVPYKVVPGPDGGVRVEVKGKLYTPEEISAMILRKLVEDASKKLGEKITKAVITVPAYFNNAQREATANAGRIAGLEVLRIINEPTAAALAYGLDKKGNETVLVFDLGGGTFDVTILEIGEGVFEVKATSGDTHLGGSDMDHAIVNWLAEEFKKEHGVDLKADRQALQRLIEAAEKAKIELSSTLETTISLPFIALDPASKTPLHLEKKLTRAKFEELIQPLLKRLRGPVEQALKDAGLTPAQIDEVILVGGATRVPAVQQVVRELLGKEPNRSVNPDEVVAMGAAIQAGVLMGEVRDVVLLDVTPLSLGVETKGGVMTVLIPRNTTIPTRKCEIFTTAEHNQTAVEIHVLQGERPMAQDNKSLGRFRLEGIPPMPAGVPQIEVCFDIDANGILHVTAKERSTGREASITIQNTTTLSEEEIQRIIEEAKRHAEEDRRRREHAELKNALDSARVQAERVLQERQGAPEARARLEAAIGKAKELVERDAPDPELKAATEELLKAVEEYEKGAQAASGKGPDDVIDADYKPAD

SEQ ID NO: 10847 - protein, 410 aa, Oryza sativa
MAICSTDNELVELLWHNGGVVAQPQAAQARVVSSSGRGQSASVLTGDDTETAAWFPDTLDDALEKDLYTQLWRSVTGDAFPAAAAAGPSSHHAPPPDLPPPAARPPMRSGIGSSWTGDICSAFCGSNHIPETAAQRCRDAGAALPPERPRRSSTHDGAGTSSSGGSGSNFGASGLPSESASAHKRKGREDSDSRSEDAECEATEETKSSSRRYGSKRRTRAAEVHNLSERRRRDRINEKMRALQELIPHCNKTDKASILDEAIEYLKSLQMQVQIMWMTTGMAPMMFPGAHQFMPPMAVGMNSACMPAAQGLSHMSRLPYMNHSMPNHIPLNSSPAMNPMNVANQMQNIQLREASNPFLHPDGWQTVPPQVSGPYASGPQVAQQNQIPKASASTVLPNSGAEQPPTSDGI

SEQ ID NO: 10848 - protein, 400 aa, Physcomitrella patens subsp. patens
MKRRNECEEHHVEMNGWNGYANSDLSPAPTPTGPRGRASRPKTVKQTKNGPQTPGPSGIGSPTSSAPTPTSTCRYDSSLGLLTKKFIDLIKQAEDGVLDLNKAADTLHVQKRRIYDITNVLEGIGLIEKKLKNRIRWKGLGMVRTTEGKDDAVGLQVEVEDLRNEEKKLDESISEMRERLRSLSEDDHNKQWLYVTEDDIKNLPCFQNETLIAIKAPLGTTLEVPDPDEAVEYPHRRFQILLRSTMGPIDVYLVSRFEGRTEVPMEPLPGSQEAGPSTTANAMDHQGNMAMVPEVGYGLSDLVPPANHEAASQTSEPTSSHPDFVGGIMRIAPAEGNTDSDYWLLSDAGVGISDMWRSDPSNAMWDEVVRLNTEFGIENIGSPRPHTPPSSNALEVDPVS

SEQ ID NO: 10849 - protein, 399 aa, Synechococcus sp. WH 5701
MALALLLCVGLWLQPGPALALNDAQQLVVEAWRLVNQSYVDPTRFETVHWRRLRQKALEQPIETSAQAYDAIAAMLEPIGDPYTRVLRPADYKALRATTEGSVSGVGLQLSLGEDGQGIVVIAPLDGSPAAEAGISSGSEVLEVEGKPCRILGLEATAARLRGPAGTSVQVLIQPPTPRAEPRQVLLRRERVDLQPVRSRLLKREGHRLGLLRITQFSEPVPAGVREALQGFDQEGVEGVILDLRNNSGGLVEAGVAVANAFLAAQPIVETMNRDGLSERRQAAAGQLYSGPMVTLVNGGTASASEILAGALQDDGRSALLGSRTFGKGLIQTLINLGDGSGLAVTVARYRTPSGRDIQNQGIAPDRLLPEPEPLNPGGADDHWLQLAAEQLLQELPTA

SEQ ID NO: 10850 - protein, 298 aa, Oryza sativa Indica Group
MKSRKSYGHLLSPVGSPPSDNESGAAAAAAAAGGGGCGSSAGYVVYGGGGGGDSPAKEQDRFLPIANVSRIMKRSLPANAKISKEAKETVQECVSEFISFVTGEASDKCQREKRKTINGDDLLWAMTTLGFEAYVGPLKSYLNRYREAEGEKAAVLGGAGGAAAARHGEGGCCGGGGGGGADGVVIDGHSPLAGGLSHSHHGHQQQDGGGDVGLMMGGGAAGVGYNAGAGSTTTAFYAPAATAASGNKAYCGGDGSRVMEFEGIGGEEESGGGGGGGERGFAGHLHGVQWFRLKRSTN

SEQ ID NO: 10851 - protein, 841 aa, Schizosaccharomyces pombe
MVLNYIQRWFKWVIPTFGFLAIHYIYIISLTIIASILLFTGGTTTKIKYIDALFLASSATTQTGLNSVDLNSLSIWQQFILYGFTAITVPIWMHGSISFIRLYWFRRKFKDVVRQNRTRKFQRKLRKSLMKKSEDDEEQGVRGRKIRVMLPYLHSLRSPTSLKNFSRFDTHDSTNNPYFPDNPPSPKADISKDEYFGKYLPKKSDTLDMDLESHNMTFHDYEPSIENKNYDFGSSHSASMQMYEMDDLHPRLRRQSSFISSVNPLEADDTRETLSEGALVQESLPMAYSYSDTNLVVSRDSFTLTGDDNLFPEGGLRPANTIDGIVRSSLSSSSLSKDTEPSTVDMHIAFTGLNKPTIERERNLKLRKKSRFYKKSLRSRFSRGLHRPIRWTKSFTSNRRNLTLERVLSSAFAKKREPSISSRHTTMSLPYLSYNPTVDRNSAFVALSKEQRDELGGIEYRALKCVCSMVTLYFIIFNIAAFVTFIVFAYTAVGSREVIDSYDLRRGWWALFSSASSFNDLGFSLIPSSFVPMNRNIFLLLISSLFIIAGNTGFPCFFRTFIWTTYKLYPFSFEKKEAMAFLLDHPRRCFTLLFPSGATWVLFFVLLLLNVIDLVLFMVLDTGSKAVASLPKGIRVVNAIFQSVCTRTAGFTSVSISELHPAVLVSYMVMMYISVYPVAINMRNTNVYEERSLGVYRTEDDEGKSFLKDHLTEQLSYDLWYIFLGLFIICICEGGKISNPLDTDFSIFTVLFEVVSAYGTVGLSTGLSSSNCSLSARFTTISKLVIIALELRGRHRGLPRAVDRAILLPSEKNNLKEEEDYQRRHGFSIDNARGSIAVSRD

SEQ ID NO: 10852 - protein, 472 aa, Neisseria meningitidis Z2491
MSIKNAVKLIEESEARFVDLRFTDTKGKQHHFTVPARIVLEDPEEWFENGQAFDGSSIGGWKGIQASDMQLRPDASTAFVDPFYDDATVVLTCDVIDPADGQGYDRDPRSIARRAEAYLKSSGIGDTAYFGPEPEFFVFDGVEFETDMHKTRYEITSESGAWASGLHMDGQNTGHRPAVKGGYAPVAPIDAGQDLRSAMVNILEELGIEVEVHHSEVGTGSQMEIGTRFATLVKRADQTQDMKYVIQNVAHNFGKTATFMPKPIMGDNGSGMHVHQSIWKDGQNLFAGDGYAGLSDTALYYIGGIIKHAKALNAITNPSTNSYKRLVPHFEAPTKLAYSAKNRSASIRIPSVNSSKARRIEARFPDPTANPYLAFAALLMAGLDGIQNKIHPGDPADKNLYDLPPEEDTLVPTVCASLEEALAALKADHEFLLRGGVFSKDWIDSYIAFKEEDVRRIRMAPHPLEFEMYYSL

SEQ ID NO: 10853 - protein, 307 aa, Cedrus atlantica
TGKNYSFAETELISRKVAAGLANLGLQQGRVVMLLLQNCIEFALVFMGASVRGAIVTTANPFYKPGEIAKQAKAADARIIVTQAAYVEKLADLQNDNVIVITVDDAPKEGCRHISVLTEADETKCPSVEIQPDDVVALPYSSGTTGLPKGVMLTHKGLVSSVAQQVDGENPNLYFHSEDVILCVLPLFHIYSLNSVLLCDLRVGAATLIMQKFNLTSFLELIQRYKVTVAPIVPPVVLDITKSPIVSQYDVSSVRIIMSGAAPLGKELEDALRDRFPQATFGQGYGMTEAGPVLAMNLAFAKEPFPV

SEQ ID NO: 10854 - protein, 90 aa, Glycine max
  misc_feature (23)..(23): Xaa can be any naturally occurring amino acid
  misc_feature (86)..(86): Xaa can be any naturally occurring amino acid
PRASRPPHAHTVCEIVKARWGDXRTLFLLIFCFLTNIIVTAMLLLGGSAVVNALTGVNLYAASFLIPLGVIVYTLAGGLKATFLAXYIHS

SEQ ID NO: 10855 - protein, 93 aa, Glycine max
MVPTSVEDGPTTPSNGGHESGELSPCSNVLEWDRYLPISNIGPVDRKALPTKGEVGKDAEDTGPECCSELLRSTFQTRGLRWMEYMGARGRKP

SEQ ID NO: 10856 - protein, 161 aa, Xanthomonas campestris pv. vesicatoria str. 85-10
MSDISTFAFTDLEGRTQSMRDYAGNVLLVVNVASKCGFTPQYAGLQALWQRYRERGLVVIGFPCDQFGHQEPGDAAQIRQFCSLDYAVDFPLAAKIEVNGNGAHPLWQWLKHEQRGVLGSEAIKWNFTKFLVGRDGRVLERYAPTTKPEALAADIERALGA

SEQ ID NO: 10857 - protein, 237 aa, Physcomitrella patens subsp. patens
MCPNLTTLNGLRGQAPGDIVLDLNSTNKVLRVGSGLRQDGDSILATKAGKLRFQKQSNKYWVEGSQKRYIPNVEDTVVGIMVDRRSEMFILDIGGPAFGSLPILAFEGATRRNIPNLQAGAAVYARVVNAHRDSDPELSCTDAAGKSAGFGPLKGGFIFDCSTGLARGLLSKPTPPVLEVLGKSLSFEIAVGLNGRVWVNAPKVATIITVSNAIQNAEFLSPTQQHIMVKKLLEDSQ

SEQ ID NO: 10858 - protein, 1289 aa, Physcomitrella patens subsp. patens
MERGGGLMNGNVEHSPTDMEVNNHAQPAFSLTTTQVQDMKVLLSTLSLLSRSVQVPNKLFEKVSSIAQRGGSYSEAYKSDASIGHENRVRSGPPLQPHHSKSPQPEVPQTVTFVQENGDTLKAQSTELNSELRVEGPSSAQGCTNTAHAHVSEGRLVQNYSTTQSEPSEKPLTFDEGLQLPKSLEKSEQSKSAGVYPQELERSKQISSEGAQPGSAEDVGSPYVPGHLLAELDAAMLDNQRFMTSAELRNKEKFRMDSKLTHRIQEIKDLPAFSEEKVRQINLIEQYSLDLLNLQKKVRAEVLQELRLKELCNSPDSRVFDWGLMRIRRSGTSYLNYGDMGHAMAPEADERQRRKREAERQRRLEEEERTRETTRKRKFFNELLNMSREYQLQTQAAIKRRKQRNDGVQAWHGKQRQRATRAEKLRFQALKSDDQEAYMRMVEESKNERLTTLLSRTDDLLQRLGAMVQKQKDAEPEDAFIVKKDHKPRGHPKDATRDLLDNESVDAEAGSKKRDLLEGQRQYNSAVHSIEEKVTVQPKMLQGGQLRAYQIEGLQWMLSLYNNNLNGILADEMGLGKTIQTIALLSYLLENKGVVGPHIIIAPKAVLPNWAHELSTWAPGIQTVLYDGRAEERRLLREEYGGEGKFNVLVTHYDLIMRDKAFLKKVKWNYMIVDEGHRLKNHDCMLSRTLTTGYHIRRRLLLTGTPIQNSLQELWSLLNFLLPAIFNSSENFEDWFNAPFTDRSDVSLTEEEQLLVIRRLHQVIRPFLLRRKKAEVEKFLPGKTQVILKCDMSAWQRLYYKQIMESGRVGLDIGTGKSRGLLNTAMQLRKCCNHPYLFLEGRDYEPENRDELIRSSGKFELLDRLLPKLAKTGHRVLLFSQMTRLMDILEDYLEWHGFKFLRLDGTTKTEERGTLLQKFNAPDSPYFMFLLSTRAGGLGLNLQTADTVILFDSDWNPQMDQQAEDRAHRIGQKKEVRVFVLVSVGSIEEEILERAKSKMGIDAKVIQAGLFNTTSTAQERREMLEEIMRRGSDVIGTDVPSEREINRLSARGDDEFDIFEEMDEERRQGEGYKTRLMEEHEVPEWVFLNGPKGEDGNQEGDTDRKQVTGKRARKEVMYTDVLSDSQWMKAIEDGEDVGAAVKVQLTKRSKRREQQQAALEQEVAEMLEGDENSDDAEDETAADAEDESITEHTELQYEEAEVKTTENKTRIVIKRRHHTEETKTKSPTAVKESSENRLRLVLVTNDKATANWKGLQRKRSRHAASVSEEQPKENIDHEGDETEDEDESM

SEQ ID NO: 10859 - protein, 434 aa, Campylobacter upsaliensis RM3195
MKRKQILAALAGFTGSLILCLGLANVLYADDKTEQMQKRLEALEKLTKTLQIVEQYYVDEQNISDLVDKSLSGLLTNLDAHSSFLNEKDYNDMKMQMSGEFGGLGITVGMKDGALSVISPIEGTPADKAGIKSGDIILKINNEATLGMNLNDAVDKMRGKPSTKITLTIFREGAAKPFDVNLTREIIKVESVYSKRIEDEDILYLRVTSFNKNIVDEARKELKKYPNNKGVILDLRNNPGGILNQAIGLTNLFVDKGIIVSQKGRNESENKDYKADPKNKISNSSLVVLVNGGSASASEIVSGALQDLKRAIIVGENTFGKGSVQQTIPLNKTEALKLTIARYYLPSGRTIQAVGVKPDVEVFPGKVTAKEDGFSIKESDLKQHLEGELEKLEKKEDKKDTKENKNLITKKQINEDAQLKAAIDSIKILNIKGK

SEQ ID NO: 10860 - protein, 145 aa, Oryza sativa Indica Group
MGFSETQEELVLRSWQSMKKDSESIALKFFLRIFEIAPAAKQMFSFLRDSGDDVPLESHPKACESATQLRKTGDVKVREATLRRLGATHVKAGVADAHFEVVRTALLDTIKDAVPEMWSPEMRGAWEEAYDQLAAAIKEEMKKAA

SEQ ID NO: 10861 - protein, 428 aa, Clostridium perfringens SM101
MSHNKDEKNKYNNIIKNLKKKKGFRALAMGVGLTLIIGVSVYAGNRLTAFGILPITSVSAVQSSLEKVNDTKNFKKVLEVREMLYRWYDGEIDDSKLAEGAIKGMVSSLGDQYTYYMNGKEFSDFKEKSQGNYMGIGIQVAVKDGKIVVISPIQGGPAEKAGIKTGDIILKINGEQVSGSELDKAVSMMKGATKENIKLTLYREGKGEFDVDVMRDVIKTVNVKSEMIKGDIGYIEVLAFDEGTAKDFETQLKALEEKGMKGLILDLRGNPGGFMKECVDLVSNFVPKDKVIVSTIDKYGNKEESVSKGGIAQGMPLVVLIDGGTASASEIVAGAIRDYDLGTLVGTTSFGKGIVQVVLDKIGQEKDGTALKVTISKYYTPNGENIHKKGIGPDVTVEYPKELKEKTYSRSTDPQFEKALEIIQEKIK

SEQ ID NO: 10862 - protein, 286 aa, Alcanivorax sp. DG881
MSSTKDNWFYEHFDTAGTAFGLRLKQKLEEVQTEYQHIEMWETDTFGYLMTIDGATMLSTRDNFLYHEMMSHPVLFSHANPKRVIIIGGGDCGTLREVLRHPSVEKATQIDIDEMVTRYSEKYFPELCESNGDSRAELLFEDGVQYMRNCEDGSVDVIIVDSTDPVGPAEGLFKADFFRDCHRVLAEGGIIVQQSESPLLHSDTIIKDLHANMREAGFTSTQTLPFPQPVYPSGWWSCTLAGKNTDVSEFRETDATGKGFDTRYYSAAIHKGALVLPPFMEAAIKG

SEQ ID NO: 10863 - protein, 472 aa, Haemophilus somnus 129PT
MSNTTAITNVFKLIEENDIKFVLLRFTDVKGKEHGVSLPVSLVDEDLFEDGKMFDGSSVEGWKAINKADMLLMPIAETAVVDPFAQIPTLSIRCSIFEPTTMQSYDRDPRSIAMRAENYMRSTGVADDVFFGPEPEFFLFDDVRFDVSMNGNSYTVDDIEAAWNTNKHYEGGNKAYRPLKKGGYCAVAPNDVAHDIRSEMCLLMEEMGLVIEAHHHEVATAGQNEIATKFNTLTLKADETQIYKYIVQNVAYEHGKTACFMPKPIINDNGSGMHCNMSLSKDGKNIFQGDKYAGLSETALYFIGGIIKHAKALNAFTNPSTNSYKRLVPGFEAPVLLAYSASNRSASIRIPAVTNPKAIRIEARFPDPLANPYLAFSALLMAGLDGIQNKLYPGDAMDKNLYDLPPEELKDIPAVASSLSEALDNLEKDYEFLTHGKVFSKEFIDTFIAMKRKEVERLNMTPHPVEFEMYYA

SEQ ID NO: 10864 - protein, 607 aa, Fusobacterium nucleatum subsp. nucleatum ATCC 25586
MSKIIGIDLGTTNSCVAVMEGGSATIIPNSEGARTTPSVVNIKDNGEVVVGEIAKRQAVTNPTSTVSSIKTHMGSDYKVEIFGKKYTPQEISAKTLQKLKKDAEAYLGEEVKEAVITVPAYFTDSQRQATKDAGTIAGLDVKRIINEPTAAALAYGLEKKKEEKVLVFDLGGGTFDVSVLEISDGVIEVISTAGNNHLGGDDFDNEIINWLVAEFKKETGIDLSNDKMAYQRLKDAAEKAKKELSTLMETSISLPFITMDATGPKHLEMKLTRAKFNDLTKHLVEATQGPTKTALKDASLEANQIDEILLVGGSTRIPAVQEWVENFFGKKPNKGINPDEVVAAGAAIQGGVLMGDVKDVLLLDVTPLSLGIETLGGVFTKMIEKNTTIPVKKSQVYSTAVDNQPAVTINVLQGERSRATDNHKLGEFNLEGIPAAPRGVPQIEVTFDIDANGIVHVSAKDLGTGKENKVTISGSSNLSKEEIERMTKEAEAHAEEDKKFQELVEARNKADQLISATEKTLKENPDKVSEEDKKNIEAAIEELKKVKDGDDKSAIDSAMEKLSQASHKFAEELYKEVQAQAQAQQQAGANAGSDKKDEDVAEAEVVD

SEQ ID NO: 10865 - protein, 844 aa, Medicago truncatula
MEDSQEPFSQSQSETYLAGFVMANIVGIKHYSGTITGREILGLIREPLNPYDSNAIKVLNTQTLQVGYIERAVASALAPLLDAHIIHVEAIVQPRSNNNKFRIPCQIHIFAHQSSFDAVHDAFNGSNVHFISYSDPSFTLSHSAAVKETRADTFNSDSVTTGNNNSKNLDQIFKLVRENLASKTLVSEPLNPPSSIIKSELLQHQKEALGWLYHRESTQDLPPFWEEKVGNFVNVLTNYQTNARPEPLRGGIFADGMGLGKTLTLLSLISYDKMKMKSGKKRGRSSVERVESETNGTLIVCPPSVISTWITQLEEHTNRGTLKVYMYYGDRRTQDAEELRKYDIVLTTYATLGAELRCSDTPVKKLGWRRIVLDEAHTIKNVNAGQSQAVIALNAKRRWAVTGTPIQNGSYDLFSLMAFLHFEPFSIKSYWQSLVQRPLNQGKQTGMSRLQVLMSAISLRRTKDTALGGLPPKIVETCYVELSFEERKLYDEVKEEIKSLMMHHNSNDRLVSSYSTVLSMILRLRQICADFSMVPLDFKSCLFSSTDIEGIEMNQSGCIFCYIRKFSFAGNHVSKNPELLQTLIRMLQDGEDFDCPICLSPPTDIVITCCAHIFCRECILKTLQRSNSSCPLCRRSLSETELFSAPPESFKTDDTDVTTELCTAEVRSSTKVSTLIKLLTESRDQNPATKSVVFSQFRKMLLLLEEPLKAAGFKTLRLDGTMNAKQRAQVIEQFQLSEVDEPMILLASLRASSTGINLTAASRVYLMEPWWNPAVEEQAMDRVHRIGQKEEVKIVRLIAKNSIEEKILMLQEKKKKTITSRGSGRRSRDIAGMGIEDLHFVLGE

SEQ ID NO: 10866 - protein, 159 aa, Arabidopsis thaliana
MDPMDIVGKSKEDASLPKATMTKIIKEMLPPDVRVARDAQDLLIECCVEFINLVSSESNDVCNKEDKRTIAPEHVLKALQVLGFGEYIEEVYAAYEQHKYETMQDTQRSVKWNPGAQMTEEEAAAEQQRMFAEARARMNGGVSVPQPEHPETDQRSPQS

SEQ ID NO: 10867 - protein, 185 aa, Zea mays
MAEAPASPGGGGGSHESGSPRGGGGGGSVREQDRFLPIANISRIMKKARPANGKTIPANGKIAKDAKETVQERVSEFISFITSEASDKSQREKRKTINGDDRLWAMATLGFEDYIEPLKVYLQKYREMEGDSKLTAKSSDGSIKKDALGHVGASSSAAQGMGQQGAYNQGMGYMQPQYHNGDISN

SEQ ID NO: 10868 - protein, 613 aa, Nakaseomyces delphensis
MADGVFQGAIGIDLGTTYSCVATYESSVEIIANEQGNRVTPSFVAFTPEERLIGDAAKNQAALNPKNTVFDAKRLIGRRFDEESVQNDMKTWPFKVVDVEGAPVIEVEYLGETKQFSPQEISSMVLTKMKEIAEAKIGKKVEKAVITVPAYFNDAQRQATKDAGAISGLNVLRIINEPTAAAIAYGLGAGKSDKERHVLIFDLGGGTFDVSLLHIAGGVYTVKSTSGNTHLGGQDFDTNLLEHFKSDFKKKTGLDISNDARALRRLRTAAERAKRTLSSVTQTTVEVDSLFDGEDFEASLTRARFEDLNAALFKSTLEPVEQVLKDAKISKSQIDEVVLVGGSTRIPKVQKLLSDFFDGKQLEKSINPDEAVAYGAAVQGAILTGQSTSDETKDLLLLDVAPLSLGVGMQGDIFGVVVPRNTTVPTIKRRTFTTVGDNQTTVQFPVYQGERVNCKENTLLGEFDLKNIPPMQAGEPVLEAIFEVDANGILKVTAVEKSTGKSANITISNAVGRLSSEDIEKMVNQAEEFKAADEAFAKRHEAKQRLESYVASIEQTVTDPVLSSKLKRGSKTKIEAALADALAALQIEDGSTEEYRKAEVGLKRVVTKAMSSR

SEQ ID NO: 10869 - protein, 613 aa, Zygosaccharomyces rouxii
MAEGVFQGAIGIDLGTTYSCVATYESSVEIIANEQGNRVTPSFVAFTPEERLIGDAAKNQAALNPENTVFDAKRLIGRRFDDESVQKDRKTWPFKLIDVEGNPVVEVQYLGETKTFSPQEISSMVLTKMKEIAEAKIGQKVEKAVITVPAYFNDAQRQATKDAGSISGLNVLRIINEPTAAAIAYGLGAGKSEKERHVLIFDLGGGTFDVSLLHIAGGVYTVKSTSGNTHLGGQDFDTNMLEHFKNEFKKKTGNDISGDARALRRLRTACERAKRTLSSVTQTTIEVDSLYNGDDFETSITRARFEDLNSSLFKSTLEPVEQVLKDAKVPKTEIDEVVLVGGSTRIPKVQKMLSDFFEGKQLEKSINPDEAVAYGAAVQGAILTGQSTSEDTKDLLLLDVAPLSLGVGMQGDIFGIVVPRNTTVPTIKRRTFTTVADHQSTVQFPVYQGERVNCKENTLLGEFDLKNIPPMQAGEPVLEAIFEVDANGILKVTAVEKSTGKSANITISNAVGRLSSDEIEKMVNQAEEFKAADEAFAKKHEARQRLESYVASIEQQVTDPVLSSKLKRGSKTKIESALSDALASLEIQDASTDDLRKAEVGLKRVVTKAMSSR

SEQ ID NO: 10870 - protein, 473 aa, Triticum aestivum
MLLPVRRPHAAPSRPASPRHVSSSLGPRSRQVDRVLRGSTVARASPAATDASASAGLGRRAVVGMALAVSLSAPAYCRAPPPSSALTEENLLFLEAWRAVDRAYYDKSFNGQSWFRYRERALRDDPMNTRQETYAAIKKMLATLDDPFTRLLEPEKFKSLRSGTQGALTGVGLSIGYPLALKGSPAGLSVMSAAPGGPAEKAGIVSGDVILAIDDTSAQDMDIYDAADRLQGPEGSSIDLTILSGADTRHVVLKRERYTLNPVRSRMCEIPGSEDSSKIGYIKLTTFNQNAAGSVKEAIKKLREKNVKAFVLDLRNNSGGLFPEGIEIAKIWMDKGVIVYICDSRGVRDIYEADGASTIAASEPLVVLVNKGTASASEILAGALKDNKRAVVYGEPTYGKGKIQSVFALSDGSGLAVTVARYETPAHTDIDKVGVTPDRPLPASFPTDEDGFCSCLRDPASCNLNAARLFVRS

SEQ ID NO: 10871 - protein, 498 aa, Leptospira interrogans serovar Lai str. 56601
MQTALYISVLIISSCGLVYELLAGTIASYLLGETVTQFSLIIGTYLFSMGVGSWLSKYLEKDLIPKFLEIELAIGLVGGFSSAILYLSFGQIRYFQIPLFLLVILIGILVGLEIPVLLRILKKELQFKELVSRVLSLDYVGALLASILFPIFFAPKLGLMRTGFIFGILNVGVALWGTWVLPLRQSKIIILRAQSVVVLTLLILGFSYSDLITYYSEESLYTDEIILSKQTQYQRIIVTRWKNEIRLFLNGHLQFSSRDEYRYHETLVHPALLAHPAPKKVLVLGGGDGLAVREILKHKNVESVTLVDLDSAITNLFSEHGILKELNEESLKNSKVTVINTDAFLWLEESDQTFDVVLIDFPDPSNFSLGKLYTTAFFHTLKRRMNETSVLEIQSTSPLFARSSYWCIERTIASLGFYTLPLHVYVPSFGEWGFVLAGQRPIQFKKKFPKDLKFLNIQELESIQTFPQDMSRVPVEINRLDNQALVRYYDREWNRILD

SEQ ID NO: 10872 - protein, 605 aa, Yarrowia lipolytica CLIB122
MSVAPSSNPNPIHHLSRVEDVPLSQTFRGNITDFVRSGGFADDDSKPCCIDAKTGQQLTQKQVWDYADKFRALLHHDNNLCPFNANTTDPALGDVMITLVPNHLFITSLHFAALDLGATVSPGSAGYTVAELVNQINLTGASLIVYTRPVFKVVREALAQIVVPVKIVEFEGLIERAEFVQSHKIQSTKKVTLSPEESYSRIAYLGMSSGTSGGLPKAVRLSHFNMASSAELSKRAAPSIAGSEQIAGAIIPVNHVYGLAKFLIAMPKSGATTVFHSKFDLIEILEAQQKYKVNMYALVPPIIVVLAKHPAVEKYIPSLREHLRYVSSGAAPLGANVIEACNKRLAGTASGENEFGGLKIVQGYGLTETSPVVSTFDPNDPERHARSCGKLVPNTQARIVSEDGVDQPAYELKDLSQLEAELKKGNLPTGELWLRGPQIMDGYHKNDEANAESFVDATDYTSNMPFYMKRWFRTGDVALVDTLGRYMIVDRTKEMIKSMSKQVAPAELEDILLGHPQVADAAVIGVQQVEKGTEAPRAFVVLRDPKFDAVEIKKWMDAQVPKYKQLHGGVVVLDAVPKNASGKILRRLLRQRENDVVLGLDKAKL

SEQ ID NO: 10873 - protein, 283 aa, Prochlorococcus marinus str. MIT 9515
MKDITTWIDEYQKGSRFGLKGKVLLKKNSKFQEILIIESDYYGKALMLDRCWMTSMRDEKYYHECLVHPALSSIKEKSRILIIGGGDGGTARECLKYSQVEKIDLVEIDEEVIKASKKFLQEIGGTAWIDKRLTIHIDDGVKWVEKAKNNFYDCIFIDCSDPSEFSNLLFTDTFYKECKRILTQKGILATQSESPESFKNIHIHILKSLKKVFKLSETMYSFVPIYPSGIWSWTFASKGELNLSTPCCNEVTTIEKGCDIWNLNFQNAAFKMMPNKIVKELNS

SEQ ID NO: 10874 - protein, 478 aa, Gemmata obscuriglobus UQM 2246
MPLRNLAWLVAVPAIIALGLAISYSAPAPDKDYRLVRQVVDVIAEVDANFYRELSDDERQQFVEDMINGGLRKLDPHSEYLNAEHLKRFETDAQGSFGGVGIVLTIDPETKFLKVDHPMPGTPAYDAGIIADDLIVKVGDKSTEGITVPDARKLITGEPDTSVTLTTRRAGRNPAEQQVTLKRAQVAQHPVSGVRRRADDPQKWEWFADKPGGIGYIRVSGFSELTTKEIKAAVEEIERDGGKAIVLDLRENPGGLLSEAVSVSDLFLTEGKIVSTRDRRSKERTFEAKKDGTMFLPAEQKPIAVLVNDGSASASEIVAAALQDNKRAVVIGERSFGKGSVQKLLRLPGDPPSAVKLTTETYWRPSGANIDRIRASKDAPDQWGVRPDIEVPTTKEDKLRAEVEQLKRQWVAGKPDVVGPKPPAAPNPKGIDGKPIVDDSKPYTDQPLNKALEVLRNKLRGVGTAPAPARRLPERVLG

SEQ ID NO: 10875 - protein, 356 aa, Solanum lycopersicum
MDGKENNGVNGSNKVGIPKCCLKARVFDPELEANCHSTVVSGWFSQPPTSFDGKEKVLYFNNPMWPGEAHSLKVEKVLFKGKSEFQEVLVFESASYGKVLVLDGIVQLTEKDECAYQEMIAHLPLCSIKSPKKVLVVGGGDGGVLREISRHSSVELIDICEIDKMVIDVSKKYFPDLAIGFEDPRVNLHVGDAVEFLKNTPEGKYDAIIVDSSDPVGPAIELVEGPFFAKIARALRPGGVLCNMAESMWLHTHLIQDMISICRETFSSVHYAWASVPTYPSGVIGFLLCSTEGPFVDFKHPVNPIEKLEGALQHQRELKFYNSEMHEAAFALPCFLRREVSGLRDSPRSAGSGVKI

SEQ ID NO: 10876 - protein, 663 aa, Pseudomonas aeruginosa UCBPP-PA14
MFELPGDNAWLHFMQDDLPRLRQQGWFIDIRADFAYDLTPIDAWYAEVEEADDRQWFELELGIQVAGQRVSLLPALTELIRRSPALLDPRALARHADEEQLVLRLELNPPLRVALPFGRLKPVLATLSDFYLGDPEPQRKLRLGAPDAARLADLDELPLAWEGGDNLRDFARRLRSFQARPATPPQGLRAELRPYQLEGLSWMQTLRELDSGGVLADDMGLGKTLQSLAHVLLEKQAGRLDTPALVVMPTSLIPNWLDEAERFAPDLRVLALHGAGRRRDFARIDEHDLVLTTYALLPRDAAELGKRRFHLLILDEAQNIKNATTKAAVAARELAARHRLCLTGTPLENHLGELWSLFHFLMPGWLGDARQFAQDYRTPIEKHGDEARLSHLAARLRPFLLRRTKEQVASELPPKSEFTQFVELSEAQRELYETVRLALDRKVREEIARRGLARSRIVILEALLKLRQVCCDTRLLQRQEDGARSGRALSSGKLAYLLDMLDELIAEGRRVLLFSQFTSMLALIEDALRQRGVDYVLLTGETRDRRAPVQRFQSGKVPVFLISLKAGGVGLNLTAADTVIHYDPWWNPAVENQASDRAYRIGQDKPVFVYRLIARGTVEEKIQHLQQEKAALADGLFSEGNGDGWKLDEADIDALFAPLPKAL

SEQ ID NO: 10877 - protein, 174 aa, uncultured marine gamma proteobacterium EBAC31A08
MNKFYIFGLLFFTLNAFSCSDLLDTDMRVLDSAESRNLCEFEGKALLVVNVASRCGYTYQYAGLQKLYESYKDEDFLVIGIPSRDFLQEYSDESDVAEFCSTEYGVEFPMFSTAKVKGKKAHPFYKKLIAESGFTPSWNFNKYLISKEGKVVSTYGSKVKPDSKELISAIEGLL

SEQ ID NO: 10878 - protein, 584 aa, Zea mays
PPPSRGPYEPLVLSLPGEHPVVQVPPSINCRLLAHQRDGVRFLYNLYRNNHGGVLGDDMGLGKTIQTIAFLSSVIGKGNGHGQSTNKGKMTGPVLILCPTSVIRNWENEFSEWAEFSVAVYHGPNRDLVLGKIENQGLEVLITSFDTFRIHDKVLCGISWELVVVDEAHRLKNEKSKLYTACLGITTQKRFGLTGTIMQNKIMELFNLFDWVVPGCLGDREHFRAYYDEPLKQGQRLSAPERFVQVADARKKHLVSILREFLLRRTKEETIGHLMLGKEDNIVFCKMSDVQKRVYRRMLQQPDIQILINKDVRCSCGSPLPQVECCKRTEPDGVIWSYLHRENPEGCSICPFCLVLPFLVKLQQISNHLELIKPNPKDELEKQKKDAELAAAVFGADIDLVGGTAKSENFMGLSDAENCGKMRALERLLSLWTGQGDKILLFSYSVRMLDILEKFLIRKGYCFSRFDGTTPMNARQSLVDEFNRSPSKQVFLISTRAGNLGVNLVSANRVVIFDPSWNPAQDLQAQDRSFRYGQRRHVTVFRLLGAGSLEELIYSRQIYKQQLSNIAVSGKIERRYFEGVQVFS

SEQ ID NO: 10879 - protein, 548 aa, Zea mays
  misc_feature (284)..(284): Xaa can be any naturally occurring amino acid
  misc_feature (296)..(296): Xaa can be any naturally occurring amino acid
MGLGAAVALALGDPPADYASIAAVGLFVALMCVCIVVGHLLEENRWMNESITALFIGLGTGAVILFASSGKHSRVLVFSEDLFFIYLLPPIIFNAGFQVKKKQFFRNFITITLFGAVGTLISFTVISLGALGLISRLNIGALELGDYLALGAIFSATDSVCTLQVLSQDETPFLYSLVFGEGVVNDATSVVLFNAIQNFDPGNISSAKLLNFIGSFLYLFGSSTILGVASGLLSAYTIKKLYFGRHSTDREVSIMMLMAYLSYMLAELLDLSGILTVFFCGIVXMSHYTWHNVTEXSSRVTTKHAFATLSFISETFLFLYVGMDALDIEKWKIVGQTYSPVKSIALSSTILALVLVSRAAFVFPLSFVSNLTKKTPNGKISFRQQVIVWWAGLMRGAVSIALAYNKFTRSGHTQQPSNAIMITSTISVVLFSTIVFGLLTKPLIRLLIPSRHLSREPSALSEPSSPKSFFEQLAANSPGHPDLENGISLRRPASLRFLLVSPARSVHHYWRKFDDSFMRPVFGGRGFVPFVPGSPTESSLPLLPGNEN

SEQ ID NO: 10880 - protein, 545 aa, Physcomitrella patens subsp. patens
MAAVGIVDSGNHMAVVAVSLFVTLLCACIVLGHMMEEFQYISESVTAIFLGFCTGIVVLVTSSGASSHVLQFNEELFFIYLLPPIIFNAGFQVKKKSFFRNFVAIMLFGVIGVFISVAIITAGCKFMFPKLGLEKLVIGDYLALGTIFSATDSVCVLQVLNQDDSPLLYSLVFGEGVVNDATSVVLFRAVQKLALKHFTGMEVLQICGSFLQLFFSSTVLGVAIGLLSAYIIKTLYLARHSTDREIALMTIMAYLSYILAELFYLSGILTVFFCGIVMSHYTWHNVTESSRVTTKHGFATMSFIAETFIFLYVGMDALDVDKWNMVQITAGNYFGLFMTLIVLILVGRAAFVFPLSALSNYMRKSSDTKITFRQQIMIWWAGLMRGAVSIALAFNQFTSSGDAKSPEYAAAITITIGIVLFSLTVFGTATKPLMHWVLLPTSRSELGESEPNTPKDFAFADFHVPLLLGSSQQTGSPHPGPRRSSLAVLLSAPSNIIHDGWRSFDDGYMRPLFGGRGFVPYNTDVLTNAEDDAAYPFHSPFHSRS

SEQ ID NO: 10881 - protein, 1032 aa, Streptococcus pyogenes MGAS10394
MMARLIPGRVRNEGIKLYEQGLVSFQDDNKGILQIEVETYQVQYGADDEDITCQCDTFHMKHYCKHIAAVEYFLKNDQKGKLFLKQLTNQTKIKETTKKMTSFGSLFLDSLAMNEDDSVKYRLSALGSRSPFSSDYWWSLKINRLPDDRSYVIRDIKGFLQLIKKEGFYQIGKNYFEQLSWLQFDPSSQDLIEFLWRLASDTDKGDNENIFPNHARHLRLPSGFFEEGIHYLTSLYDFTFEGPSQTYHHLFVRSLEAEAGLYEFKVEVHRKSIELQIAEKNVQYLFDNDYLLYQDTFYHLTLKQRKMVQAIRSLPIEADLAKHIHFDLDDHAKLAASLSDFKQIGLVEAPKSFAIRDFEVTFQFDLLNRDEISCQLMFDYGNYQVSDKASLEALPFASHLKKEEKINRSLLAFGFSPQFYSKKRLTSAKELYTFFEETVPCFERLGNVALSTAIQALQVKEMPKIAIKRNQGLLDISFDFSTIIENDIDQAVTALFQNNPYFVSQTGQLVVFDDETQKVSKSLQELRARQLKNGHLQLDGIRALQVSKLFEGMTSVHFSKELEELAYHLQHPETFSIKPLPVKAQMRDYQRNGVQWLSMLNHYGFGGILADDMGLGKTLQTLAFLASHLKSDSKVLILSPSSLIYNWFDECQKFTPQLDVVVSYGLKQTRDQIIEEGHQITITSYSSFRQDFETYQAFHYDYLILDEAQVIKNAQTKISHCLRAFNTANCFALSGTPIENKMLEIWSIFQIVLPGLLPTKKEFLKLTAEQVSRYIKPFVMRRKKEDVLPELPDLIETNYSNEMTDEQKAIYLAQLRQMQDQIRNSSDVDISRQKIEILSGITRLRQICDTPSLFMDYQGESGKLDSLRILLTQIKENGHRALIFSQFRGMLDLAKQEMTALGLTSYQMTGSTPANERQEMTRAFNNGSKDAFLISLKAGGVGINLTGADTVILIDLWWNPAVEMQAISRAYRIGQKENVEVYRLITRGTIEEKILELQESKRNLVTTVLDGNESRASMSIEEIKEILGLNTH

SEQ ID NO: 10882 - protein, 286 aa, Buchnera aphidicola str. APS (Acyrthosiphon pisum)
MDHKKTWHEKLYCHLGQYFLIEKMLYKKKTPHHQVMIFKNSVFGKIMVIDDIVQTTERDEFIYHEMLTHVPIIAHGSIKSVLIIGGGDGGILREVCRYKMIENITMVEIDVNIIDLCKKYFPNHSNQAYQDSRLNLIIDDGLNFIKRTKEKFDLIISDSTDPIGCGKNLFRSEFYFNCKNHLEENGIFVAQNGVFFLQKNETILTYKNLKKYFYDTRFYQANVPTYYGGVMVFAWGTNNIEYRKNSLEKIQIRIKNTKLDFNYYNAKIHISSFYLPQYILNELNES

SEQ ID NO: 10883 - protein, 444 aa, Legionella longbeachae
MSAYVKNFDEHKEIKSSRDICKSLKPVPTAYMDNKHCEHCYPEKRSHFRRKFFNLFHYFIFNPFIYLLSKLFLLSEQDFLRFNNLLNQLVINIFQKIKLYTKTQTIDRKQFNNSVLAFWDEAQKRGLEMYNFKASNLHTLYFKLVYNRKKYYFIQTPISLISQKNTRFDEDTKYDNKWSLKKKLLDSQIPCPLGRVFISSKNAYNYGISLGFPLVVKPLSESLSIHTSCTIQTPNELKEAIKIVKQVDFRVLVEKHIPGDVYRSLIINDSLIACVRRQPEGIVGDGVTTLQELIDKKNKVTWKERHGEYPYKITRNSNLMKILAAQGVALNTVINKGQQIFIAKKVTMSSGAKISNVIDLIHPENKLLLEKVHKILNVPLTGLDFICQDISLPWHKQQFGIIENNSFPYIELHLNPSDGKGINVAGKIWDYVLDVLSRRNEQPN

SEQ ID NO: 10884 - protein, 550 aa, Cytophaga hutchinsonii ATCC 33406
MNIKRWGVITAVAIGSVALLSAFKQTDKYFEIAKNMELFSAVYKEVNLLYVDEVNPSQTMTTGIDAMLESLDPYTNYIPEDKIEDFRTQMTGQYGGIGAVIGERKDKIIILMPYEGFPAQKAGLQIGDEILSVDGIVTTSKNSGDVSKLLRGQADTPLKIKVKRFNTPEPLEFTLVRQKIKISNVPYFGMVNTNTGYIKLSDFTQAASIEVKKALTDLKAKGATQIIFDLRGNPGGLLNEAVNISNIFIPKDKLVVSTKGKVSEWNTKYITELVPDDLNIPIAVLVSGRSASASEIVAGVIQDYDRGVIIGQRSYGKGLVQTTRELPYNSQIKVTTAKYYTPSGRCIQAIDYAHRAADGSVSKFADSLHVAFKTTNGRTVYDGGGVTPDITVVQDSISPILVALVSKSLLFDYATEYRSKHESIGDARTFNLSDRDYQDFVTWLKDKDYSYTTKVEKTLDEMTKQSKQEKYFDAMKDQLDQMKKVIAKDKENDLIKFQSQIMEYLEEEIASRYYLQKGIIESSFDSDKDIQSALEVLNNKTKYNSILSGK

SEQ ID NO: 10885 - protein, 111 aa, Arabidopsis thaliana
MASSMLSSATMVASPAQATMVAPFNGLKSSAAFPATRKANNDITSITSNGGRVNCMQVWPPIGKKKFETLSYLPDLTDSELAKEVDYLIRNKWIPCVEFELEHGFVYREHG

SEQ ID NO: 10886 - protein, 536 aa, Bradyrhizobium japonicum USDA 110
MIAAKFQTFLILLAVLAGTALVARRFNIAPAILLMLSGVGLAFVPGMPPVELPPELVLLMVLPPLIYSASVAMSWREFRNNLRPIVLLAVGAVIFTAAMVAAATHYLIGLPWAIGFLLGAIVAPPDVVAPLAIARRLNIPRRLLVILEGEGLANDATALILYRFALAAIMVGHLSLPMAAGEFVLIIAGEIAFGIGVGWLSLRFRRWAKDQQVELTLSLITPYVSYWLPEHVGGSGVIATVACGLYVSWNGPLLISSATRLQGIFFWDLIIYLIEGLLFLLTGFQMRALYEKSKAFPLDDILIATAVVLTIIVTARFAWLYPATYLPRILSKSLRKRDPSPPWQWPFVLAFTGVRGAVSLAAALALPFTLPDGNAFPYRDLILFVAFGVIFVTLIGVGLTLPPVVRWLGVAEAGRNEHVAEHEAEIAARRQALDAALKSLDALTEAKEVSDEVMRLLRARHEIRVNQLPDSLDPTHHDVSAAGTALTRELIAAERKFIHDLLRDGQITDETRRRIERDLDLEEASLANREYRGVPL

SEQ ID NO: 10887 - protein, 473 aa, Chromobacterium violaceum ATCC 12472
MKKIAWLVAGAMAGGVLTLSMQALADKEASPLPLNELRTFAEVFSLIKQSYVEPVTDKKLIDEAIKGMLTGLDPHSDYMDPEEFKELREGTQGEFGGLGIEIGAEDGLVKVVSPIEDTPAQKAGIKSGDLIIKIDDTPVRGLSLNDAVKKMRGKPGSKVTLTIARKNEAKPLVFTLARAVIKTKSVKYRMLESGYGYVRIAQFQEHTAEDLAAGLQKLYQENKQPLKGLVLDLRDDPGGLLNGAVGVAAAFLPKDKLVVYTEGRTPDAKMRLTATLQNYARQNGSDPLAKLPVAVRSVPLAVLVNGGSASASEIVAGALQDHKRAVLVGTQTFGKGSVQSILPLGSQGGIKLTTARYFTPSGRSIQAKGITPDVVAEDATLTAADQALRVREADLENHLANPNGDDKPAKTAKPAAKPAQPPAPAPVPEGKDKEPAAPDAQGGQRMPNPKSDYQLSQALNVLKVQQILQKNEN

SEQ ID NO: 10888 - protein, 1249 aa, Vitis vinifera
  misc_feature (93)..(93): Xaa can be any naturally occurring amino acid
MAEEEDRILLSSLGVTSANPEDVEREILAAYIDHIVPLGCRSVRVSFSNEPEATNEAENGSEAGRSTEEEFLDKSKATELSSTSQAKLYSKLXALEVEIDAVAYTVQQARNTERNENHVSHGNDNRAQGDAEDDKLVIQASPNNLTLQHALAADRLRSLKKTKAQLEIELSDWQKEKPSKTVEHDKVIQNLVKEEARPKKRLKEIPKSGKDLKKRKKTISFDDDVDFDAVLDAASAGFVETERDKLVRKGILTPFHKLKGFERRLQQPGPSSRGNLPEEGDKIDDLASASIARAVQSISESAQARPTTKMLDSETLPKLDAPSHPFHRLKKPLKYPLPLDSEVEKNKDKKRKKKRPLPGKKWRKIISHEEELLEESEDTSDNLVTSSNEEVNREDIEDADDNEPPCVTLEGGLRIPESIFSKLFDYQKVGVQWLWELHCQQVGGIIGDEMGLGKTIQVLSFLGALHFSNMYKPSIVICPVTLLRQWKREAKKWYQSFHVEILHDSAQDPASRKKRAKSYESEDSLDSDDEENLSSKDTKKWDSLINRVLRSQSGLLITTYEQIRLQAGKLLDIKWGYAILDEGHRIRNPNAEVTILCKQLQTVHRIIMTGAPIQNKLAELWSLFDFVFPGKLGVLPVFEAEFAVPISVGGYANATPLQVSTAYRCAVVLRDLIMPYLLRRMKADVNAQLPNKTEHVLFCSLTTEQRSVYRAFLASSEVEQIFDGSRNSLYGIDVMRKICNHPDLLEREHAYQNPDYGNPERSGKMKVVAHVLKGWKEQGHRVLLFAQTQQMLDILENFLIAGGYVYRRMDGFTPIKHRMALIDEFNDSDDVFIFILTTKVGGLGTNLTGANRVIIYDPDWNPSTDMQARERAWRIGQTRDVTVYRLITRGTIEEKVYQRQIYKHFLTNKILKNPQQKRFFKARDMKDLFVLNDDGEDASTETSNIFSQLSEDVNVVGKHKDNQDKQKSIIPVSSHACGAVDEGNNSTIGSSRSGENEKDDQSDEMDKETNILRSLFDAHRLHSAVNHDAIMNAHGDEKMRLEEEASRVAKRASEALRQSQMLRSRESISVPTWTGRSGAAGAPSSVSRKFGSTVSSQLINRSKSSEESSSNGMSKPNGIAAGASAGKALSSAELLARIRGNQERATDDGLEHQLGSSSANRARSTDSGPSSSRSTHNLSSVQPEVLIRKICTFIQQKGGSTNSTSIVQHFKDRIPSKDLPLFKNLLKEIATLEKDPNGSSWVLKPEYRL

SEQ ID NO: 10889 - protein, 414 aa, Glycine max
MAFTESSLLLPSVSGTNKNKNKVPEDKWYLAYIVYFTLGLGYLLPWNAFITAVDYFSFLYPDASVDRIFAVVYMIVGLVGISLIILYSHKSDAYVRINVGFALFVVSLLIIPLLDAFYLKGRVGLYSGFYVTAAAVGLSAVADALVQGSIVGCAGELPERYMQAVVAGTAGSGVLVSALRIFTKAVYPQDASGLQKSANLYFSVSIVIVFVCMVFYNMVHKLPVMKYYKELKVEAVTANEDNGPLTGPVWRSTVWNIVRRIKWYGFGIVLIYVVTLAIFPGYITEDVHSQILKDWYPILLIAGYNVFDLVGKCLTAVYLLQNAKVAIGGCIARLLFFPLFLGCLHGPKFFRTEIPVTILTCLLGLTNGYLTSALMILIPKIVMLQHAETAGIVSVLFLVFGLAAGSVIAWFWVI

SEQ ID NO: 10890 - protein, 521 aa, Aphanothece halophytica
MTIEAAMGEEAIKENLEQFLIVLSVSLGVATLSQISSFFRQIPYTLLLVIVGLGLAFVDIRLVNLSPELILEIFLPPLLFEAAWNIRWRNLKKNLFPVVLLAIIGVVISVVGIGFSLNYFSGLSLPIALLVGAILAATDPVSVIALFRELGVGERLTVLMEGESLFNDGVAVVAFSLLVGIPLGTQEFSVTNTLIQFVTLQGIGIGCGGVIGFGISYLTQRFDLPLVEQSLTLVSAYGTYLITEELGGSGVIGVVTVGLILGNFGSRIGMNPRTRLLVSEFWEFIAFFVNSIVFLLIGDQINIRGLADNGQLILITIIALVIIRAISIYGLGTISNLITKQDISWQEETVLWWGGLRGSVSIALALSVPVMLDGRQDIIEAVFGVVLFTLLVQGLTMQTVIEKLGLIGDRAQRRTYSELIARRSALERVLAHLNAVPPSPSIRMKSLKTTKEASKGQLESRQTKKLRSYNNSYPQLRSLEQEQLRELTFKVEADTYAELIRAGKLNNNLSPLLQEVLAKPE

SEQ ID NO: 10891 - protein, 38 aa, Zea mays
VLVIGGGDGGVLREVSRHSSVEQIDICEIDKMVVDVFN

SEQ ID NO: 10892 - protein, 476 aa, Synechococcus sp. WH 7805
MSADAAPFLAPGIAWALVVLFSVLWIALGIAWGRRGKGDADDFMLAGRNIGLALSTATLMASWVTGNTTLLAPEFGYRTGLWGMFSYALAGLGLILFAPLAARIKQLMPNGRTSGDFIRLRYGRLAWWVFMVITAVYTLGFLMTQAMGAGLLLQALSGFDYHVGMVVVIGVATVYTLFGGMRAVIGTDFIQSLLIMVLLAVVAVLAFRQFPMPEVHARLIAEHPDRLDLLLPAGLLIAWNSALFSMGEVFHNNIWWSRVFASRRSVVMTSFLLGGLAWMSVPLVTGSIGLVALARDLQLEQVNMVFPVMAADLLGAGGAALVFVVVFASLTSTLDSLLASTADLLAEDVYFRLLRPQANDAQLKQAARLMVVGLAVVTVALSWPRLDSLASVLFFTGALVASTVWPVACGLYWSSANRWAAIVAMVAGSAVGLTAYVLIAPYCAAVFSAAVSAVVMVVGSRRKPERFDFNLLKEEG

SEQ ID NO: 10893 - protein, 553 aa, Agastache rugosa
MLSVASAETQNPELSSHALQPQTQSCEETNHIFVSKLPTIPISNHLPLHTYCFENFSQYPDRPCLLVGSDGKSYSFAETHLICRKVAAGLSNLGIRKGDVVMALLQNCAEFVFTFMGASMIGAVITTANPFCTSKEIFKQFNASKSKMIVTQSMYVDKLRDTGDDSLRLRRGFLRRHDRQPAGEMPAFLRANGGRRGRRPRRSRSIPTTPSRCRSLGTTGLPKGVILTHKSLITSIAQQVDGENPNLYLKPDDVVLCVLPLFHIYSLNSVLLCSLRAGAGVLLMQKFEIGALLELIQLHRVSVAAVVPPLVLALAKNPLVDNFDLSSIRMVLSGAAPLGKELEAALLSRLPQAVFGQGYGMTEAGPVLSMSPCFAKVPLPTKSGSCGNVVRNAELKVVDPETGCSLPRNQPGEICIRGPQIMKGYLNDAEATARTVDVDGWLHTGDIGYVDEDDDVFIVDRVKELIKFKGFQVPPAELEALLISHSQIFDAAVVPQKDDAAGEVPVAFVVPANGSELTEEAVKEFVSKQVVFYKRLHKVYFVHAIPKSPSGKI

SEQ ID NO: 10894 - protein, 146 aa, Arabidopsis thaliana
MDPMDIVGKSKEDASLPKDVRVARDAQDLLIECCVEFINLVSSESNDVCNKEDKRTIAPEHVLKALQVLGFGEYIEEVYAAYEQHKYETMQDTQRSVKWNPGAQMTEEEAAAEQQRMFAEARARMNGGVSVPQPEHPETDQRSPQS

SEQ ID NO: 10895 - protein, 469 aa, Bacillus cereus G9241
MVVAFLIGAGGMFAGMSLFGVNPAEVTQTISSGNASTAQGNLAKINEAYALIDSRYVEDVKDEKLVEGAIQGMLSTLKDPYSTYMDKETAKQFSESLDPELEGIGAEVNKTDGKLIIVSPIKGSPAEKIGIKPNDQILSVDGNSVKDLSREEAVLKIRGKKGTTVAIEIKRAGVADPIVFKIKREKIPIFTVFSSVKQESGKDIGYMQITSFAENTAKEFKDQLKELEKKNIKGLVIDVRGNPGGYLNSVEEILGEIMTDKKPMLQVEQRNGEKKKFSTELKERKPYPISVLIDNGSASASEILAGALKEGEGYDLIGEKTFGKGTVQQAVPFKDGSNIKLTMFKWLTPDGNWIHKKGIAPTVEVKQPDYYHATPIQIEKTLSYNSNDVQVKHAQEMLKSLGYVTGREDGYFSKETESALKAFQNANKMEATGQLDKKTAEAIQTKIIEKIRSGENDLQLQSALKLMAK

SEQ ID NO: 10896 - protein, 845 aa, Chlamydomonas reinhardtii
MVTFEDGTAVLYDQDSKVITKGRYKAFGKASASDLTFELGNWHAEMDKQLSVEDFRSGACFVSNTCSTSAAAAAAAPAPRKPALSSFKPHVPVGGGTVAGRPAGAGGPSGSGRAAAAAGVLPTGLHDPHAPGAVVLNTVQWKGGSGKLRDGRPVTPVTVDPYLGRLLRPHQAEGVRFMYEAVMGLRTADKTGCILADEMGLGKTLQVITLAWTLLRQGPEGRPVAGKVLVVTPATLVDNWGREVKKWLGSERLQALCLQQSPTAKQQILEFRHGVHQKMMITSYETLRKHAKDLAGVFDLLVCDEGHRLKSVGGNKTIDALLSLGCQRRVLLTGTPVQNDLQEFYALLSFVAPEALGSAALFNRVYGIPITRSQEGTATAEDKELGAARSSELKAKVSAFILRRTQALLAKHLPPLASLTLFCRPTEQQVSLYTAVLRSKAVASLLGGGGGGGEDNTLAVITALRKARTQCKMQVLSELLRGIGAVGERCVVVSTSTAALDLVGRLSTVRIDGATSVDGRQIIVDNFNKLNMGQVFLLSTRAGGAGLNLVGANHLVLYDSDWNPAMDQQAMARIWRDGQTKPCHVYRMLTTGTIEEKVYQRQLMKADLASATMVGGGAGGGGKSGGGKFTREELRALFSLNTATASDTRDLLPPGRVAGLRWLEPEEFAAPADSPLAVAVATGLVTCINQMAAHSLEPEEAVAAAPGCEGAAGGAAAGSGSGAQPMGAEESLQREGAGVGKPARAARRARAQAQAVVESEDSMDGDFEDGKGAQESEEEVDVEEEAVEEAPAPAPPSQRRRLLQSQGAGQAGQQEEEVVVAAAAGADSGLPAAHDNPDELNLEDW

SEQ ID NO: 10897 - protein, 611 aa, Lysinibacillus sphaericus
MSKIIGIDLGTTNSCVSVLEGGEPKVIPNPEGNRTTPSVVAFKNGERQVGEVAKRQSVTNPNTIISIKSKMGTAEKVTVEDKDYTPQEVSAMILQYLKGYAEDYLGEKVTKAVITVPAYFNDAQRQATKDAGKIAGLEVERIINEPTAAALRYGLDKQDQDQKVLVFDLGGGTFDVSILELGDGVFEVLATAGDNKLGGDDFDDAIIEYLVAEFKKENGIDLSKDKMAMQRLKDAAEKAKKDLSGVTSTQISLPFITAGEAGPLHLEISLTRAKFDEITLPLVNRTVGPVRQALSDAGLSTSEIDQVILVGGSTRIPAVQEAVRKETNKEPHRGVNPDEVVAMGAAVQGGVLTGDVKDVVLLDVTPLSLGIETMGGVFTKLIDRNTTIPTSKSQVFSTAADNQPAVDIHVLQGERSMAADNKTLGRFQLADIPPAPRGVPQIEVTFDIDKNGIVSVKAKDLGTNKEQTIVIQSDSGLSEAEIERMVKDAEANRDADAKRKEEADLRNEADQLVFQVDKTITDLGEQITEDEKKSVEDARDELKKALEAGELEGIKAAKEKLEGVLQPLVMKVYEQAAAAAQARQGGEADAGAGKKDDGVVDADFEEVKDDK

SEQ ID NO: 10898 - protein, 708 aa, Alkalilimnicola ehrlichei MLHE-1
MHWTESMKRQVIRPALVIAGILLALVLVISGNDGPGRPAPAVAHSELAPDSEQREKASVIADLLTRYHYRGQPLDAGLSERVFDAWLDQLDRERFYLLQEDIDAFDEHRIGLHEQLRHGDLSVPFALYERYRERVAERTEYAIGLLEAGLDFDTDLRFEQDRRDADWAESREALDRLWRKRVTHDALTQKLAGRDEEQVIQTLTQRYERIRRTTEQESGEDVFQRYMDAWAHAFDPHSSYLSPRRSEDFDINMSLSLEGIGAMLQSEHDFVTIVELVPGGPAAQSEALSPGDRIIGVAEGEDGEMKDVVGWRLSDVVDLIRGPRGSVVCLLVLPEAGSGNATPREVVLERNEIKLEDQAASAEVIEVPGEGSGKDRIGVITIPAFYMDFEAAEAGDPDYRSTTRDVRRLLNELKEGGIDGLVLDLRGNSGGSLREAASLSGLFMGGGPIVQVRRSSGELEVLRGGDRANSAPLYDGPLGVMVDGFSASASEILAGAIQDYGRGVIMGKDTFGKGTVQTMINLDRFGLGNGEDGAGRLKLTVAKFYRVTGDSTQKKGVQPDIILPSPIDASEFGERGIDNALPWNQISAVDYRRDDTLEELIPALRSRYQTRAEDDPQFQALLRDFEYQLQRRERTDVSLNETTRKQERDAEEQERLALHNARREAAGLEPLEDAESRDDDELPDVLLEAAASVIADLRRLQAAYMAQR

SEQ ID NO: 10899 - protein, 1131 aa, Physcomitrella patens subsp. patens; identical to SEQ ID NO: 7327

SEQ ID NO: 10900 - protein, 657 aa, Pseudomonas aeruginosa UCBPP-PA14
MNRPRLVNRTSATPSTLLQRAIFDGYDFGLKIPYIAGSNRALLELSGFFISAREHPLHRYWRVPKGKLLPELDTLYNRLAELAGGLHSQSWREFSSLVESAQASLDRQAFTWGMLLRIAPLAEGGVLLSGEFHPGVVAVARRMRGVFLRPSSSWRIDTTPELLRSNLILELGLAEEQFEILDTVQELLSDGSFAPSTELPSMSIGGPQQEPAAPSLEDESASDIYLAAVPEIERTEYSSADIEAALQGYSLLAHQPDGIAHLLQRTSALLADDMGLGKTRQAVIAASIRAAGRPILVITLATLLINWQREIQEVYPSATVAIQQDTPEAQWILVNYEQLSPFVANASRFAVMVIDEAQRMKEPTAQCTRHGFDIAAQVPNRYLLTGTPVLNRETELHTLLRLSGHPIGQLPLKEFCDRFAGNPEFRQSLRAELGDWMLRRRKDVLPSLKGKQRQLLKVALSTEERQQYDVLRLEDRPVFARLGALRRYLETVKVRVAMDLLSELDAEDKVILFCEFKPTVAALKELCEQAGHGCVTLVGNDSLTKRQKAIDRFQQDPDCRVFICTTAAAGTGNNLTAANYVFFLGLPWTPGQQEQAEDRAYRNGQLRMVVVKIPLVEATIDEQLWQLLNAKRQVAQDLIEPEQVDGNRALLAASLTG

SEQ ID NO: 10901 - protein, 468 aa, Candidatus Pelagibacter ubique HTCC1002
MTAANVLKFIKEKEVEFVDLRFTDPRGKLQHLTMDQTIVDEEMLNEGVFFDGSSIAGWKAINESDMILIPDTSRMIMDPFTSHNTLILFCDILDAVKRSPYERDPRGTAKKAEAYLKKSGIGDKAFFGPEPEFFVFDDVRINNDPNNTGFKIDSKEGPYNSGTEYANGNMGHRPPVKGGYFPVPPVDSEQDMRGEYLKSLKEVGIKVEKHHHEVAPSQHELGMYFGTLVDQADNVQLYKYVVQMVTHSFGKTATFMPKPIAGDNGSGMHIHQSIWKDDKPVFSGDAYAGLSETALHYIGGILKHAKAINAFSNATTNSYKRLIPGFEAPVLLAYSARNRSASCRIPISLSKNGARCEIRFPDASGNPYLTFAAMLMAGLDGIKNKIHPGESFDKDLYELPPEEVKNIPTVCGSLREAMESLDKDREFLTEGGVFTDDQIDAYIALKFEEIHRFEHAPHPVEFEMYYSS

SEQ ID NO: 10902 - protein, 424 aa, Brucella suis 1330
MVMVQGAPASTAFAAGKDSDVYKELALFGDIFERVRAQYVTPPDDKKLIESAINGMLTSLDPHSSYLNPEAAQDMRVQTKGEFGGLGIEVTMDNDLVKVIAPIDDTPASKAGVLSGDLITKIDGQEVRGLSLTDAVDKMRGEVGAPIELTILRKGADKPITLKINRAIIKVKAVRSRVENDVGYLRIISFTEQTSEDLKKAIKDIQEKVPADKLKGYVLDLRLNPGGLLDQAVAVSDAFLDKGEIVSTRGRDPQDVTRFDARKGDLTNGKPLIVLINGGSASASEIVAGALQDHRRATVLGTQSFGKGSVQTIIPLGENGSLRLTTALYYTPSGKSIQGKGITPDIKVDQPLPPELKGEDVVRGESELKGHIKGNAEDASGSGSSAYVPPDPKDDLQLNEALKLLRGEVPNAAFPPDPKKGVLN

SEQ ID NO: 10903 - protein, 177 aa, Glycine max
MNKCELCKVPARIFCESDQASLCWDCDAKVHSANFLVARHARTLLCRTCRSPTPWKASGASLASAVSVCDRCAASEEPEESEAGNDDEPDTEDDDNDDEDGDNQVVPWSSSPPPPPPSSSSGSEWSECKNDDASISASEQETTTCSLKRQREDDDDASSDRDPRVLRRVGRLNGGCV

SEQ ID NO: 10904 - protein, 302 aa, Musa acuminata
MAQESTWSSFDATMLAEEESRMIAQLLSNYQCFGEQDRDVGCCELPPSSCCSSHAADSCYCWSANENSNPGLCYWSQSGDESDGAHAIGTVPVFTNHCLVGDQVAVNQTLSIHEPTAAHAEMPKRKIESHASEDDFRRQSSKKKLQAPTNALKSVKKARPGRNQKSIVCGDEEENNARSSGRSCCSYSSEEDSQAFQADLNAKTRSNRWPATDPQSLYAKQRRERINARLRTLQNLVPNGTKVDISTMLEEAVRYVKFLQLQIKLLSSDELWMYAPVVHSGMIDGQVNSEIFVSANTRNEWF

SEQ ID NO: 10905 - protein, 166 aa, Brassica napus
MDPMDIVGKSKEDASLPKATMTKIIKEMLPADVRVARDAQDLLIECCVEFINLISSESNEVCNKEDKRTIAPEHVLKALQVLGFGEYVEEVYAAYEQHRYETMQDSQRSVKMNSGAEMTEEEAAAEQQRMFAEARARMNGGGGGVSVPQPDPEQQVDTQQQSNLQS

SEQ ID NO: 10906 - protein, 654 aa, Trichophyton rubrum
MAPAVGIDLGTTYSCVGIFRDDRIEIIANDQGNRTTPSFVAFTDTERLIGDAAKNQVAMNPINTVFDAKRLIGRKFNDAEVQADMKHFPFKVVEKSGKPIVQVEFKGEEKQFTPEEISSMVLTKMRETAEAYLGGTVNNAVITVPAYFNDSQRQATKDAGLIAGLNVLRIINEPTAGGIAYGLDKKADGERNVLIFDFGGGTFDVSLLTIEEGIFEVKSTAGDTQLGGEEFDNRLVNHFVNEFKRKNKKDLSTNARALRRLRTACERAKRTLSSAAQTSIEIDSLYEGVDFYTSITRARFEELCQDLFRSTMEPVERVLRDAKIDKSSVHEIVLVGGSTRIPKIQKMVSDFFNGKEPNKSINPDEGVAYGAAVQAAILSGDTSSKSTNEILLLDVAPLSLGIETAGGVMTPLIKRNTTIPTKKSETFSTFSDNQPGVLIQVFEGERARTKDNNLLGKFELTGIPPAPRGVPQIEVTFDVDANGIMNVSALEKGTGKTNKIVITNDKGRLSKEEIERMLAEAEKYKAEDEAETARIGAKNGLESYAYSLKNTLSDSKVDEKLDAADKEKLKSEIDKVVAWLDDNQTATKEEYESQQKELEGVANPIMMKFYGAGGEGGAPGGFPGAGAGGPGGFPGAGAGGAAAHDDGPTVEEVD

SEQ ID NO: 10907 - protein, 643 aa, Cryptococcus curvatus
MSKAIGIDLGTTYSCVAVWQQDRVEIIANDQGNRTTPSYVAFTDSERLIGDAAKNQVAMNPYNTVFDAKRLIGRKFEDAEVQSDMKHWPFKVISRLASLHQVEYARGEEFSPEEISSMVLIKMKETAEAYLGGTVSKAVVTVPAYFNDSQRQATKDAGTIAGLEVLRIINEPTAAAIAYGLDKKSEGEKNVLIFDLGGGTFDVSLLTIEEGIFEVKATAGDTHLGGEDFDNRLVNHFVQEFKRKNKKDITSNARALRRLRTACERAKRTLSSAAQTSIEIDSLYDGIDFYTSITRARFEELCQDLFRSTMEPVEKVLRDSKIDKSSVNEIVLVGGSTRIPKIQKLVSDMFSGREPNRSINPDEAVAYGAAVQASILNGETSEATQDLLLLDVAPLSLGIETAGGIMTPLIKRNTTVPTKKSEIFSTYADNQPGVLIQVYEGERAKTKDCNLLGKFELSGIPPAPRGVPQIEVSFDVDANGILNVNASDKTTGKSNRITITNDKGRLSKEEIERMLAEAEKYAAEDKEVAERVQAKNALESYTYSLKSTLSENADKFSAEDKETLQKAVDDCIKFLDTADSASKDEIESHQKELEALSGPIMQRFYCSTGGAPGGAPGGAPGGFPGAGGPGASHEDGPSVEEVD

SEQ ID NO: 10908 - protein, 328 aa, Sulfolobus solfataricus P2
MQSLVKILPNGAILIGKRFTIDGHHERPFRVVTHFHADHITGLEKSISISDGIIATPITLDILSLDYAIPPRKAFGLNYDIKMTFEDENIVLKKSDHVIGSAQVLITLENGLEIGYTGDFKNPGKGTPILHPDILIIEATYGRPDFRRPFKDDVESLFADYVRDALMYGPVRIYGYHGKLQEVMISLRKMGVDAPFIVGGKISKMTNIAIKYGYNISQVFDESQSEAKEIMRDSWYISFSHYNEFKRRNGKYYNFLLSGWEFKNVVKKIDEKSYTVSFSDHADFDDLIYYVERTSAKYIITDGGRRSYGKELAEYISKKLGKIAISMP

SEQ ID NO: 10909 - protein, 446 aa, Coxiella burnetii RSA 493
MMKLSEAAKIVNADLTGEDTVFENVSTDTRTIQPGSLFIALRGPNFDANDFIAKAEEQGAVGAVVNRVVKTTLPLIFVSDTLEALGRLARYQREQIPIPAIVVTGSCGKTTTRALLASVFRQCGNVLASEKSFNNNIGVPLTLLRLRPDHHYAVLELGANHPGEITYLTGLAKPSVAIITNAGPVHLEGFGSLEGVAKAKGEIFEGLSSDGTAVINNDDHFAEFWRRLAHSRRIISFGINQPADVMAKNITLNSDGRPAFQLVLPTGQLEIQLPLIGVHNVANALAAAAAAYAQQLSTDAIKAGLESVVPVKGRLVEQKGYRGAIIIDDSYNANPLSVSAAIAVLAKRPGHSVLVLGDMLELGQGAEQFHQEIGKRAFEAGVKQLYCYGTLTKHTANAFGKNARHFDNQEKLLTALKNDLNANAVVLVKGSLSMRMGNIAHALLEE

SEQ ID NO: 10910 - protein, 187 aa, Brassica napus; identical to SEQ ID NO: 720

SEQ ID NO: 10911 - protein, 641 aa, Bordetella parapertussis 12822
MSKIIGIDLGTTNSCVAVLDGGQVKIIENAEGARTTPSIVAYMDDGETLVGAPAKRQAVTNPKNTLYAVKRLIGRKFDEKAVQKDIDLMPYSIVKADNGDAWVEVHGKKLAPPQVSAEVLRKMKKTAEDYLGEEVTEAVITVPAYFNDSQRQATKDAGRIAGLEVKRIINEPTAAALAFGLDKTEKGDRKIVVYDLGGGTFDVSIIEIADVDGEMQFEVLSTNGDTFLGGEDFDQRIIDYIISEFKKEQGVDLSKDVLALQRLKEAAEKAKIELSSSQQTEINLPYITADASGPKHLNLKITRAKLEALVEELIERTIEPCRVAIKDAGVKVSDIDDVILVGGMTRMPKVQDKVKEFFGREPRKDVNPDEAVAAGAAIQGSVLSGERKDVLLLDVTPLSLGIETLGGVMTKMIQKNTTIPTRYSQTFSTADDNQPAVTIKVFQGEREIAAGNKGLGEFNLEGIPPAPRGLPQIEVTFDIDANGILHVSAKDKGTGKENKITIKANSGLSEDEIQRMVKDAEANAEEDHRLAELAQARNQADALVHATRKSLTEYGEKLEAAEKESIEAAIKDLEDILKTGDKAEIDAKVEALSTASQKLGEKMYADMQAQQQAQQQQAADNAKPVDDNVVDADFKEVKRDQ

SEQ ID NO: 10912 - protein, 382 aa, Streptococcus mutans UA159
MKKAVHFGAGNIGRGFIGQILFENGFAIDFVDVNDKIINALNERHSYDIEIAEDGKRHITVSNVAGINNKENPQAVIDAVAETELITTAIGPNILPFIAQLIAKGIEKRRESQNQTPLDIIACENMIGGSAFLWQEVQKYLSADGLAFAKDYIGFPNAAVDRIVPAQVHEDPLFVVVEPFSEWVVETAAMKNPDLKLSSVHYEENLEPFIERKLFSVNSGHATTAYTGAYFGAKTVLEALKDQQVKEQVKAVLGEIRQLLMAKWQFKENDLKVYHDIIISRFENPYIVDDVTRVARTPIRKLGYDERFIRPIRELKDRGLSYEYLLQTVAYVFHYKDSNDEQSVQLKLLLQEKSLKAVVKEVTGLTDAALIEEIVTSVESLD

SEQ ID NO: 10913 - protein, 476 aa, Nitrosomonas europaea ATCC 19718
MHNFIKKISLVFAGVIAGIMVSLNFSAIADKEIKEELQTLPIEELRTFSQVFGRIKSDYVEPVEDKKLITEAINGMLVGLDPHSAFLDSEEYKELQIGTQGEFGGLGIQVTMEDGLVKVISPIEDTPAFRAGVKTGDLIIKIDDTAVKGMTLNDAIKRMRGKPDTPITLTVIREGEAEPLTFTLVRAIIKIDSVKSKLIEPGYAYVRITQFQERTGENLAEAITKLYSGSKVPMKGLILDLRNDPGGLLNSAVAVSAAFLPSNALVVYTEGRTNDAKMQLRANPEYYLRGSGRDFLANLPQSIKTIPMVTLVNGGSASASEIVAGALQDHKRSIVMGSQTFGKGSVQTILPLSNNTAIKLTTARYFTPNGQSIQAKGITPDILDEETDNDSRLLREADLNRHLSNGQEEKTDKAAASDKKGAQSSKRSKNKADKKQKKHEPMEFGSSDDLLLAKAVNHLKSMAQKSKHKTAKSTQS

SEQ ID NO: 10914 - protein, 287 aa, Anabaena variabilis ATCC 29413
MPQLQAKSLEMRTPQATKTAVLVIGGAEDKVHGREILRTFFGRAGASKAYITIIPSASREPAIIGGRYIRIFEEMGAEKVEILDIREREQCESSQVRASLEACSGVFLTGGDQLRLCGVLSDTPVMEIIRQRVRGGQLTLAGTSAGAAVMGHHMIAGGGSGETPNRSLVDMATGLGLIPEVIVDQHFHNRNRMGRLISAVAAHPDRLGIGIDEDTCAVFERDGWLQVLGKGSVTIVDPTELTHTNEPHVGANEPLTVHNLRLHILSYGDRFHLYQRTVLPAVHRISS

SEQ ID NO: 10915 - protein, 158 aa, Staphylococcus epidermidis RP62A
MSIYDIAVENYDGSTYLLKRYKGKVLIIVNTATNCTLNDQFNKLEMLYKKYHKYGLEILSFPCNDFNNQEPGLIKDIYRVYKYKFGITFPIHAKINVNGEHEHPLYTLLKCKQPGLFGSQIKWNFTKFVVDQQGNIVKRFLPCDNPNQMEKLIRQLLK

SEQ ID NO: 10916 - protein, 901 aa, Anabaena variabilis ATCC 29413
MRILKIQTLRGPNYWSIRRHKLIVMRLDLETLAETPSNEIPGFYEGLVEALPSLEGHYCSPGCHGGFLMRVREGTMMGHIVEHVALELQELAGMHVGFGRTRETATPGIYQVVIEYLNEEAGRYAGRAAVRLCQSIVDRGRYPKAELEQDIQDLKDLWRDASLGPSTEAIVKEAEKRGIPWMQLSARFLIQLGYGVNHKRMQATMTDKTGILGVELACDKEATKRILAASGVPVPRGTVINFLDDLEEAIEYVGGYPIVIKPLDGNHGRGITIDIRSWEEAEAAYEAARQVSRSIIVERYYVGRDHRVLVVDGKVVAVAERVPAHVIGNGRSTIAELIEEINQDPNRGDGHDKVLTKIELDRTSYQLLERAGYTLNSVPPKGTICYLRATANLSTGGTAVDRTDEIHPENIWLAQRVVKIIGLDIAGLDIVTTDISRPLRELDGVIVEVNAAPGFRMHVAPSQGIPRNVAGAVMDMLFPNEQSGRIPILSVTGTNGKTTTTRLLAHIYKQTGKVVGYTTTDGTYIGDYLVESGDNTGPQSAHVILQDPTVEVAVLETARGGILRSGLGFESANVGVVLNVAADHLGIGDIDTIDQLANLKSVVAESVYPDGYAVLNADDRRVAAMAEKTKANIAYFTMNPDSELVRKHIQKGGVAAVYENGYLSIVKGDWTHRIERAEQIPLTMGGRAPFMIANALAASLAAFVQNVSIEQIRAGLRTFRASVSQTPGRMNLFNLGNYHALVDYAHNPASYEAVGAFVRNWTSGQRIGVVGGPGDRRDEDFVTLGKLAAEIFDYIIVKEDDDTRGRPRGSASALITKGITQVKPDARYESILDETQAINKGLDMAPANGLVVILPESVSRAIKLIKLRGLVKEEIQQQNPSTTVIDNQNGVASSSVINTLL

SEQ ID NO: 10917 - protein, 2529 aa, Physcomitrella patens subsp. patens
MAARRKGVDADADHEHDDAPLDPSAVAWEKVIRLWNDREAHSDPMTAEPNSGTRRNGPGLDWAGAGKGRGRGSGEVRTTQRDQIQCETQEVEVPASSRPPTIAPDPSPSASELPVPTQLQVPRVVGGGGTSATSSQQQPQVELPGAQPVNQPSLQQHPQSQQQGSQIQGAPQQGHQQNNQLQHKLGVSNSSSSSGGGVASSASSSTAAWSQFPPPSVLLQQLQLLRDSGQANDPRFKSLVAFLQAQQAAGNSQGVGSIGGSTGGGPPGSLSPSIQLISQQDGNPRSTGDSQITSLGNSDTNRGAQAHSQAAYLQHALLSAQQKAQVNAYSQQKVSKLLQTGATRDFNSANNLNLQELTHQQLAGRQLQQLTQPGNVAGDQTSSAEKPRNQARPGSQQIPRPDATTRAYPHESLPRPNSGPVQNIQNHQQRVQNNVSTPFSGMAPPSQQIPGSSALSANTPLSPQAQSRPQFLPQYQAHVQAMQNSAGQGGMVMSQIRPTSVSGPQLTTSVDQSRVGAGGGAPILMTSSGLQLVGYPNAVPLSIFYQGMHSGSTSIPVGSAPETNPSFVLYHNPAQGGDARTQSSASLQPNTGSVISTLPSLKPSNAESGAAEATDRPSSGSTQPVQPTAQPQVSRPSLPLGSAEGFGIGQHSRHPPAPQQPSSFGFSKYQLTLLRNQILAFKKLRARKPGEVVIAEEIKRLINPPIRSSLHSSQSSAAARLKEQPPASHAIAVKGPELPGKVAYDPAAKDEYKTKELSAIKTSMVSKESDTREGAAKVADTPPVSNLQTIDNGDAKGASSVKHESSQVNPERGKQEGSVKTEVKETKLNKVDTSRISGPLATANSTGSKTGPPATSIPLVAQKVSPVKITPYRGPLFDFPAVSRRVDGAALLLTPQASLWGQPVSLGYKVRELVLEEGVRAIDKKRVEKLEIISDLLTTRNGKKLLQSFQIVRLRIEEKKLRLLELQHRVRDEVEEQQQEIMAMGERAYRKFVRLCERQRMDLTRQAMTLQRTTRDKHLKALMQWRKKLLESQWSSRDARVTRNRGVAKYHERMLREYSKRKDEDRNKRMEALKNNDVDAYREMLKQQQGQLNGDAGERFEVLSSFLSQTEEYLHKLGGKISAVKNHQEREEAAIAAAAAARAQGYSEEEAQQAAIRASEEAEVNGYVNRNPLDSSVNKYYSLAHAVHEKIYKQPSMLAVGVLRDYQMVGLQWMLSLYNNRLNGILADEMGLGKTVQVMALIAYLMEYKGNYGPHLIIVPNAVMVNWKSELTRWLPSVSCIYYVGHKDQRAKIFSQEVCSMKFNVLVTTYEFIMRDRSKLAKVDWKYIIIDEAQRMKDRESRLARDLDRFRCSRRLLLTGTPLQNDLHELWSLLNLLLPEVFDNSKAFHEWFSKPFQKEATLSEEDDWLETEKKVIVIHRLHQILEPFMLRRRVEDVEGSLPPKVVSVVLKCRMSAYQAAIYDWVKATGTLRLDPDDEAQRIAGNSKRLARAYAPLQNKCMELRKVCNHPYLNYPPRYHSQGDMIVRTCGKLWILDRILVKLHKTGHRVLLFSTMTRLLDILEDYLQWRRLVYRRIDGMTTLEARESAIVEFNRPNSDCFIFLLSIRAAGRGLNLQTADTVIVYDPDPNPKNEEQAVARAHRIGQKREVRVLYMEAVVENTPSYEKEDELRSGGSLDQKDDEMAGKDRYVGSVESLVRNNIQQHKIDMADEVINAGRFDQRTTQEERRLTLEALLHDEERYEQTVHDVPTLQEVNRMIARTDEELELFDKMDEEWKWAGDLLPHHKIPKWMRIGSREVNAAIESTSKEAMKKGFLGTVGTQEAEDLVAYQVTKGPVAPKALEKRSKSTSRYKNYREVEIDDDFFPEKETEEFEEDERESIIDEVLTAENTDDEEEVERGVDERDHQDEDMRDAEEGEELEEEEIIEEVIEEVDDDDEEEEEEIEPDEDLEEEGELVPELSFDECEVSPAKPQRGAAMSQSKKFASLSALESRPGRAEEGDELEEGEIAASVDSDQRSESWMEGREEVEVAEGEEDYTIQPQKKRKRSRSHRRTAHVDGLGEREISNGSFNERGIPSFPFRSFTTVEQKSLQLSNFGTVEPAQSYDKADHWGGASKKRSINVLEAQAPARPRIVFKHSRGNGLQEPVAEPDLGRDNWTARSQAGLLGSYSGDKGRLPEGQQKKCKSVLSKLHGAVNKDGRQIAALFLELPKRSELPEYYKVIARPINSHSIEEKLDRMEYPSVLEFASDVHLMIDNSARYYSTSAEVQTDARRLQALFESRMSLMFPEVDFSSARVRSYAPVQPSQAPPVIGLRSIPQASVVSGPRSKINAPVVTGPRGVRRPPASVIAEPAHVETPNPRSSTRISLVRHAALSLEEAPVTKQEGKMSKKAGQEKSKDKKAKLKSKVRSSVKDKELIEDEVESDEGIMHPVDLVIHKKKRKGREHTGSRTVSSLLVINAEDTRDTTARGFNVGPSWNTRAPLPVAPRSRVPTVSPGSSRRSALQPNTKVGAVTVLKKSRTDGGKRRPSHL

SEQ ID NO: 10918 - protein, 1654 aa, Magnaporthe grisea 70-15
MSTSPEPCPTNGHHSDIVVDPDSPDMNGHRSDSDLSDAAEGEVEVQMPSPDSEPESPNPAQDADDVDDHEVSEPSDNDASEDGDFDAAESPASARIDAQQSERSSSADSRRHAKRKAAGALEEDFMRENPELYGLRRSNRPTQRRKIVDSDEDEVDGDSEDEVVPAARKGPKKRRVERSQPSSKRDTPLRTTSADASDSDNYGGARARSFQKKARRQQEAQAYQEKRWSSRRAAQVSAGAYNESEVDDAEDIDDTTPNYWAAEVEDNSPYIEKILKHRKKEDVELSPHSTRHDFEYYIKWQGKSHMHDTWETTESVHGCRGFRRLENYFRKVVEYELDMSFGEDVSPELKEQWALDREREQDAYDDYTKVERIVAVRDGDGQKEYLVKWKGLQYDECTWEPSDLISSEAGDKIDQFTTRSRRSWQSDRKESNPDTRSRMTKMETQPDYIQNGELREFQLKGLNFLALNWARANNVILADEMGLGKTVQTVSFLSWLRNSREQEGPFLVVAPLSVIPAWCDTFNNWSPDLNYIVYLGPEAARATIREHELLINNNPKKPKFNVLVTSYDYILLDAEFLRTIKWQVLAVDEAHRLKNRESQLYAKLLSFNIPCKLLITGTPIQNNLAELSALLDFLNPGKVLIDDDLELLGKEVENKEEDQAEEEEKRRETQAKLTQLHKAIAPFILRRTKETVESDLPPKTEKIIRVELSDVQLEYYKNILTRNYAALSDASGGHKASLLNIMMELKKVSNHPYMFQGVEERVLAGSTRREDSIKGLIKSSGKMMLLDQLLAKLKKDNHRVLIFSQMVKMLDILGDYLRVRGYQYQRLDGTIPAGPRRMAINHFNAPDSEDFCFLLSTRAGGLGINLMTADTVIIYDSDWNPQADLQAMARAHRIGQKRPVNVYRLVAKQTVEEEVVNRARNKLFLEYLTIQAGVTDEGKALREQFQQRGLKLDEAKTADDIQNILKLRSQNLFEQSGNQERLEQLDIDSILEHAEVTKTNVDDKMNLSSGGIDWDNWMHFTDVKVDDLALNWDEIIPAEQLASIKAEEEKKKHDEYLAKAQEENAPRKATLKANRRNGGGGDNDSERAERLAKKRQRERQEQEELAEQRALMSDPRRALNEKETRNLIRAVFRYGSLDDREEEVLQEARLTDRDPDYLREIVSDLVAKARAAVDENSRKLRDEEEKSGKIIAKKDKKAVLVDFGEVKKVNAETVIDRPPQLKLLRKIILEHGDNATFRLPDASKAAHYSCEWGPREDGMLLVGIDRYGFGAWTQIRDDPELNMEGKFFLEEHRVEKKEERKRGDDKSIQSPGAVHLVRRSEYLLSVLLAKHSDDAAAQKAVENHHRSKKNLLVNGNRRSDHRGLSNGDRGTPRPDKRKHENDHDERGHKHRRVEERHGKDKEKRKKLDPEAIERLKKARERSVQRFDELMRLDDTKLDYGNSEHLMWSLLKPVRKNFEKIMHTTADRVENAKERARIMGNELQQIGNCFTDMKANNDSIPADQLEALMPRFWDFLSSIWPVHEVEVSGGQLATMYKTLKEKSKQPKTGEASSGLKLKSQKRHRMDLEDGEIDTARDSSSRYDAGRRDHRRDLDDYYRRGDDRRGDRDRDRDERDSRRRYYENGDRLSFGKVLDRRDSGDRARSSWHNSARSPHR

SEQ ID NO: 10919 - protein, 443 aa, Dehalococcoides sp. BAV1
MTRAESVEYVLKTAKDHNVRFIRLWFTDILGSLKSFSIAYNELERALEDGMGFDGSSIEGYARIDESDMVALPDPDTFKIIPWSNGDYQVGRMFCDIKKPSGEQFEGDPRYVLKRNLKKAAEMGFTFYIGPELEYFYFKNDHSTEFLDEGGYFDLTPRDLATDLRRETIVALQDMGIIVEYAHHEVAPSQHEIDIRYTDALTMADNVMTYRLLVKEVAMRHGLHASFMPKPVGSVNGSGMHTHQSLFKGDRNAFFDAKDSYYLSTMAKQYIAGILKYAPEFTSVTNQWINSYKRLVPGFEAPVYLSWARRNRADLVRVPEYKPGHEKSTRIELRSADPGCNPYLAFSVMLAAGLKGIEEKLTPPAPIEENVYEMNEAERAKRGIGTLPGSLLEALKLTEGSSLVREALGDHVFDAFVANKKIEWSQYSIAVTDWELKRYLPVL

SEQ ID NO: 10920 - protein, 158 aa, Clostridium perfringens str. 13
MEIYDISVKDINGENVSLERYRGKVLLIVNTASKCGFTKQFDGLEELYEKYKDEGFEVLGFPCNQFKEQDPGSNSEIMNFCKLNFGVTFPMFEKIDVNGENESLLYSYLKEQKSGMFGSKIKWNFTKFLVDREGNVIKRFSPQTTPKSIEKDIEELLA

SEQ ID NO: 10921 - protein, 532 aa, Treponema denticola ATCC 35405
MEYTKSIAECIKAIEVVNCFGNDKSLINSVEYDSRKVRAYSYDDKTGLKKGAAFFALPGIHTDGKKFINSAIENGAVCIFYEGDLNNHSCDEICFVQVNDVRKTMSKVSALLYDEPSRTLGVIGVTGTEGKSSTVSFIFQLLNLCGKKAGFFSTVEYSIDGNVIPNPEHQTTPESNVVQLRLAQMRDSGCSYAVVEASSHGLSPKTARLEDVIFDAGVFMNVTQEHLEFHGTIEQYRYDKANLFRALDKNPGKGFPIFGIVNYEDPSAPYFMEATQKNVYPFSTELKDLKKIEEYKGLFAKDIEESSSGIKFTLCDFSSRKEYGCELKLAGIFNVKNILASVLAVQRITGLDIACIIEKLPLVKPVKGRMMLIDEGQDFEVLIDYAHTPSSFMTIFPSIKERIKKSGGKVISLFGSGGERDVKKRPEQGRIAALYSDIVILADEDPRGEDSVELLEMIAAGCPEKKRGEELFIIPDRPSAIKKAFSLAGKNDAVLLLGKGHENSIIFKDRTMPYDEETTARKLLIGADCTNP

SEQ ID NO: 10922 - protein, 694 aa, Zea mays
MVSARLVALAAFHLLVLLAMGPGEARAADGGEVRALLALGAALDPTGRLLPSWAPGRDPCAPPPSGGFDGVACDDSGAVANVSLQGKGLAGTLPPAVAGLRSLTGLYLHYNALRGGIPRELAALAALTDLYLDVNNFSGPVPPEIGAMASLQVVQLCYNQLTGSIPTQLGNLSRLTVLALQSNRLNGAIPASLGDLPLLARLDLSFNRLFGSIPVRLAQLPSLVALDVRNNSLTGSVPAELAAKLQAGFQYGNNSDLCGAGLPALRPCTPADLIDPDRPQPFSAGIAPQVRPSDGRAPSTRALAAVVVVAVALLAATGVGLLALSWRRWRRQRVAGGSPSTVSGGRCSSSTEAAPSAAKASSARKSASSALASLEYSNAWDPLADARGGLGLFSQDALAQSLRISTEEVESATRYFSELNLLGRRGKKAGGLAGTYRGTLRDGTSVAVKRLGKTCCRQEEADFLSGLRLLAELRHDNVVALRGFCCSRARGECFLVYDFVPNGSLSQFLDVDADNAGGGSGRVLQWSTRISIIKGIAKGIEYLHSTRTNKPALVHQNISADKVLLDYAYRPLISGCGLHKLLVDDLVFSTLKASAAMGYLAPEYTTVGRFSEKSDVYAFGVIVFQVLTGKSKVTTTHAQLPDNDVDELVDGNLQGDNYSAAEAAQLAKIGSACTSENPDQRPTMAELLQELSTV

SEQ ID NO: 10923 - protein, 682 aa, Salmonella typhimurium LT2
MNTFFRLTALAGLLALAGQSFAVEDITRADQIPVLKEETQHATVSERVTSRFTRSHYRQFDLDEAFSAKIFDRYLNLLDYSHNVLLASDVEQFAKKKTVLGDELRTGKLDVFYDLYNLAQKRRFERYQYALKVLERPMDFTGNDTFNLDRSKAPWPKDEAELNALWDGKVKFDELSLKLTGKSDKEIRETLTRRYKFAIRRLAQTNSEDVFSLAMTAFAREIDPHTNYLSPRNTEQFNTEMSLSLEGIGAVLQMDDDYTVINSLVAGGPAAKSKSISVGDRIVGVGQAGKPMVDVIGWRLDDVVALIKGPKGSKVRLEILPAGKGTKTRIITLTRERIRLEDRAVKMSVKTVGKEKVGVLDIPGFYVGLTDDVKVQLQKLEKQNVNSIVIDLRSNGGGALTEAVSLSGLFIPSGPIVQVRDNNGKVREDSDTDGVVYYKGPLVVLVDRFSASASEIFAAAMQDYGRALIVGEPTFGKGTVQQYRSLNRIYDQMLRPEWPALGSVQYTIQKFYRVNGGSTQRKGVTPDIIMPTGNEETETGEKFEDNALPWDSIDAAKYVKSDDLAPFGPELLKEHNARIAKDPEFQYIMKDIARFNAMKDKRNIVSLNYAQREKENNEEDALRLARINDRFKREGKPLLKKLDDLPKDYQEPDPYLDETVKIALDLAHLEKEKPAEQAAANK

SEQ ID NO: 10924 - protein, 700 aa, Vitis vinifera
MASCPPFEFSSKYYQVSDGGGCVRQSSFFQGKAVLNQGVGYSVILGFGAFFAVFTSFLVWLEKRYVGSRHTSEWFNTAGRNVKTGLIASVIVSQWTWAATILQSSNVAWQYGVSGPFWYASGATIQACSSYNFFFYIKRKAPHAHTVCEIVKARWGTAAHIVFLTFCFMTNIIVTAMLLLGGSAVVNALTGVNIYAASFLIPLGVIVYTIAGGLKATFLASYIHSVIVHVVLVIFVYLVYTASNELGSPNVVYKRLMEPSSHDGQACGPVNGNYKGSYLTMLSSGGLVFGIINIVGNFGTVFVDNGYWVSAIAARPSSTHKGYLLGGLVWFAVPFSLATSLGLGALALDLPITESEASHGLVPPATAIALMGKAGSILLLTMLFMAVTSAGSSELIAVSSLCTYDIYRTYINPNASGKKILQVSRMVVLGFGCFMGLLAVILNKAGVSLGWMYLAMGVLIGSAVLPIAFMLLWRKANAFGAILGTVTGCILGVITWLSVTSIEYGQVNLDTTGRNAPMLAGNLVSILTGGAVHAVCSLLWPQNYDWDTTRQITTVEKEKSELPAEEFREEKLIRAKAWIVKWGVGFTIVIVILWPLLSLPIGKFSKGYFTFWAIIAVAWGTIGSAVIIALPLVESWETIQNVFLGMFTNDRLMEKIEEMNIKLQSIILSIPEAERTYLMEKEKLKKKEASEYLAHSTPNL

SEQ ID NO: 10925 - protein, 455 aa, Symbiobacterium thermophilum IAM 14863
MAGVKLQERAAVVGIGISNMALIRYLVARGVRVTACDRTSAEKLGERAAELARLGVPLVAGEGYLEPLADHDLIFLTPGMPKHLPEIEAARRRGAAISGEIGLVLDLCRAPVIGVTGSAGKTTTTTLIGEILRAAGRETYVGGNIGKPLIEQVEAIPSEAVVVLELSSFQLQLVHRSPHIAVVTNVSPNHLDVHATMEEYVEAKKAIFRRQSPADWLVLNADDPTVRAFAAEARSRVVLFSRRADPGGRDAAFVREDRVIWRRGGRETPILFLDEIRLPGLHNQENVLAAVAACFLAGAPLSAVREVVTQFTGVEHRIEPVRVLDGVKWYNDSKATSPAEAVAALTTLPAPIVLIAGGSDKGIPFDPIAPLVAEKVKTLILMGPTAPKIEEAVRRGGYAGPIRRAADMAEAVALAREAAAPGDTVLLSPACASFDAYRNFEERGRHFKSLVEALS

SEQ ID NO: 10926 - protein, 649 aa, Paracoccidioides brasiliensis
MAPAIGIDLGTTYSCVGIFRDDRIEIIANEQGNRNTPSFVAFTDTERLIGDAAKNQVAMNPQTVFEAKRLIGRKFADPEVQADMKHFPFKITDKGGNPKIQVEFRGEGKHFTPEGISSMFRRKKREIAESYLGGTVNNAVVTVPAYFNDSQRQVTKDAGLIAGLNVLRIINEPTAAAIAYGLDKKAEGERNVLILDLGGGTFDVSLLTIEEGIFEVKSTAGDTHFGGEDFDNRLVNHFVNEFKRKHKKDLSSNARALRRLRTACERAKRTLSSAAQTSIEIDSLYEGIDFYTSITRARFEELCQDLFRSTMDPVERVLRDAKIDKSSVHEIVLVGGSTRIPRIQKLVSDFFNGKEPNKSINPDEAVAYGAAVQAAILSGDSTSKSTNEILLLDVAPLSVGIETAGGVMTPLIKRNTTIPTKKSETFSTFADNQPGVLIQVFEGERARTKENNLLGKFELTGIPPAPGVPQIEVTFDVDANGIMNVSALEKGIGKTNKIVITNDKGRLSKEEIERMLAEAEKYKAEDEAEASRISAKNGLESYAYSLRNTISDSKVDEKLDASDKEKLKTEIDKTVSWLDENQTATKEEFEAQQKELESVANPIMMKFYGAGGAPGAGFPGAGGPGGFPGAGVGGAHSGGDDGPTVEEVD

SEQ ID NO: 10927 - protein, 415 aa, Arabidopsis thaliana
MISQREEREEKKQRVMGDKKLISSSSSSSVYDTRINHHLHHPPSSSDEISQFLRHIFDRSSPLPSYYSPATTTTTASLIGVHGSGDPHADNSRSLVSHHPPSDSVLMSKRVGDFSEVLIGGGSGSAAACFGFSGGGNNNNVQGNSSGTRVSSSSVGASGNETDEYDCESEEGGEAVVDEAPSSKSGPSSRSSSKRCRAAEVHNLSEKRRRSRINEKMKALQSLIPNSNKTDKASMLDEAIEYLKQLQLQVQMLTMRNGINLHPLCLPGTTLHPLQLSQIRPPEATNDPLLNHTNQFASTSNAPEMINTVASSYALEPSIRSHFGPFPLLTSPVEMSREGGLTHPRLNIGHSNANITDHLRIVFESLILDGFGYVNYPDKLLEKFSILQDGFGIFKVDHVLLVSLVLKLIIYNTIF

SEQ ID NO: 10928 - protein, 448 aa, Zymomonas mobilis subsp. mobilis ZM4
MALASTGMLIPALTSSMAAVDSQNKDTYHQLDQFMRVFEQVKSSYVDKVDDQKLIQGAIDGMLSNLDPHSSYMNAHQFANIKTQADGNYGGLGLTVMAQDGILKVISPMKDTPSWRAGLKAGDYITHIDGQFIYGSNIDDSVSKMRGKPGTSVKLTVVRPGRDKEFDVTLTREIIQVQSVKWAVTNHIGVITVSSFSHNVGADVTKAIADIEKQNKGAPLGYILDLRSNPGGLLDQAVALSDIFLDHGEVVSERGREKTDIRRYFSKPGDLANGLPLIVLVDGGSASASEIVSGALQDHHRALIMGTRSFGKGSVQTLLPLGDDTALRLTTARYYTPSGRSVQEGGIEPDIIVPQLSDPDYKTRPKLREADLLRHLVNQANTDNSLLEDDNGKTDPQFTATPESLKKENITDFQLDYALKTIGRISRQPSPITKEIPAGKSATPSGRE

SEQ ID NO: 10929 - protein, 705 aa, Ajellomyces capsulatus
MAPAVGIDLGTTYSCVGIFRDDRIEIIANDQGNRTTPSFVAFTDTERLIGDAAKNQVAMNPANTVFDAKRLIGRKFADPEVQADMKHFPFKITDKGGKPVIQVEFKGETKEFTPEEISSMVLTKMRETAEAYLGGTVNNAVVTVPAYFNDSQRQATKDAGLIAGLNVLRIINEPTAAAIAYGLDKKADGERNVLIFDLGGGTFDVSLLTIEEGIFEVKSTAGDTHLGGEDFDNRLVNHFVSEFKRKFKKISPAERARALRRSPTACERAKRTLSSAAQTSIEIDSLYEGIDFYTSITRARFEELCQDLFRSTMEPVERVLRDAKIDKSSVHEIVLVGGSTRIPRIQKLVSDFFNGKEPNKSINPDEAVAYGAAVQAAILSGDTSSKSTNEILLLDVAPLSLGIETAGGVMTPLIKRNTTIPTKKSETFSTFSDNQPGVLIQVFEGERARTKDNNLLGKFELTGIPRARGVPQIEVTFDVDANGIMNVSALEKGTRKTNKIVITNDKGRLSKEEIERMLAEAEKYKAEDEAEASRIRPKNGLESYAYSLRNSLRHSKVDEKLEAGDKEKLKSEIDKTVQWLDENQTATKEEYESQQKELEAVANPIMMKFYAGGEGAPGGFPGAGGPGGFPGGPGAGHASGGGDDGPTVEEVDLKFPMLPLPWQLSVRKMHRPFFLFLLFLIFLIFLILFLFYFFLPVRFNESCFS

SEQ ID NO: 10930 - protein, 158 aa, Staphylococcus epidermidis ATCC 12228
MESIYDFVVQKNNGESYKLEQYKGDVMLIVNTASECGFTPQFEGLQKLYDEYKDQRFIILGFPCNQFGGQEPGSGEEAAQNCKINYGVTFPIHEKVDVKGDNQHPLFHFLTNAAKGMINEKIKWNFTKFLIDREGNVIKRFSPQKKPEQIKTEIEKLL

SEQ ID NO: 10931 - protein, 503 aa, Penicillium citrinum
AYLGGTVNNAVITVPAYFNDSQRQATKDAGLIAGLNVLRIINEPTAAAIAYGLDKKTEGERNVLIFDLGGGTFDVSLLTIEEGIFEVKSTAGDTHLGGEDFDNRLVNHFVNEFKRKHKKDLTTNARALRRLRTACERAKRTLSSAAQTSIEIDSLFEGIDFYTSITRARFEELCQDLFRGTMEPVERVLRDAKIDKSSVHEIVLVGGSTRIPKIQKLVSDFFNKDANKSINPDEAVAYGAAVQAAILSGDTSSKSTNEILLLDVAPLSLGIETAGGVMTPLIKRNTTIPTKKSETFSTYSDNQPGVLIQVFEGERARTKDNNLLGKFELTGIPPAPRGVPQIEVTFDLDANGIMNVSASEKGTGKSNKITITNDKGRLSKEEIERMLAEAEKYKAEDEAEASRIQAKNGLESYAYSLKNTITEGKLQMSDDDKKKIEDKISEIISWLDNNQTAEKDEYESQQKELEAIANPIMQAAYGAAGGAPPQQRADGETEEKKDEEELD

SEQ ID NO: 10932 - protein, 1129 aa, Saccharomyces cerevisiae YJM789
MAYMLAIANFHFFKFYTRMRKKHENNSCNEKDKDENLFKIILAIFLQEKKKYDCISSGSIMTASEEYLENLKPFQVGLPPHDPESNKKRYLLKDANGKKFDLEGTTKRFEHLLSLSGLFKHFIESKAAKDPKFRQVLDVLEENKANGKGKGKHQDVRRRKTEHEEDAELLKEEDSDDDESIEFQFRESPAYVNGQLRPYQIQGVNWLVSLHKNKIAGILADEMGLGKTLQTISFLGYLRYIEKIPGPFLVIAPKSTLNNWLREINRWTPDVNAFILQGDKEERAELIQKKLLGCDFDVVIASYEIIIREKSPLKKINWEYIIIDEAHRIKNEESMLSQVLREFTSRNRLLITGTPLQNNLHELWALLNFLLPDIFSDAQDFDDWFSSESTEEDQDKIVKQLHTVLQPFLLRRIKSDVETSLLPKKELNLYVGMSSMQKKWYKKILEKDLDAVNGSNGSKESKTRLLNIMMQLRKCCNHPYLFDGAEPGPPYTTDEHLVYNAAKLQVLDKLLKKLKEEGSRVLIFSQMSRLLDILEDYCYFRNYEYCRIDGSTAHEDRIQAIDDYNAPDSKKFVFLLTTRAGGLGINLTSADVVVLYDSDWNPQADLQAMDRAHRIGQKKQVKVFRLVTDNSVEEKILERATQKLRLDQLVIQQNRTSLKKKENKADSKDALLSMIQHGAADVFKSGTSTGSAGTPEPGSGEKGDDIDLDELLLKSENKTKSLNAKYETLGLDDLQKFNQDSAYEWNGQDFKKKIQRDIISPLLLNPTKRERKENYSIDNYYKDVLNTGRSSTPSHPRMPKPHVFHSHQLQPPQLKVLYEKERMWTAKKTGYVPTMDDVKAAYGDISDEEEKKQKLELLKLSVSNSQPLTEEEEKMKADWESEGFTNWNKLEFRKFITVSGKYGRNSIQAIARELAPGKTLEEVRAYAKAFWSNIERIEDYEKYLKIIENEEEKIKRVKMQQEALRRKLSEYKNPFFDLKLKHPPSSNNKRTYSEEEDRFILLMLFKYGLDRDDVYELVRDEIRDCPLFELDFYFRSRTPVELARRGNTLLQCLEKEFNAGIVLDDATKDRMKKEDENGKRIREEFADQTANEKENVDGVESKKAKIEDTSNVGTEQLVAEKIPENETTH

SEQ ID NO: 10933 - protein, 134 aa, Listonella anguillarum
MRSTGIADTVLVGPEPEFFLFDDVKYTNNMSGASFKIDDIEAAWNTGAEIEGGNKGHRPGVKGGYFPVAPVDSSQDIRSAMCLIMEEMGLVVEAHHHEVATAGQNEIATRFNTLTTKADEIQIYKYVVHNVAHA

SEQ ID NO: 10934 - protein, 654 aa, Trichophyton verrucosum
MAPAVGIDLGTTYSCVGIFRDDRIEIIANDQGNRTTPSFVAFTDTERLIGDAAKNQVAMNPINTVFDAKRLIGRKFNDAEVQADMKHFPFKVVEKSGKPIVQVEFKGEEKQFTPEEISSMVLTKMRETAEAYLGGTVNNAVITVPAYFNDSQRQATKDAGLIAGLNVLRIINEPTAAAIAYGLDKKAECERNVLIFDLGGGTFDVSLLTIEEGIFEVKSTAGDTHLGGEDFDNRLVNHFVNEFKRKNKKDLSTNARALRRLRTACERAKRTLSSAAQTSIEIDSLYEGVDFYTSITRARFEELCQDLFRSTMEPVERVLRDAKIDKSSVHEIVLVGGSTRIPKIQKMVSDFFNGKEPNKSINPDEAVAYGAAVQAAILSGDTSSKSTNEILLLDVAPLSLGIETAGGVMTPLIKRNTTIPTKKSETFSTFSDNQPGVLIQVFEGERARTKDNNLLGKFELTGIPPAPRGVPQIEVTFDVDANGIMNVSALEKGTGKTNKIVITNDKGRLSKEEIERMLAEAEKYKAEDEAETARIGAKNGLESYAYSLKNTLSDSKVDEKLDAADKEKLKSEIDKVVAWLDDNQTATKEEYESQQKELEGVANPIMMKFYGAGGEGGAPGGFPGAGAGGPGGFPGAGAGGAAAHDDGPTVEEVD

SEQ ID NO: 10935 - protein, 539 aa, Spinacia oleracea
MEVISRLTFASVSYPFISSNLNPTPMLNSFNFRVLSWNSAPTNVAEAHLHRLLLRKLNPANDRVVGISNFGCSCRLDLWPSWRRHKRLFFQNGVSTIRWEVKKCSPKFYKIVSNYEKCKRHIYVPFVRLVVGVVLLMSVSVALNQGPSWSLSEENRIFLEAWRTIDRAYVDKTFNGQSWFRYRENALRNEPMNSREETYTAIRKMVATLNDPFTRFLEPEKLKSLRSGTQSSLTGVGISIGPTAVDQSSTGLVVISATPGAPASRAGILPGDVILAIDDASTDKMGIYEAANILQGPDGSSVDLTICSRDEIKHVVLKRERITLSPVKSRLCEMPGSAKDAPPKVGYIKLTSFTENASDAVKEAIETLRSNNVNAFVLDLRDNSGGLFPEGIEIAKIWLNKGVIVYICDSRGVRDIYDVEGSSAVAGSEPLVVLVNKGTASASEILAGALKDNKRAVVFGEPTYGKGKIQSVFELSDGSGLAVTVARYETPAHTDIDKVGIKPDHPLPASFPKDENDFCTCVQDPSSTCYLNGVQLFSR

SEQ ID NO: 10936 - protein, 446 aa, Staphylococcus epidermidis ATCC 12228
MPKRSFTKDDIRKFAEEENVRYLRLQFTDILGTIKNVEVPVSQLEKVLDNEMMFDGSSIEGFVRIEESDMYLHPDLDTWVIFPWTAGQGKVARLICDVFKTDGTPFEGDPRANLKRVLRRMEDMGFTDFNLGPEPEFFLFKLDEKGEPTLELNDDGGYFDLAPTDLGENCRRDIVLELEDMGFDIEASHHEVAPGQHEIDFKYADAVTACDNIQTFKLVVKTIARKHNLHATFMPKPLFGVNGSGMHFNVSLFKGKENAFFDPEGDLQLTDTAYQFTAGVLKNARGFTAVCNPIVNSYKRLVPGYEAPCYIAWSGKNRSPLVRVPTSRGLSTRIEVRSVDPAANPYMALAAILEAGLDGIENKLEVPEPVNQNIYEMNREEREAVGIQDLPSTLYTALKAMRENKSIKNALGNHIYNQFINSKSIEWDYYRTQVSEWEREQYIKQY

SEQ ID NO: 10937 - protein, 134 aa, Vibrio diazotrophicus
MRSTGIADTVLVGPEPEFFLFDDVKFSTDMSGSFFKIDDVEAAWNTGSDYEDGNKGHRPGVKGGYFPVAPVDSSQDLRSAMCLIMEEMGLVVEAHHHEVATAGQNEIATRFNTLTAKADEIQIYKYVVHNVAHA

SEQ ID NO: 10938 - protein, 469 aa, Photorhabdus luminescens subsp. laumondii TTO1
MSVEHVLTMIEEHQVKFIDLRFTDTKGKEQHMTIPAHQVNADFFEDGKMFDGSSISGWKGINESDMVLMPDPSTAMLDPFFDDATLTLRCDILEPGTMQGYDRDPRSISKRAENFLRSSGIADTVLCGPEPEFFLFDDVRFSSAMSHSYYHIDDIEAAWNSGTQYEGGNKGHRPAVKGGYAPLPPVDSSQDLRSAMCLTMEEMGLVVEAHHHEVGTAGQNEIATRFNTMTKKADETQIYKYVVHNVAHNFGKTATFMPKPLVGDNGSGMHCHMSLSKNGTNLFAGDKYGGLSELALFYIGGIIKHARALNAFTNPTTNSYKRLVPGYEAPVMLAYSARNRSASIRIPVVASTKARRIEVRFPDPAANPYLAFAAQLMAGLDGIINKIHPGDAMDKNLYDLPPEEAKEIPTVASSLDEALAALDADREFLTRGGVFTDDAIDAYIDLKNSEIERVRLTPHPLEFELYYSV

SEQ ID NO: 10939 - protein, 299 aa, Thermodesulfovibrio yellowstonii DSM 11347
MKNCKWYIEQTSEDEIIFHSLKEIIYSENSPYQRIEIVHFGNLGRCLLLDGKMQSSEVDEFIYHEALVHPVMLLSESVDKVLIAGGGEGATLREVLKHPVNEVVMVELDESVITIAKQYLPEWNSGAFDDPRVRLVIDDARSYIEKTKNYFDVIIIDLPEPAEGGPAYLLYTKEFYEKVKEALTEKGMMVTQSASASVNNLRVFVSIVSTLKQVFPYVRPYITYVPSFFAPWGFVLVSKKINPDEYVNRINEKLNSVGESLKFYDMDSHTSMFYLPKHIKKAFEKEGIVIHDDSPLSFY

SEQ ID NO: 10940 - protein, 511 aa, Medicago truncatula
MSFPTAASPPAASEAGTLHHDDGDSYNVNDDDASFDAIRLDDEGFPSQQLPIESPSPNGSEKSSFAADFYRCGSDCSSLLTPERDSLSSGKKLKQANLFQIWGFKRNVEFESPNQGGYCDVVGEGSVSSEKKSVKRGNWGSILRDTGKVVENSKSTGKRKSFHGEKRVTRSCPFYKKMPGTNFTVDAFRYGCVEECSAYFLSHFHADHYGGLSKKWSHGPIYCSPLTGRLVQMCLYVNPSYICPLEFDTEYVIDGIKVTLIDANHCPGAALIHFELPNGQCYLHTGDFRACKLMQDYHLFVNKRVNVLYLDTTYCNPKYKFPSKDDVLNYVVKITNNHLKKYPRTLVVVGAYSIGKECVYLAISKALGVKIHVNASRRRILLAYDCPDYSDRLCTNGNNTLLHVLPMSSLRIETLKEYLKTYKEQFTSVLAFRPTGWTFSEKIGNDLALIKPVSNGNITTYGVPYSEHSSFTELRDFVQFLRPDKIIPTVNVGNAANREKMQSYFRDWLKG

SEQ ID NO: 10941 - protein, 433 aa, Thermosynechococcus elongatus BP-1
MGITHRTLVVSTTVVMTALVAVTGAGLHWSRSLAGFRQSPKELVDEVWQVIDREYVDATFNGNDWRAVRREFLSRNYTKPEEAYKAAREMLEKLNDPYTRFMDPEQFRSMQIETSGELTGVGITITQDEKTKEITVVSPIEGSPAAEMGLMAKDVILKIDGKSTKGMDLNQAVSMIRGPVNTKVRLTIRRGNQILNYEITRARIEIHPVRYSLRQTPQGPVGYIRLVTFSSNAAGEMRAAIRELEKQGVEGYVLDLRSNPGGLLFASAEIARMFLKQGDIVSTVNRQGEAERLRAGRGFLTDKPLVVLIDGGSASASEILAGALQDNNRAILVGTKSFGKGLVQSVQPVGEGAGIAVTIAKYFTPSGRDINKKGIEPDVEVTLTEQQREQLTRDDIATDRDPQFMRALAVLNERILAQRRNPQSARPTQGPNP

SEQ ID NO: 10942 - protein, 288 aa, Thermococcus kodakarensis KOD1
MGYNEQERAFIEWYPRGYGVGFKVKRRLFETQTEYQRLEIYETEGFGKLLVLDGTVQLVEVGEESYHEVLVHPVMLAHPNPRKVLVIGGGDGGTLREVLRHDTVEKAIMVEIDEGVVEASYLYLDVAKDLLDRLIKKEEPRAELIIGDGVKYLRETDERFDVIIVDSTDPVGPAKLLFSEEFYRDAYEKLNEKGLYVTQAGSVYLFTNELLDAYKAMKKVFDRVYYFSFPVIGYASPWSFLVGVKGDVDFTRIDLERAKKLDLYYYDPERHETLFQMPRYVRKLLEGQ

SEQ ID NO: 10943 - protein, 249 aa, Oryza sativa Japonica Group
MEPAFPNGGAAAPPPPMAAEQLPPAAAVVREQDRLMPIANVIRIMRRVLPPHAKISDDAKEVIQECVSEFISFVTGEANDRCHREHRKTVTAEDLVWAMDRLGFDDYVPPLTAYLRRMREYEGGGSGGGGGGGRVAAAAPAVVPPPPPPPPEDAFRYVQVHHPVYAAPGEPVQGYGYPVAMSSVLPAPNVKIGVSGGGQHEVFGGGPAPLAVYYGGAPYGEASSRGGCSAADEGSSSSSASPAPVRPQL

SEQ ID NO: 10944 - protein, 461 aa, Magnaporthe grisea 70-15
MSTFDGIIREFPDIRVDFFRNNGLRPPLACFLSHVHSDHLAGLESLRSPFVYCSAATRELLLRLERYPCRINYAKGILEARVQTYKHLKNLLKPIPLDTPTQIELAPGKSIGVTLLDANHCTGAVMFLFEGDGKAVLYTGDIRSEPWHVNSIARNPCMMEYSAGIKTLSRIYLDTSNTEDIAFPSKDAGLKELLEKLKSYPKDTIFHFKAWTFGYEDVWIALSKALDSPIHVDDYKMQLYRSLVTKGNPKDPYATQFHMSPEVAALVGFMCGNTAHPGCLTRDVNVRLHSCEKGNYCKTVRDAEAAGTIVHIEPIITRLAGGEEVAEMGIGGGGDDLEREAELDSFALQDIGGLLQIIKSLFGEYCSGDVFEHDRIQAHFASRSKAGEIEHNTDSQSSAITQRSDETGYQPSQEIEQGRQLPTVSKDSRHDQGPGPWYTSEMIHSTSDDPIATSHQHKRNE

SEQ ID NO: 10945 - protein, 446 aa, Vitis vinifera
  misc_feature (14)..(14): Xaa can be any naturally occurring amino acid
  misc_feature (335)..(335): Xaa can be any naturally occurring amino acid
MGKQEGVEVECEPXVTAEIWRTYVGPQLGDTITILLLGIKAQIYLLSLLHSIGNLQLTCKFFSPFFGVFPLQVRETFENITFLFWHIYRIFGSSQKIDQFMVKSNSKGPNQIGPPHTAPPSSVYSEPWWRGVGYNPISTTMTGGNTNNSPSSECPNGGSESNDGQSHSNGGLNEEDDDSIKESQATASSQSNGNYGQEHQNLQHIAPNIQIGSSECLTQPPQLELVGHSIACASNPYQDPYYGGMMTAYGPQPLVHPHLLGMHEARMPLPLEMTQDPVYVNPKQYHGILRRRQSRAKAELEKKLIKVRKPYLHESRHQHALRRARSSGGRFAKKXAAEASKHASEEKVTALGSAPSPQSVSSSGSERLPSDSTETWNSSSRQQEARGPQAHDTHEPPKYKNGSGYYQSPGDSQTTNHSHTSERGEEDQQWKSFSADQGSQRPHAFQ

SEQ ID NO: 10946 - protein, 152 aa, Casuarina glauca
MALTEKQEALLKQSWEVLKQNIPAHSLRLFALIIEAAPESKYVFSFLKDSNEIPENNPKLKAHAAVIFKTICESATELRQKGHAVWDNNTLKRLGSIHLKNKITDPHFEVMKGALLGTIKEAIKENWSDEMGQAWTEAYNQLVATIKAEMKE

SEQ ID NO: 10947 - protein, 1175 aa, Wolbachia endosymbiont of Drosophila melanogaster
MTIYGRTWWGKKWLQSFDGIDYDNRLPRGRTCANTGRAFGIKINGHIVTAKVHSSGSYPYRGSKPQPYKVKIILNELSSSEQQTIRQIIETSPAILAKLINRQLSASLFDKLNDLGIKLFPSNWQEMNASCSCPDWAMPCKHIAAVIYLIAAEIDKNPFMIFNIHNCNLSALIDDFGNGKLENAQNILKIDDIFKACSKIRIHNQAILNDIDLSTIPNLFGCISSILTDNPLFFEKNFHNILQIAYKHWQKYPAGRLVYYPASKKELSEEELFIKRWGNIENWQTFQLFIDDQHYLTQVSNGTTNLFRLSGNVLRDVARFLNDIPSSLLHKLNPELRFMHMISQFAHMLMEKSALIPQVLQNKRGEVIIRWIPALFNESVKEIHSKISSICPPLLIKYQEIVMEPEEQVNVAISLILLGYIEDNFPASLDKHRDKSIFELFFTGRSYKFTEFSNKEIPQAINLWLSRLYLADKPYKLYLMIKDHHEKFELEVQLSLDDEKSFIKLEKALSNQNVKLSILSDLALLSEYIPELEKSIDDNSTLSFNLDNFAPLFLHILPVLRAIGIKVILPKSLQKILKPQLSLNLSTKDKIKEDRESFLTLENLLKFDWKVAIGDKKLSVTEFKKLLKDSRGLVRIVDQYVLLDDKEVEALLKKLDKLPDYLSQAELMQAALTGEVNETKVAFDQQLTSLFNKLNTYTPVTTPNNLIAQLRPYQERGFSWLVQNIENGFGSIIADDMGLGKTLQVIAAILCCKNTGFLDRDRVLVVAPTSILSNWQREMERFAPELKLFVYHGQNRELASDYDVALTSYGLARRDKKELNKIRWFLLVIDEAQNIKNPNTEQTKAIKTIAAKHKIAMSGTPVENRLLEYWSIFDFINKSYLGTPKQFKSSFATPIEKARDKTCLERFMKITSPFMLRRLKSDKSIIQDLPDKIENNRYCSLTSEQTALYQKVVDTTMEKIEKSEGIERKGLIFKLINALKQICNHPSQFGKKKRASIEQSGKMQMLEEILISIGEVAEKSLIFTQYTEMGEIIARLLEERFESEVPFLHGGLSRKARDTMINDFQNLFQSNILIVSLKAGGTGLNLTAANHVIHYDLWWNPAVEAQATDRAYRIGQERNVMVYRLLSTGTFEERIDEMIQSKKELANLTISSGESWITEFNNDQLRDLVNIKNAL

SEQ ID NO: 10948 - protein, 189 aa, Zea mays
  misc_feature (131)..(131): Xaa can be any naturally occurring amino acid
MDATKEASVTDLKRPREEDDHATAAVASMETDNSAPASNGEQTKKPACFSSVIPGWFSEMSPMWPGEAHSLKVEKVLFQGKSDYQDIIVFQSATYGKVLVLDGVIQLTERDECAYQEMITHLPLGPIPNPXKVLVIGRENGGGPGENSPPFLWGEKIDWGGNDKKGGCDPPSFSLFPKGKKWVFWGSPR

SEQ ID NO: 10949 - protein, 641 aa, Xanthomonas axonopodis pv. citri str. 306
MGKIIGIDLGTTNSCVSIMDGGKARVIENSEGDRTTPSIVAYTKDGEVLVGASAKRQAVTNPKNTFYAVKRLIGRKFTDGEVQKDISHVPYGILAHDNGDAWVQTSDGKRMAPQEISARVLEKMKKTAEDFLGEKVTEAVITVPAYFNDSQRQATKDAGRIAGLDVKRIINEPTAAALAYGLDKNGGDRKIAVYDLGGGTFDVSIIEIAEVDGEKQFEVLATNGDTFLGGEDFDNRVIEYLVDEFNKDQGIDLRKDPLALQRLKDAAERAKIELSSSQQTEVNLPYVTADASGPKHLNIKLTRAKLEALVEDLVKKSIEPCRTALNDAGLRASDINEVILVGGQTRMPKVQQAVADFFGKEPRKDVNPDEAVAVGAAIQGGVLAGDVKDVLLLDVTPLSLGIETMGGVFTKIIEKNTTIPTKASQTFSTAEDNQSAVTVHVLQGEREQARFNKSLAKFDLSGIEPAPRGMPQVEVSFDIDANGILHVSAKDKKTNKEQKVEIKAGSGLSDEEIQRMVADAEANREEDKKFQELVQARNQADGLIHATRTAITEHGSKVGGDVIGKVEAALSDLETAMKGDDKAQIEARTKTLEEAGQSLYAAAAAAEQGGNADAASGNAQASKAADDVVDAEFTEVKDDKK

SEQ ID NO: 10950 - protein, 380 aa, Arabidopsis thaliana
MDSNNHLYDPNPTGSGLLRFRSAPSSVLAAFVDDDKIGFDSDRLLSRFVTSNGVNGDLGSPKFEDKSPVSLTNTSVSYAATLPPPPQLEPSSFLGLPPHYPRQSKGIMNSVGLDQFLGINNHHTKPVESNLLRQSSSPAGMFTNLSDQNELKHFGLNKSNKCLLYTYKFAGYGSMRNLMNYEEDEESPSNSNGLRRHCSLSSRPPSSLGMLSQIPEIAPETNFPYSHWNDPSSFIDNLSSLKREAEDDGKLFLGAQNGESGNRMQLLSHHLSLPKSSSTASDMVSVDKYLQLQDSVPCKIRAKRGCATHPRSIAERVRRTRISERMRKLQELVPNMDKQTNTSDMLDLAVDYIKDLQRQYKILNDNRANCKCMNKEKKSI

SEQ ID NO: 10951 - protein, 484 aa, Xylella fastidiosa Dixon
MRVVGLSLAISVVLLSFSLSAKNPSGVVMSPPVEEMEMPESNDVNVPLDEIRRFVSVYNAIKQAYVDPVNDRKLMHSAVRGLLSDLDPHSTYFDKEDADAFDEQTSGVYDGIGVELQEQSDNTLKVIAPIDDTPAARAGLRPGDLIVAINGKPLANVDAMKPLRGAPGSQVTLTIVRDKNGKPFDMTIKRETIHIASVRSRMLEPGYGYIRISVFQADTGNDFHKHLGQLKQQAGGRLRGLLLDLRSNPGGLLTAAVQVADALLDKGNIVSTRGRISASDTRFDATPGDLLDGLPLVVLVDAGSASASEVLVGALSDNHRARVIGSCTFGKGSVQTLLPLDNGDSVKLTTARYYTPSGRSIQARGIVPDLLLKPDGVGAADLSGSGIDRSEAGLPGHLRGTDEGVPGCTSSDPLPGDTPIMTALLELKQPGSAVQAKKAIPVKVVSDVKSATKSPLSVFGKDRAVKRVPVVSPTSEQVDGQPSK

SEQ ID NO: 10952 - protein, 1223 aa, Oryza sativa Japonica Group
MVLLSPDKCGGRGGWRDSHDGCCMAAWRPRHGTGDWATATRITARVLPLARWPRRAQWLRLQLSQRHSAGRRLGASMAGGDHISVRRQRGSQRPHHGLDGAAGGVAAGARLYGQDAAWPTGGVSSNGSGRHRLPGGYRGIYITVPRSKLDNHGNRAATGHTVIPGLSPFFTHPRKFTPTPTNPRAVGPLPGGTDARHVSVAGGNWQSLRNRDSPTTRITTVSTPPATLDTHAPHAAALCLCLGLGLRLPRRGHAMAAAGRDPPATPSSRMYYCRQRKASSEVNANVFVPGGQNGISFPASNRAHDWGYGGVREEWEASYARKLQLINFLSSLHQRTANSLITTRMDANMDTPLEQKQKDSSAIIVLDSDDEDEAERCEQLASENNKQQAPSGPTSPCTTWIVSSAKDQVNGTLHVDGVQSTQIVPYGQNAPLINQSPLQTSWQPSIQYERVILQRRPEEQRVQDLVAASHAEKIAETQVFLTLPTLPNERKRRKSEPTTLVDGDGGTNLGKGKRKNHQNQAAVDSILDLQQTVVPLQQNDVPSQSYRTMIEEEKPVKESDGLEDLWKDFSLAAECTKLDTNEDMSNEKDVDDENEMDDDCNHDIRIHEDLGHVCRICGMIVRKAETIIDYQWKKASRTRTNYYESRSKDADDIDTGAVKVSEDFIVSDIAIHPRHAKQMRPHQLEGFSFLVKNLVGDKPGGCILAHAPGSGKTFMLISFIQSFLAKYPSARPLVVLPKGILGTWKREFQRWQVEDIPLYDFYSVKADKRTEQLEVLKSWEARMSILFLGYKQFSRIICGDGDGNIAAACRDRLLMVPNLLILDEGHTPRNRETDVLASLKRVQTPRKVVLSGTLFQNHVSEVFNILDLVRPKFLKMESSRPIARRIMSQVAISGIRSLKGVHDSAFTESVEDTLLNDDNFTRKSHVIRSLRELTKDVLHYYKGDILDELPGLVDFSVFLKLSTKQKEIVHKIEAYEKFKRSAVGTALYIHPCLSEISEGDAADRATNLTDATVDSLIESIIIKDGVKAKFFFNILSLANSAGEKLLAFSQYILPMKFLERLLVKRLGWHVGKEIFMISGDTSADDREVAMDQFNNSADAKVLFGSIKACGEGISLVGASRVIILDVHLNPSVTRQAIGRAFRPGQQKKVFVYRLVAADSPEVKFHETAFKKEVIPKLWFEWSELCTTEDFKLNQVDIDDSEDELLEANAIRQDIKALYRRVWQ

SEQ ID NO: 10953 - protein, 632 aa, Actinobacillus pleuropneumoniae serovar 1 str. 4074
MGKIIGIDLGTTNSCVAVMDGDKARVIENAEGARTTPSIIAYTDNETLVGQPAKRQAITNPKNTLFAIKRLIGRRFESEEVQRDIKIMPFEITRADNGDAWVNVKGDKLAPPQISAEVLKKMKKTAEDFLGEAVTEAVITVPAYFNDAQRQATIDAGRIAGLDVKRIINEPTAAALAFGLGSTKENQVIAVYDLGGGTFDISIIEIDNFDGEQTFEVLATGGNTHLGGEDFDNRVIDYIIDEFKKEQGVDLRNDPMALQRVKEAAEKAKIELSSAQSTEVNLPYITADATGPKHLAINVTRAKLEALVEDLVASSIESLKTVLKDAGKSVNEINDIILVGGQTRMPLVQQKVAEFFGKEARKDVNPDEAVAIGAAVQGGVLKGDVKDVLLLDVTPLSLGIETMGGVMTVLIEKNTTIPTKKSQVFSTAEDNQSAVTIHVLQGERKQASANKSLGQFNLEGINPAPRGMPQIEVTFDIDANGVINVSAKDKNTGKEQQIRIQASSGLSDEEIEQMVRDAEANAEADKKFEELVQARNQADGIAHATRKQIEEAGDALNADDKAKIEAAIADLEKAAKGDDKAEIDAKTEALIKASEPLMQAAQAKAQAGEQPQQSAKDDGVVDAEFEEVKDNK

SEQ ID NO: 10954 - protein, 189 aa, Leptospira interrogans serovar Copenhageni str. Fiocruz L1-130
MKEGASFMYSKYFIWFMTLGIFLPLAGIFAKGSFYDFKVKDIKGNEVSLSKYKGKVVMVVNVASKCGYTYQYEHLEKVYKKYKDQGFAVVGFPANNFGGQEPGTDQEIETFCRIQKGASFDMMSKISVKGKDIHPLYFYLIQNSPNPGEVEWNFEKILISKSGTIEARYRSSVEPDSSAVTQKIETLLK

SEQ ID NO: 10955 - protein, 155 aa, Cryptococcus neoformans var. neoformans JEC21; identical to SEQ ID NO: 793

SEQ ID NO: 10956 - protein, 504 aa, Rhodococcus sp. RHA1
MIPMTLARIAEIVGGELHDVADPSAEVTGTVEFDSRKVTAGGLFLALPGAHVDGHDHAASAVEAGVVAVLAARPVGVPAIVVTPTPSDVPSKAMALEHDTDGSGAAVLAALAKLARASVDGLTAKGLTVVGVTGSAGKTSTKDLLAAVLRPLGPVVAPPGSFNNELGHPWTALRADADTGFLVLEMSARGRGHIASLANIAPPKIGVVLNVGTAHLGEFGSRDAIAAAKGELAESLPSADEGGVAILNADDPLVAAMAPRTSARVVLVGRSESAHVRATDIVLDEKARARFTLTAPTGSVAVELAVHGEHQVGNALAAAAVALECGADLEQIAQALSGAAAVSARRMDVRDRPDGVTVVNDSYNANPDSMRAALKALVSMARSGRGAARRSWAVLGEMAELGPESVVEHDAIGRFAVRLDVSRLIIVGTGRPARAMHQGAVMEGSWGEESILVPDIAGAVALLEAELAPGDLVLVKASQSIGLWEVADTVLAGSTGQKGSEATR

SEQ ID NO: 10957 - protein, 537 aa, Rhodococcus sp. RHA1
MPVPSRPQSASVEVKVTDSLRPAQPVRTTVSALAALAGARVEAPTGTAEHVIVTGVDLRAQGIVEGDLFAALPGARAHGAEFAADALARGATAILTDEAGFALVSALGSDMPVLVHDDPRGVLGELSATIYGRPSEKMQVIGITGTSGKTTTSYLVEAALTAAGRTTGLVGTIETRMRGRRVPSALTTPEAPQLHALFAVMLEQGIDTVVMEVSSHALSLGRVDGVRFDVGAFTNLSQDHLDFHRDFEDYFAAKARLFAADSSVHAQHAVICIDDVWGQRMADVARGAHSIVTTVATTPDSEGAVWTAGPATVSPSGSQTFALTTAEGTTLDVELRLPGQYNVANASLAVALCAALGVDPRDAVEGIAGVDVPGRVQRIDRGQDFLAVVDYAHKPAAVEAVIATLREQVRGRVAVVVGAGGDRDAGKRPLMGAAAARGADLLIITDDNPRSEDPAKIRAAVREGALGVPESERGQVWEVADRAKAIADAVGWAQAGDVVLVAGKGHEIGQEIHGVKYPFDDRDVLGDAIERQVGGTR

SEQ ID NO: 10958 - protein, 392 aa, Heteropterys sincorensis; identical to SEQ ID NO: 7394

SEQ ID NO: 10959 - protein, 1633 aa, Oryza sativa Indica Group
MASPPPFDICGDLDDDPTPPAPTPLAAPTPNGLNDRLLRLTRTHQRGPSQNPNPNPNPKPPPPPPPQEPEPAKVKLAGRRRLCKLSTAGDESAGDDDSIRDILDDLTTRLDSLSVDRSTARPRPHVSPLPCALHADPDPSQSQLNDGTKPSSSFVDCDDDDDDAGGAYGGFGVKEEVTRKVFKASSSSFGGRGNDDKMKAKGAYAFDTVSRKTTTESKTSKFFGDYDDEDDIDQDAENGKENHADDVGWEKTEDFKMEPTGTGVTRKPYNLPGRIFNMLYPHQREGLRWLWVLHCRGTGGILGDDMGLGKTMQVSAFLAGLFHSRLIKRVLVVAPKTLLTHWTKELSVVGLKDKIRDYSGPNANARNYELKYAFKEGGILLTTYDIVRNNFKMIKGNFTNDFDDEEETLWNYVILDEGHIIKNPKTQRAQSLFEIPCVHRIVISGTPIQNNLKVQSKELRERIKPYFLRRMKNEVFLDSGTGEDKKLAKKNELIIWLKLTSCQRQLYEAFLNSELVHSSMQGSPLAAITILKKICDHPLLLTKKAAEGVLEGMDVMLNNQEMGMVEKMAMNLADMAHDDDDVELQVGQDVSCKLSFMMSLLQNLVSEGHNVLIFSQTRKMLNIIQEAIILEGYKFLRIDGTTKISERERIVKDFQEGPGAPIFLLTTQVGGLGLTLTKAARVIVVDPAWNPSTDNQSVDRAYRIGQMKDVIVYRLMTSGTIEEKIYKLQVFKGALFRTATEHKEQTRYFSKRDIQELFSLPEQGFDVSLTQKQLQEEHGQQLVMDDSLRKHIQFLEQQGIAGVSHHSLLFSKTAILPTLNDNDGLDSSRRAMPMAKHYYKGASSDYAANGAAYAMKPKEFIARTYSPNSTSTESPEEIKAKINRLSQTLANTVLVAKLPDRGDKIRRQINELDEKLTVIESSPEPLERKGPAEARTLKDWESLKAKEEEAGGRARGEGRKGSELNSTPFRLNSTSSTLVVFKVPSTFTTGRGALAAAPANGRFVPMAPTSQPQPQQEVEVEVDEDEELVNMVVEAGVGAIKMKMKIPRRVLGSLYPHQRDGLAWLWALHCTATGGILADDMGLGKTIQEGGILLTSYHIVRNNYMLLRGNGNGNNVDNNEEEPLWDYVILDEGHIVKNTKTQRAQSLFQIPSAHRIVLTGTPIQNKLKRRLYEAFLNKDPVRSQTGALKGSSLEASTILRKICDHPLLLTKRDTDDFLEEMGAMLNNRDMCMVERILEDNLYADKRLQIVQGASCKIAFILPLLRNLVEEGHYVLIFSQTRVMLNLIQDAVSIEGHKFLRIDGTTKISERKKILKDFQEGLDSPILLLTSHVGGLGNTLTKADRVIVVDPAWNPSIDNQSVDRAYRIGQTKDVIVYRLVTCGTIEEKIYKQQIFKGGLFRTATECKEQPQFYNQDLYLQNEQEYSSLPPHGFDASLTQHKMQVENGQQLVMDESLKKHIQFLEQQGIAGVNRHGVLFCKTETTATLGDDGAINRKVRDIMVRRCYAPWEHICRDVEKKSLIDQVKEMSKKMDGLGDTMGRIVALEEEYAAELIGMLHENRWERSHLEKIRMQIDDLHEEHMAKFDEMLERIKRMELADEGELIAKFGEMVERMRQRCDMDRLSLPLLSSTLVA

SEQ ID NO: 10960 - protein, 423 aa, Azotobacter vinelandii
MLDLAAAFIALTTLFTYLNYRLIRLPPAIGVMIGALLLSLLAYGLSALGYPVLELEIQEMIRRIDFSDILMTWFLPALLFAGALHVNLDDLRSYKWPITFLATGGVLIATFVVAGLAHYTFALFGWQVSFIYCLLFGALISPTDPIAVMGILKSSGAPKPLQTTIVGESLFNDGTAVVMFSILLGVLMIGHTPTIGEVSLLFLKEAIGGIVFGLLLGYVVYLLLSKVNEFQPSVMLTLALVFGGASLAAKLHVSAPIVMVVAGLIIGNHGRHHAMSEESRRYVDGFWVLIDEILNALLFALIGLELLVLPFTWLHVVAAILLGGAVLLARVLTVGPGIILIRQLKSVQLQVAPGTVRILSWGGLRGGVSVALALALPLGPERDLLLTLTYIVVLVSILVQGLTIGPLVKSLYGSNPVEAEEAH

SEQ ID NO: 10961 - protein, 268 aa, Clostridium tetani E88
MFFMEEKLYGNLIIIGGAEDKKGDKSILKEISSYINHEESHLIIATVASEIPEELGIEYKEIFKELNVKKVSILQVKEREDAFKLENINLINNASAVFFTGGDQLRITSMIGGTPLYKAIHKSYKNGCIYIGTSAGASVMSDTMIVSGPNDESPRKCTLKMAPGLGLIKDVIIDQHFAQRGRIGRLLVAIAQNPQIIGIGIDEDTAIIVNDKASFRVIGSGAVYILDGSEITKSNVSEQKSEEILSIFNIRMHVLKKDDKFDLSRRIL

SEQ ID NO: 10962 - protein, 392 aa, Heteropterys steyermarkii; identical to SEQ ID NO: 7396

SEQ ID NO: 10963 - protein, 540 aa, Zea mays; identical to SEQ ID NO: 10618

SEQ ID NO: 10964 - protein, 388 aa, Zea mays
MQTAIEHACSVVECAATARAAMDMSHYIPDWSSSMGDTFAPLGGEDDDGLIELMWRNGHVVMQAQAPRKPPRPDDDEAAAAQAQAWFQYPVEERADLFSELFGEAQAAVGGARGEAARQSIRMMPPPPPPPRPAQAPREEKACPGDGGTATATDGAGSSVLTVVSSLCGSNGNHVQATAPGDVARARDVLMVTSSSTTRSRSCTTKSEQPGPGPGAARRSGKRKHNDATDAEDVGLECEPAQRTTTAKRRRAAQVHNLSERRRRDRINEKMKALQELIPHCNKADKASMLDEAIEYLKSLQLQLQVVWMGGGIAAAGVHQRTMVAAPGRPPHVASLPASAPDLYTRYLAVDHLPPPPLVPPPRTVELSKPLNIDEFYLYIIYAGILGC

SEQ ID NO: 10965 - protein, 874 aa, Clostridium tetani E88
MKALNYKHFSGRNIYSHRPCIKMEVDLEGFRDISSKDINGFNNKLLEILPGLKKHRCGIDEDGGFAKRLKEGTFLAHICEHTIIELQNLLGIEVSYGKAREIKGDHYYIVYECKYKNTAIEAGNIAIKIINSIITKNEFSLELALNKLNNIFNKEKLGPSTYSIVKAAQKRNIPFIRIGEKSILQLGYGKTSKIVEATIGSDTKCISVDIACDKYLTKEILKNQCIPTPLGGIINNPMDMLIKADRIGYPVVIKPRYGNQGKGVFANLNNEADLLKAYKILSKEYEDIIIEKHIQGKDYRICVVDYKVVAVSERIPPHITGNGKSTIESLIHELNRDCKRGEGHEKPLTKIKIDLKLIDSIGKMGFNINSVPKKGERVFLRENANLSTGGIAIDCTDLICNKNIEMLERASKAVGLDICGIDVCCTDISKPIDGAIIEVNAAPGIRMHEYPYKGQNRYVGEAIVNMIFKDIKDQVPLISVTGTNGKTTTTRLIAHIFDLAGYKTGFTSTGGIYIDGNIIDEGDTTGYNSALTLLTNKEVEAIVLETARGGIIKKGLAYDLADVGVITNITTDHLGLDGIDTLEDLAYVKSLIGEAVKDEGYVVLNADDVMSMKIINRIKSNVILFSKDKNNKFIREYLNKGCFAIYVHEGYMYIEKDNKIIPLININNIKIGLQGKLDYNIENAMAACAVGISMGINPIYIRKAMESFNLDENYIPGRFNIYSFKDRTIILDYGHNAEGYNAVIKGAKKLKHNRLIGVIGAPGDRNDEHLIKLGEIGGKNFDYIYIKEDKHNRTRKKGDVAKLLKTGILNTGFNKDNIKIILKEEDALKEAIKYSKKGDLIVTFFEEFNPLLNIVKKEMENGGDKHKSSNEALA

SEQ ID NO: 10966 - protein, 484 aa, Clostridium difficile 630
MKLNDIIQGLDIINVKGELNIDINNVQYDSRKVTKGTLFICIKGFVSDGHKYIKDAIEKGASAFIVEEDVAIKGCTFIKVKDTRKDMAKVADNFYNHPSQKFNVIGVTGTNGKTSITTILNEILTLNKNKVGLIGTIKIFDGEKDIVSNSTTPESIDLQYHFNNMLDNGCDYCAMEVSSHSLALNRVDETDFKLGIFTNLTPDHLDFHKDLEDYRKAKEKLFFKTTMANIINIDDEGGKKIYENIKGINVPCYTYGVDTKADFMARDIKSDSDGVSYRLITPSYEEVIFIPVPGMFTVYNTLAVIAACYVLGIPKPIYKEGLRLSNGVSGRFETVPNDKGISVIVDYAHTPDALENVLKTTQQFAEGKIISVFGCGGDRDTEKRPLMGAIGQKYSDLCIITSDNPRTEEPEAIIKDILEGIDKKKENYHVVVDREQAIAEAISMAKKDDVVIITGKGHETYQIIGKVKHHFDDKEVANECLSKM

SEQ ID NO: 10967 - protein, 392 aa, Heteropterys ternstroemiifolia; identical to SEQ ID NO: 7398

SEQ ID NO: 10968 - protein, 895 aa, Ashbya gossypii ATCC 10895
MAKRKLPDRPPNGSGAGERPSVRPRRLDSGRAYSTLTQPFRVPLNSERTRHGERYGVRATRRAVTTYAEEGGARSEENDVGGKRIDALSEQRVSKDAQRLAGIERTLRRSFSVPIKGYVPRHNIPLALGMKMRVVAPPRPLHDPTEEFAIVLYDPTVDGEIPDETPREEPAQKENDGGNEEQARPTRRTATHPEKLSNGLRNKTLRELLGTVTETPKFPSVPVVIDPRLARILRPHQVEGVRFLYRCVTGLAMKDFLDTQAVLAAGEVQDDGTGKDPGSKDSEPIVVEVLEETPTPTPTPTPTPSPEILDANAAMTRESNRGAYGCIMADEMGLGKTLQCIALMWTLLRQGSQGRPTIEKCIIVCPSSLVNNWANEIVKWLGPDALSPLAIDGRKSSLSNGSVAQSVRQWAIAQGRNVVKPVLIISYETLRRNVENLKGCKVGLMLADEGHRLKNGDSLTFTSLDSINCPRRVILSGTPIQNDLSEYFALLNFSNPGLLGTRAQFRKNFEIPILRGRDADATDKEIAAGEVKLHELSQIVSKFIIRRTNDILSKYLPCKYEHILFVNLSPMQKAIYEHFVRSREVAKLMKGTGSQPLKAIGLLKKLCNHPDLLDLPDEIAGSTNLIPDDYQSAMTHNSRGGRSHVEVQTTHSSKFAILERFLFKIKHESNDKIVLISNYTQTLDLIEKMCRYNHYGVLRLDGTMTINKRQKLVDKFNDPSGEEFIFLLSSKAGGCGINLIGANRLILMDPDWNPAADQQALARVWRDGQKKDCFIYRFITTGSIEEKISQRPSMKMSLSSCVVEEKEDVERLFSSENLRPLFQFDSNTHMRYPPTYHCKRCRDGKQMIKAPAMLYGDATTWNHLNHDALLKTNDHLLRNEHQFNDISYVFQYISH

SEQ ID NO: 10969 - protein, 392 aa, Heteropterys trichanthera; identical to SEQ ID NO: 7401

SEQ ID NO: 10970 - protein, 223 aa, Zea mays
  misc_feature (71)..(71): Xaa can be any naturally occurring amino acid
MERSLDSYSSIKDVTYSCGYCGYALNMSSSARDTEGIGPKYRKQIRKGVVAFVAVDESRFTLAHELTCTPXFRSARSWGLFRRRSRLLSRKCGGHIGSASGKEEEEDASSSSLLGGDGSSDDTRPSSGSGRSSVASRQKSYVVRISALQPSLEDLCCRSQVSSWSPVFFFQPGSIRICCNLGWRWPAGGRRGARPQGKIFLGVSRLFRGLISCRLLPVILLYE

SEQ ID NO: 10971 - protein, 392 aa, Jubelina wilburii; identical to SEQ ID NO: 7403

SEQ ID NO: 10972 - protein, 428 aa, Prochlorococcus marinus str. MIT 9215
MNSSFNKLLTFKTVITATMIIVFSINLLLIEKVDALSDSRQLVLDAWTLVNEGFYDPEKFEEIQWKRIRQKTLQKQIETTEEAYSAIEDMLRTLEDPYTRVLRPKDYDLLKSSNFGSEINGVGLQLGEDDNNKVKVISTLGGSPAEEAGIVSGDFIETVDGISSEKLGLASTASKLRGESGTKVLVEVSSGSGEIREVDLERRSVDLRPVRTKRLRDDSHTIGYLRITQFSESVPKKVEEALLELKEKEVEGLILDLRNNSGGLVSSGIAVADSLLSEKPVVETKDRNGIKDAIISQKETFYDGPMVTLVNKGTASASEILAGSLQDNDRSILMGEKTYGKGLIQSLKSLGEDSGIAITVASYLTPKGNNIQGQGITPDKLLDLPDASEYGNADDKWVKNAELFLESLLEKEEVSVQTIELSDEEIKS

SEQ ID NO: 10973 - protein, 450 aa, Silicibacter sp. TM1040
MTFEDLKEQIAAGQVDTVLVCIVDMQGRLMGKRFHAEAFLEMADGETHCCNYLLATDLAMATPDGYASTSWERGYGDYIMKPDLTTLRPVPWLEGTAMVLCDVIDHHTHAPVAHSPREMLKAQIARCEALGLSPVMATELEFFLFKGTHDEIAAGGFNKLEPISTYNEDYSIMQTSKEEPVMRPIRNHLRAMGLPIEGSKGEAEAGQEELNIKYDAALATADHHTIAKHGIKEIAHQQGFAATFLPKWHHERVGSAAHVHQSLWKDGGNAFFDESAPLGKSKLMDHYMAGLLKYAADYTYFMAPYINSYKRFAKGTFAPTQVVWSVDNRTAAFRLCGDGTKGVRVECRVPGSDMNPYLAQAAMLAAGLKGIEEKLELQDPFNGDAYAGDTQQHIPRSLLEARKALLGSEMLREAFGEDVITHYARAAEWEIEEFNRVVTDYEVARGFEKA

SEQ ID NO: 10974 - protein, 260 aa, Silene dioica
KVEKILFQGKSKYQDVIVFQSSTYGKVLILDGVIQLTERDECAYQEMISHLPLCSIPNPKKVLVIGGGDGGVLREVARHSSVEHIDICEIDEMVVTVSKEFFPEVAVGYDDPRVNLHIGDGVAFLKVAPEGSYDTVIVDSSDPIGPAKELFEKPFFESVAKALRPGGVVCTQAESIWLHMHIIEDIVSNCREIFKGSVNYAWTTVPTYPSGVIGFMVCSTEGPAVDFKNPVNPIDKTEDEKRPLKFYNAEIHSAAFCLPS

SEQ ID NO: 10975 - protein, 491 aa, Archaeoglobus fulgidus DSM 4304
MVRRLRGDCMEEVERAKAVLKENNVRQVLCAFADVRGYLQMFSIPAREFVDGSAFENGIGFDGSSVRGFRTIEKSDMVWMPDASSLKIIPWIDDPIQKSAIMFGNVYEAWGTEIADCDPRGYVAKRYEDMLKSEGMSAIFGPEIEFFLFEGVDFTRLSWDMWVSPNGGAGDSWGPPRIMPISSELESGYMIRPKEGYFRPPPEDTTVEYRNELVYYLEQLGIDIEYHHHEVATAGQVELDFKPKQLVDVGDAFYLYKFAAKNIAAMHGLYATFMPKPLYLDNASGMHTHQSLWKGEPFSGEAVFADPDDEYMLSQKARYYIGGLLEHAKALTALCAPTVNSYKRLVPGFEAPIYICWSPRNRSALVRVPMYVKKPSAIRVEYRGVDPSCNPYLAITAQLAAGLDGIKKKIDPGDPLLEDVYELTPAQKRELGVGELPTTLRDAIDHLASDELMQEVLGSHIFDAFMELKIDEWNQYCLYITPWEFMKYFDI

SEQ ID NO: 10976 - protein, 632 aa, Aquifex aeolicus VF5
MAEKKEKIIGIDLGTTNSVVSVMMGDEAVVIQNQEGSRLTPSVVSWTKEKEILVGEPAKRRAILDPENTVYESKRFIGRKFEEVKEEAKRVSYKVVPDEKGDAAFDIPNAGKLVRPEEVGAHVLRKLKEAAEAFLGEPVKKAVITVPAYFNERQRQATKDAGKIAGLEVVRILNEPTAAAMAYGLHKKDNVRILVYDFGGGTFDVSILEGGEGVIEVKVTAGDTHLGGANIDERIMDWLIEEFKKETGIDLRKDRTALQRLKEASEQAKKELSFKMETEINLPFITIDPNTNQPLHLQKKLTRARLEEMIKDIVDRTIDIVKQALEDAKLKPSDIDEVVLVGGSTRIPLVQQRIKEFFGKEPHKGLNPDEVVAMGAAIQAGVLAGEVKEIVLVDVTPLSLGVETYGGVMTVLIPRNTPIPVRKCEIFTTAHDYQTEVEIHVLQGERPLAKDNKSLAKFYLTGIPPAPRGVPKIEVCFDIDADGILHVTAKDLGTGKEQSVRVEISSGLTPEEIERIIKEAEEHAEEDRKKKELIEAKNQLDHLVYQLEKALKEAGDKVPADVKSEAEKVIEEAKKTIETATEIEQVKQVTEKVLQVSSKMGTTLYGEAGKQAGGGEKKDEGGEGEVEAKPVD

SEQ ID NO: 10977 - protein, 160 aa, Gloeobacter violaceus PCC 7421
MATVSDITVQTVDGQARSLGRYKGQVLLIVNVASYCGYTPQYAGLEKLYRRYKDAGLRVLAFPCNDFGGQEPGSNAEIAEFCSRYDVSFELFDKVGARGYYKHPLYVRLSEAAEPAGEVSWNFEKFLIAKSGEIVGRYRSGIGPEDPQLVADIERELAKS

SEQ ID NO: 10978 - protein, 679 aa, Pennisetum glaucum
MATTTIPTSTPFFTAHHGPRRSRPSVSAAVYSRSRRWRPLRVACEKVVGIDLGTTNSAVAAMEGGKPTIVTNAEGARTTPSVVAYTKTGDRLVGQIAKRQAVVNPENTFFSVKRFIGRKMNEVDEESKQVSYRVVRDDNGNVKLDCPAIGKQFAAEEISAQVLRKLVDDASKFLNDKVTKAVITVPAYFNDSQRTATKDAGRIAALEVLRIINEPTAASLAYGFEKKNNETILVFDLGGGTFDVSVLEVGDGVFEVLSTSGDTHLGGDDFDKRIVDWLAGTFKNDEGIDLLKDKQALQRLTEAAEKAKMELSSLTQTNISLPFITATADGPKHIETTLTRAKFEELCSDLLDRLRTPVDNALRDAKLQFKDIDEVILVGGSTRIPAVQELVKKITGKDPNVTVNPDEVVALGAAVQAGVLSGDVSDIVLLDVTPLSLGLETLGGVMTKITPRNTTLPTSKSEVFSTAADGQTSVEINVLQGEREFVRDNKSLGSFRLDGIPPAPRGVPQIEVKFDIDANGILSVTAVDKGTGKKQDITITGASTLPKDEVERMVDEAERFAKEDKEKRDAIDTKNQAESVIYQTEKQLKELGDKVPSDVKGKVKSKLQELKDAVAGGSTQMMKDALSALNQEVMQLGQSLYSQQGAPGASPTPGADATGSPEKPGGEGDVIDADFTDSK

SEQ ID NO: 10979 - protein, 521 aa, Crocosphaera watsonii WH 8501
MSLEATAADAAIKQNLEQFLVVLSVSLSVATLSRIFSWFRQIPYTLLLVIVGLGLAFVDVRLVNLSPELILEIFLPPLLFEAAWNIRWRSLKENWIPVVLFAVIGVIISVIGIALALSQLTSLTLPIALLVGASLSATDPVSVVALFRELGTSKKLTILMEGESLFNDGVAVVAFLLLVGIPLGTEVFSVTDTVVSFFKFVGIGIGVGCLVGFGISYLTQRFDLPLVEQSLTLVSAYGTYLITEELGGSGVISVVTVGIILGNFGSRIGMNPRTRLLVSEFWDFLAFFVNSIVFLLIGDQINFSSLSDNLGIIAIAITAVLVTRLISIFGLANLSNIFTKVDISLPEQTVLWWGGLRGSVSIALALSVPVSLNGRQDIIDTVFGVVLFTLLIQGLTTQWVLKKLNLVGDQPLRQEYSELLARKTAVGRVMDYFKKLDESPSIDSEFYRYEQELVKGELKSIEEKIYKFETEYPQLKSIAMQQLKDKLLDIEADTYAELIRSGQLGKNLSPVMLDILSKSGE

SEQ ID NO: 10980 - protein, 444 aa, Methylovorus mays
MKSLEEAQKFLEDHHVKYVLAQFVDIHGVAKVKSVPASHLNDILTTGAGFAGGAIWGTGIAPNGPDYMAIGELSTLSLIPWQPGYARLVCDGHVNGKPYEFDTRVVLKQQIARLAEKGWTLYTGLEPEFSLLKKDEHGAVHPFDDSDTLQKPCYDYKGITRHSPFLEKLTESLVEVGLDIYQIDHEDANGQFEINYTYADCLKSADDYIMFKMAASEIANELGIICSFMPKPFSNRPGNGMHMHMSIGDGKKSLFQDDSDPSGLGLSKLAYHFLGGILAHAPALAAVCAPTVNSYKRLVVGRSLSGATWAPAYIAYGNNNRSTLVRIPYGRLELRLPDGSCNPYLATAAVIAAGLDGVARELDPGTGRDDNLYDYSLEQLAEFGIGILPQNLGEALDALEADQVIMDAMGPGLSKEFVELKRMEWVDYMRHVSDWEINRYVQFY

SEQ ID NO: 10981 - protein, 463 aa, Acinetobacter sp. ADP1
MLQQAVKEMFDHHELTSQPMYRPEVQKVIDQHHLKYVLAQFVDIHGAAKTKSVPISGLKAIEKDGVGFAGFAISGMGMQPHGPDFMVKGDLSTLTPVPWQPGYGRVVCEGYVNGKPHPYDSRYVLRQQVERLSAQGWTLNTGLEPEFSLFRRSEDGKLKMVDDSDNLDKPCYDYKGLSRSREFLERLTEALIPVGFDIYQIDHEDANGQFEINYTYADAMKSADMFTFFRMAAGEIANDLGMICSFMPKPDPKRAGNGMHFHLSIGSDECSNLFHDASDPSGMGLSKMAYHFIAGLLEHGPALCAFCAPTVNSYKRLVVGRSLSGATWAPAFIAYGGNNRSAMVRIPYGRIELRLPDAGCNPYLVSAAIIAAGLDGIERELMPPTACNENLYSLGLEEIAARGIQTLPQSLKEAIDALKADPLFAQKMGSEIVNEFIEQKSMEWVEYCRHVSDWEIQRYTEFF

SEQ ID NO: 10982 - protein, 389 aa, Botryotinia fuckeliana
MGLKAVHFGAGNIGRGFVAEFLHKSGYEVVFCDVMDSIITKLQTTPSYKVIQVGAEGTSEDTITNYRAINSKTHEADVIEEIRTADVVTCSVGPNILKFIAPVIAKGIDGRANDATPIAVIACENAIGATDTLAQHIKGDHTPEHRLEDHHERARYANSAIDRIVPAQDPDAGLDVKLEKFYEWVVDRSPFHDHEPPAIEGIKWVDDLIPYIERKLFTVNTGHAAAAYHGYYHQKATVYDALQDAKILKEVHKALEETSSLIVGKHGIEVQEQKDYVDKIITRIGNPHLEDAVERVGRAPLRKLSRKERFIAPAAELAEEGKEFGALLDAAEMAFRFQNVEGDEESKELAKIMSENPPAQVVEKVCGLQSDHPLFPHVVAVVKKVQADE

SEQ ID NO: 10983 - protein, 154 aa, Synechococcus sp. PCC 7002
MALPTALKTLDGAPLSPETLENKVVLFVNVASKCGLTPQYSGLVALDQEYGDRGLVIVGVPCNQFGAQEPGTPDEIKDFTKTKYDVDFTLLEKQDVNGANRSPLYQFLVGNGPDIAWNFGKFLVGRDGEVIERFEPQTAPDDANLKAAIEKALG

SEQ ID NO: 10984 - protein, 485 aa, Bacillus clausii KSM-K16
MNELLRVLRGITPLKKEHQSIEIAHLEMDSRLVKQGTLFFCINGYTVDGHDFAKQAVEKGAVAVVAERPLALDVPVVIVRDTKRAMARLASHFYGEPTKRLQLIGVTGTNGKTSVTHILDTMFREAGQKTGLIGTLYTKIGDETIETRNTTPESLVLQQRFASMVNKQVETAVMEVSSHALHLGRVRGCDYDIAVFTNLTPDHIDYHETMERYLYAKSLLFSQLGNTYDGKTAVINSDDPASDRLIQMTTADVVTYGIKKQADVYGENIKVSAAGTRFTLHVFGEKTDVQLKLIGLFNVYNALAAAASAYVSGLSLSTIKASLEKVTGVAGRFEPVDEGQDFTVIVDYAHTPDSLENVLQTVQDFADNDIHVVVGCGGDRDATKRPVMGRIAVQYADRTIFTSDNPRTEDPDAILADITEGLDPDQYTVIVDRKTAIEQAIAAANTGDIVVIAGKGHETYQEIGRQRIHFDDREVARDALKERIQ

SEQ ID NO: 10985 - protein, 680 aa, Clostridium difficile 630
MSILVTLLGLLVCTTISTVFSKKWSNIPLAIYQIVLGIILSILPFKFSFSFNPEIFVICIIAPLLFSEGQNVSRKELLELRKPILLLAFGLVLITVFAGGIFIHFLIPGMPLSVSFALAAVISPTDLVAVKSITQGLNFPKNMMSILEGESLLNDAAGVVAFKVAVLATVTGVFSIEEAGIQFMITAFGGIIVGSILGYIIIKIRLSLHKWNLEEIPMVIVIQIMTPLFVYFVAEEIGVSGILAVVMAGIAHGIEKEHLQNTTTKLRIISDNTWYVLEYVLNGFVFTLLGFLLPSIYTGLSSKNENMALELTFISTLIVLILFVIRFIWVYLWHNSFIKPKKNPLNNFFVGFLGFKDEEVVKESISKCKYSLIVATCGVHGTFTLATALSIPFYLADKDVFPMRDTVLFISSEVILISLVLATVLLPRLLKNNVQESEPLLSDKEAYKLILKEAILKLSNEKAQEVQPVIHDLNEQLVDSEKGILNTPDNKLISMMIAEADQQGLLAVLKLLEDGKISDRAFKLYRFYITKSRKSVQKSIFKIVKLKISMWIINRKVKKEVKEKITKIVSENKEIIKEFHHAYALSTKTAISFINKNTDEDNRHEALIAIRFYNRYLNWITRKIQNDDKFEARVEYYRVMAIQSQRDSVQQLVETKQISREVAKELLENILYDEMMMIES

SEQ ID NO: 10986 - protein, 161 aa, Quercus petraea
MSTSEVITGFTEEQEALVVKSWTAMKKNSGELGLKFFLKIFEIAPSAQKLFSFLKDSNVPLERNPKLKSHAVTVFVMTCESAVQLRKAGKVTVRESTLKKTGGVHFKSGVVDEHYEVTKFALLEIIKEAVPEMWSPEMKIAWGEAYDQLVAAIKSESKPSS

SEQ ID NO: 10987 - protein, 392 aa, Mascagnia rigida; identical to SEQ ID NO: 7430

SEQ ID NO: 10988 - protein, 1519 aa, Cryptococcus neoformans var. neoformans JEC21
MLASDTQTGVGISASSSVISSQSPSSKPSSTHRITLRMPQQPESTADLDSESESLTPSPEEINIGQGIGEEVSDQERAGDDESEGEAEQDDFNYDEEEEEDYDEDELMEEGDDDDDDDDPNFGERKKKAKKARVKMDSDRPVKQKKSAGAFPMRKQVDESSDEDYGTKAHKKKYFSKTGVSRKATPGTPYSEDNAFRRGAAKRVVTYNEADVDYGLESEDEAGDTGYHYTAGAPAEAEPADEIDQVMFHWRDENHKDDPKDIPQVNLVSGVGMLCLTLLIIDLQRFHIKWKDYSHIHNTDETYAFLKNYKGFKKVENYITKVWTIDQRYHHPEPDAAWKPTQEEMEQYEIDKERIKELQESYKIVERVLDEKEEKRKEGRATLFFVKWTNLQYSDCTWETYEDVMECQGAKEGIEEFHQRQARTTIPARSISYGIDNRPTYQKIPENPPYLACGGALKPFQLTGLNWLAYVWSKGENGILADEMGLGKTVQSVSFLSYLFHVQHQYGPFLVVVPLSTISAWQAQFKRWAPELNVICYMGSARSRDVIRQFEFGPLKNLKFNVLLTTYEFILKDRQDLQQIKWQVLAVDEAHRLKNHESQLYEALKSFWSASKLLITGTPLQNNVKELLALMHFLMPEKFQLANDFDLNDASEDQGAKIKDLHDKLTTLMLRRLKKDVVKELPTKSERILRVEMSAMQTHYYKNILTKNFAVLSKGGTQQVSLMNVAMELKKASNHPYLFEGAEDRSKPANEILRGLVMNSGKMVCLDMLLSRLKSDGHRVLIFSQMVRLLDIISDYMTARGYVHQRLDGTVPSDVRKKSIEHFNAPGSPDFAFLLSTRAGGLGINLETADTVIIFDSDYNPQNDLQAMARAHRIGQQRHVSIFRLVSKGTIEEDILERAMRKMLLEYAIINKMDTTGAHINGSSTPKDKNVDLSKEELSAILKFGARNMFKTDDSTQNKKLDEMNLDDILNNADAFDTESAAAPGTTSLGGEGFLSQFAAIQDVKADVDNLSWDEIIPEDERGKAEEEENAAATAEIVAASSRKRAAAKAPGTYQDMDLDDHDGSSKPGSPNDKKPKAPGQLKKTPAQRALELKDRDLRVLIRGIQKWGDIRSRYEPIVKEAKLENKNRVVIIQTCEDIITHGEQTIAAHKAHIRDLQERGEPISSSLRQKAILFTYKGVASINAETVVARYYELKALVEHFKRVEDFPSYTIPHDSLKPTMNWTVEWTAREDSQLLVGIWKHGFGSWEAIAHDPELHLNDKIFLEDPKAAKLDPNAPKPGVPGPVHLQRRGDYLCGIIREYEENRRILVEQQAMIASLPAKEGFGFEHPPLPSIAGPSKKPSPSIASSSKDRDSGKGKRRKTPEYTDSEDESSYESMDEDAVKELLRPAKKHLKKLKSGTENLSREEKIVALKECLAGIGARIDEVVAEKAAEGQNATKWRKHCWVFASFFWPRQGVNYSKLMEIHGKMVNESGPTTSKSKAKPKRKTEDDPSKPNKKPRLSDSQKEIKVEGSSGEQL

SEQ ID NO: 10989 - protein, 392 aa, Philgamia glabrifolia; identical to SEQ ID NO: 7431

SEQ ID NO: 10990 - protein, 287 aa, Synechococcus sp. WH 7805
MSEAPSTACDWIDEHHNGVRYGLQGKVIVDEQSTIQRITVIHSNRYGNGLLLDGCWMTAEHQERHYHEPLVHPALCAANAIDRILVIGGGDGGTARECLRHKEVKHVDLVEIDGRVVELSQKYLGAIGGGCWSDTRFQLTVGDGIAWVSQASDASYDVVLVDGSDPAGPAEGLFNRSFFQHCRRILKPGGVFATQSESPEAFRDVHIETVRMLREVFGYADPLYGWVPMYPSGWWSWTFAASDGPRYRNPDPIRAAAICDGCDIWSPRWQEGAFDAIPAGIERELSA

SEQ ID NO: 10991 - protein, 208 aa, Zea mays
MALELSLASASPPAGGGLAQPPPLAPPGKEQQVAGVGILLQISMLVLSFVLGHVLRRHRFYYLPEASASLLIGLVVGGLANISNTETNTRTWFNFHEEFFFLFLLPPIIFQSGFSLSPKPFFANFGAIVTFAILGTFIASVVTGVLVYLGGLTFLMYKLPLVECLMFGALISATDPVTVLSIFQELGSDVNLYALVFGESVLNDAMAI

SEQ ID NO: 10992 - protein, 186 aa, Oryza sativa Japonica Group
MAGNKKRGGRNMDQVEKAAVRSDGVGGSATNAELPMANLVRLMKKVLPGKAKIGGAAKGLTHDCAVEFVGFVGDEASEKAKAEHRRTVAPEDYLGSFGDLGFDRYVDPMDAYIHGYREFERAGGNRRVAPPPPAAATPLTPGGPTFTDAELQFLRSVIPSRSDDEYSGSSPAIGGYGYGYGYGKNM

SEQ ID NO: 10993 - protein, 392 aa, Sphedamnocarpus sp. Davis 39-01; identical to SEQ ID NO: 7433

SEQ ID NO: 10994 - protein, 232 aa, Brassica oleracea var. botrytis
MASSSYAPFSAVFSGFAATKPNPPPTCSAFLVPKRRSNSRNLKNGVSLKSWNKHGFQFKSRNLSVYARATEEKTVHDFTVKDISGKDVSLDKFKGKPLLIVNVASKCGLTSSNYTELSQLYDKYRNQGFEILAFPCNQFGGQEPESNPDIKRFVCTRFKAEFPIFDKVDVNGPSTAPIYQFLKSKSGRFLGDLIKWNFEKFLVDKKGNVVQRYPPTTPPLQIEKDIQKLLVA

SEQ ID NO: 10995 - protein, 392 aa, Tristellateia sp. Davis 19-01; identical to SEQ ID NO: 7438

SEQ ID NO: 10996 - protein, 640 aa, uncultured marine gamma proteobacterium EBAC20E09
MSKIIGIDLGTTNSCVAVVEGQQQKVIENSEGARTTPSVIAYTDNDEVLVGLPAKRQAVTNPENTLYAIKRLIGRRFDDEVVSKDADMVPYKIIKADNGDAWVEAANKQLAPPQVAAEVLKKMKKTAEDYLGHEVKEAVITVPAYFNDSQRQATKDAGKIAGLDVKRIINEPTAAALAYGLDKGKGDSTVAVYDLGGGTFDISIIEISDVDGEHQFEVLSTNGDTFLGGEDFDLRLIDYFVDKFKEESGFDLKSDPLALQRLKEAAEKAKIELSSSEQTEVNLPYITADSSGPKHFVHKITRAKLEALVEDLVDKSLEPLKLALKDAKVAKKDIDEILLVGGQTRMPLVQKKVADFFGKDPRKDLNPDEAVAVGAAIQGSVLSGDTTDVLLLDVTPLTLGIETLGGVATPLIEKNTTIPTQKSQIFSTAEDNQTAVTVHVIQGERTQAAQNKSLGQFNLTDIPAASRGVPQIEVSFDLDANGILNVSAKDKNTGKEQSIVIKASSGLSDEDIEKMVKDAEANAEDDKKFEELVKTKNNADMLVHATRKTIQESEDKLDEDEKKQVEDAVVSLEEAIASEDTSSIESATKNLNDVLTPLTQKLYKQENAEAQGEAGVDDESSAENENTVDAEFEEVKEEDK

SEQ ID NO: 10997 - protein, 392 aa, Tristellateia sp. Davis 29-01; identical to SEQ ID NO: 7443

SEQ ID NO: 10998 - protein, 102 aa, Oryza sativa
  misc_feature (19)..(19): Xaa can be any naturally occurring amino acid
MALVEGNNSMSGGAGTFSXEQEALALKSWAIMKKDTDNIGLRFFLKIFKVAPSASQMFSFLRISNLPLQMNPKLKTHTMSVFVMTCEADAHLQKARNVTVRD

SEQ ID NO: 10999 - protein, 160 aa, Pseudomonas aeruginosa UCBPP-PA14
MSAFHDLTLLGLDGQDLPLSPFKGKVLLVVNVASKCGLTPQYAGLENLYQTYRERGFAVLGVPCNQFAGQEPGSEADIQSFCSLNYGVSFPMSAKVEVNGSARHPLYRLLAGEGAEFPGDITWNFEKFLLGPDGRVLARFSPRTAPDDPALVQAIEKALG

SEQ ID NO: 11000 - protein, 165 aa, Staphylococcus aureus subsp. aureus MRSA252
MNNRNVYDIEVSDYKGLTYKLEAFRGKVILVVNTATECIYSEQLKKLETLFQKYKDRGFVVLSFPNNNFDNRQPGSNEEILKISREKFGVTFPVLAKISVNGNDEHPLFTHLKNEQPGIFGSPIKWNFTKFIIDRQGNVVNRFLPMEDPLDISANIEILLQESSS

SEQ ID NO: 11001 - protein, 553 aa, Plantago maritima
MVFDSETMKGTVDMLATSDHSSVVSITLFVTLLCACIVIGHLLEENRWMNESITALIIGVGTGVVILLISQGKSSHLLVFSEDLFFIYLLPPIIFNAGFQVKKKQFFRNFMTIMMFGAFGTMISFTIISLGAIVFFGKMDVGLAIGDYLAIGAIFAATDSVCTLQVLNQDETPLLYSLVFGEGVVNDATSVVLFNAVQNFDLSHISTAVAFQLIGNFFYLFISSTVLGVVTGLLSAYVIKTLYFGRHSTDREVAIMMLMAYLSYILAELFSLSGILTVFFCGIVMSHYTWHNVTENPRITTKHTFATLSFVAEIFIFLYVGMDALDIEKWRVASNSPKTSVAVSATLLGLVMAGRAAFVFPLSFLSNLTKKAQHEKIGLKQQVTIWWAGLMRGAVSMALAYNQFTKGGHTQERGSAIMITSTITVVLFSTVVFGLMTKPLVRFLMPPHSLLRMISTDSLTPKSFAVPLLGESLDSEADLFLGNGITSESREIIRPNSLRMLLRTPTRTVHYYWRKFDNAFMRPVFGGRGFVPFVPGSPTEQSVHNNWPEEPKQ

SEQ ID NO: 11002 - protein, 202 aa, Arabidopsis thaliana
  misc_feature (75)..(75): Xaa can be any naturally occurring amino acid
  misc_feature (78)..(78): Xaa can be any naturally occurring amino acid
  misc_feature (84)..(84): Xaa can be any naturally occurring amino acid
  misc_feature (86)..(86): Xaa can be any naturally occurring amino acid
  misc_feature (90)..(90): Xaa can be any naturally occurring amino acid
  misc_feature (98)..(98): Xaa can be any naturally occurring amino acid
  misc_feature (102)..(104): Xaa can be any naturally occurring amino acid
  misc_feature (107)..(107): Xaa can be any naturally occurring amino acid
  misc_feature (112)..(112): Xaa can be any naturally occurring amino acid
MASSMLSSATMVASPAQATMVAPFNGLKSSAAFPATRKANNDITSITSNGGRVNCMQVWPPIGKKKFETLSYLSXTLXRFRNWXKXSDYXIPAQWIPXVEFXXXSTXLGTVXSTVTHPETINERTGKWGSFPWSVDPPPSMFKGMEKGKKETPWLLRETGIQKPRKARGYFFWPKSPQFPGISPFFLGNPKIFPPFCYHPGV

SEQ ID NO: 11003 - protein, 669 aa, Arabidopsis thaliana
MARSFGANSTVVLAIIFFGCLFALSSAIEEATKLGSVIGIDLGTTYSCVGVYKNGHVEIIANDQGNRITPSWVGFTDSERLIGEAAKNQAAVNPERTVFDVKRLIGRKFEDKEVQKDRKLVPYQIVNKDGKPYIQVKIKDGETKVFSPEEISAMILTKMKETAEAYLGKKIKDAVVTVPAYFNDAQRQATKDAGVIAGLNVARIINEPTAAAIAYGLDKKGGEKNILVFDLGGGTFDVSVLTIDNGVFEVLSTNGDTHLGGEDFDHRVMEYFIKLIKKKHQKDISKDNKALGKLRRECERAKRALSSQHQVRVEIESLFDGVDFSEPLTRARFEELNNDLFRKTMGPVKKAMDDAGLQKSQIDEIVLVGGSTRIPKVQQLLKDFFEGKEPNKGVNPDEAVAYGAAVQGGILSGEGGDETKDILLLDVAPLTLGIETVGGVMTKLIPRNTVIPTKKSQVFTTYQDQQTTVSIQVFEGERSLTKDCRLLGKFDLNGIPPAPRGTPQIEVTFEVDANGILNVKAEDKASGKSEKITITNEKGRLSQEEIDRMVKEAEEFAEEDKKVKEKIDARNALETYVYNMKNQVNDKDKLADKLEGDEKEKIEAATKEALEWLDENQNSEKEEYDEKLKEVEAVCNPIITAVYQRSGGAPGGAGGESSTEEEDESHDEL

SEQ ID NO: 11004 - protein, 677 aa, Bifidobacterium longum DJO10A
MVVSSFASRFVPKVSTPLVQIVLGVLVTYLPFFPDATLDPELFMVLFIAPLLYLEAHEIDKSALLKTLDLSLSLAIGLAIVTMAAVGFTLHAVWPSITLASALALGAALGPTDAVAVSSLGKEASLTQRQRSVLKGESLFNDASGIVGFQFALAAAFTGEFAVGQAAGEFVISFFGGTLFGLVIAAAANWLFETVRSLGWETTTTRILMELFLPFLLYLGAEEFNVSGILSVVAAGLFIRFDRTGVGPNVARTNIVSTSVWGVLSFSLNGAVFILLGMQLPRAMMASWSDPYISNTVLIGIILLVTLVVIALRFFWIAAMLRVARDTITGQRRKMTPERWRSAAVMTFGGPKGTITLSLMFTIPYYIAGGAPFPMRDELIFIASGVIIATLLLANFLLPLLAPNRGKDPSAEIIPVTIDVLRATVEELTGRITPENRRAILMVIDQYTKRIGRLQQRIGDTDPQGFEQLQIEALHWEKEFVRDRLADTKAHPAADTATQELNVETCERMLDQIMNTLRHTSTDPTSGHAVSQIRGRLRMFQRQMSNYAKRTVSKIRHTTPLVSEDQIFARTRELQVEAIHHVIGRLIDEMGQDTYNTEHCSALLLDYRRAEASLQARPTMSGTTETITQVEDVKRESYGIELGMIQDMYEAGDINRAQARSLRRNIYVMQVDADSGI

SEQ ID NO: 11005 - protein, 195 aa, Oryza sativa Japonica Group
MTNGQDNLLPIANVGRIMKDGLPPQAKISKRAKETIQECATEFISFVTGEASERCRRERRKTVNGDDVCHAMRSLGLDHYADAMHRYLQRYREGEELAASLNSSSSARPPPPPPPAAGAVAPYRSTITNEESKILYRCTHTGTPTAKSPLQDSEEEKRITQSCARKMPLSIEKQQPNGMATRGGEEIGQAVDRLA

SEQ ID NO: 11006 - protein, 456 aa, Streptococcus thermophilus CNRZ1066
MVFIKETPIMAITAADIRREVKEKNVTFLRLMFSDILGIMKNVEIPATDEQLDKVLSNKVMFDGSSIEGFVRINESDMYLYPDLDTWTVFPWGDENGSVAGLICDIYTSAGEPFAGDPRGNLKKALRHMEEVGYKSFNLGPEPEFFLLKLDEQGNPTLEVNDKGGYFDLAPTDLADNTRREIVNVLTEMGFEVEASHHEVGVGQHEIDFKYTEVLKACDNIQIFKLVVKTIARKHGLYATFMAKPKYGIAGSGMHCNMSLFTEEGNAFFDPEDPHGMQLSQDAYYFLGGLMKHAYNYTAIINPTVNSYKRLVPGYEAPVYIAWAGSNRSPLIRVPASRGMGTRLELRSVDPMANPYLAMAVLLEAGLDGIINKIEAPAPIETNIYSMSPEERKEAGIIDLPSTLRNALKALETDEVVRQALGNHIYTNFLDAKRLEWASYATFISQWEIDNYLDLY

SEQ ID NO: 11007 - protein, 468 aa, Thiobacillus denitrificans ATCC 25259
MTQKSKFVLVGVAGVLAGAALTLNLSAIADKEAGAPLPIEELRAFTDVFARVKNDYVEPVEDKKLITEAINGMLTGLDPHSAYLDVEGFKDLQVGTQGEFGGLGIEVGMEEGFIKVVSPIEDTPAFKAGVKPGDLIVKLDDTPVKGMALNDAVKRMRGKPGSKIRLTVARKGVDKPIVLTLTRAIIKIRSVKSKLMESGYGYVRVTQFQEHTGELLAEALNALYKNNKAPLKGLILDLRNDPGGLLNGAVAVTAAFVKPDALVVYTEGRTPDAKMQLTARRENYLRPMQADYLKNLPQGVKQVPMVVLVNSGSASASEIVAGALQDHKRAVVMGTRTFGKGSVQTILPLGNGTAIKLTTARYFTPNGRSIQAKGIEPDIVVEDPSMPSEDDGLGIREADLAKHLANPSDKEGTSIVVPADDEAGPAEQPSRERKPLAPLEPGEIVSKNDFQVNQALNLLKGLQILQAH

SEQ ID NO: 11008 - protein, 280 aa, Synechococcus sp. WH 8102
MGGWIDEEHRGVRYGLAGDVLVEETSPFQRISVIRSERYGKGLLLDGCWMTAEQQERHYHEALVHPALCSAEAIERVLVIGGGDGGTARECLRYPEVIHLDLVEIDGRVVELSQEHLPGIGGAVWSDSRCQLTVGDGIAWAANAPDQSYDVVLVDGSDPAGPAEGLFNRAFFEHCRRILKPGGVFATQSESPEAFREVHVAMVRLLREVFGHADPLYGWVPMYPSGWWSWTFAAVDGPRYRTVQPARAALVAEGCEIWSPRWQQGALDAVPAFIARELAP

SEQ ID NO: 11009 - protein, 443 aa, Halobacillus halophilus
MGLTKEEIYKKLDEENVRFIRLQFTDMLGTIKNVEIPLSQLDKALEGMMMFDGSSIEGFVRIEESDMYLVPDLDTFVVFPWTSEKGKVARFICDIYNPDKTPFEGCPRYNLKRNIKKMEKLGFSAFNIGTEPEFFLFKLDEKGEPTMELNDKGGYFDLAPTDLGENCRRDIVLELEEIGFEIEASHHEVAPGQHEIDFKYSDAVKHCDDIQTFKLVVKTIARQHGLHATFMPKPLFGVNGSGMHANMSLFNEDGNAFYDENGDKELSEVAYQFTAGIIKHATNFTAITNPTVNSYKRLVPGYEAPCYVAWSGQNRSPLVRVPTSRGLSTRIEVRSVDPAANPYMAMSVLLAAGLDGVENKLKAPTPVDRNIYVMNKKEREAHGIKDLPATLFNALEELQEDPIMVEALGEHLFEHFIEAKEIEWDMFRTQVHPWEREQYLQTY

SEQ ID NO: 11010 - protein, 446 aa, Dictyoglomus thermophilum H-6-12
MINSFPKTKEEVLKYVKENNVYFIEIWFTDILGYLKSFTITAHELEKAFEEGLGFDGSSVRGFTRIEESDMIAFPEPETFTILPWRPKDKKVARMFATILEPNGKPFEGDPRNVLRRMLAKAKELGFTYYVGPELEYFYLKAPSSNPEVLDWGGYFDLIPRDEAIDLRHQTVSILEEMGIEVELTHHEVAPSQHEIDFRYAEALTMADIVMTARLAVKEVAYLNGVYATFMPKPLFGQNGSGMHVHMSLFKNGKNAFFDPNDKYHLSDTAKHFIAGLLKHAKEITLITNQWVNSYKRLVPGYEAPVYISWAMRNRSDLIRVPMYKPGKEEATRIEYRAPDPACNPYLAFAVILAAGLEGIEKKYPLPEPIEENVYHMTEEERRKRGIESLPGSLIEAIEITEKSELVRKALGDHVFTNFIENKKIEWDNYRKQVTTYELETYLPVL

SEQ ID NO: 11011 - protein, 629 aa, Halobacterium sp. NRC-1
MASEKILGVDLGTTNSAFAVMEGSDPEIITNEEGDRTTPSIVAHDDGELLVGKPAKNQAVQNPDQTIASIKRHMGEEDYTVALGDDEYTPEEISARILQKIKRDAEEYLGQDVEKAVITVPAYFNDRQRQATKDAGEIAGFDVERIVNEPTAASMAYGLDEDRDQTVLVYDLGGGTFDVSILDLGGGVYEVAATNGDNDLGGDDWDHAIIDHLADNFENEHGIDLREDRQALQRLTEAAEEAKIELSSRKETTVNLPFVTATDSGPVHLEQDITRATFESITEDLIERTVGPTEQALEDAGLSKSDIDDVILVGGSTRMPQVQAQVEDLVGQEPKKNVNPDEAVALGAAVQGGVLSGEVDDIVLVDVTPLSLGIEVKGGLFERLIEKNTAIPTTASKVFTTAADNQTSVQIRVFQGEREIASENELLGDFHLTGIPPAPAGTPQIEVTFEIDADGIVNVEAEDQGSGNAESITIEGGAGLSDEQIDEMQEDAEAHAEEDEQRRRRIEARNEAETAIQRAESLLEENEELVDEDLEADVNDAIDDVQAVLDEDEPEIDALETATEELSDTLQEIGKQAYQQQQDAQAGAAGGAGGMGGMGGMADGPGGAADADGDDEEYVDADFEDVDEE

SEQ ID NO: 11012 - protein, 436 aa, Halobacillus halophilus
MTYTKETIKQEVQAHKVEFIVLEFTDMLGETKNVELPIDELDMVLNEEAMFDSSSISGFSDIQESDMYLVPDLDTFLVLPSLVDEDQSARFICDIYKPDGTPFEGDPRYILKRAMQKAEDMGYTVNVGPEPEFFLFKLNEDGYPVRKFNDRAGYFDSSPKDKGDKVRRDIVRTLKKYGFEMEASHHEVAMGQHEINFRFDNMLKTADNIQTFKNVVKDIATNHDYHATFMPKPITGENGSGMHCHLSLFQDGDSAFFDEDAEDGVSKTMKQFIAGILHHASGIAAITNPNVNSYKRLVPGYEAPVSVAWSHSNRSCMMRVPTTRGKGTRFEVRNPDPTANPYLTLAVLIQAGLEGIRNELDAGEAESRNLYEVDDDSVPTLPTNLKEAIEALKKDEVLLEALGEHTAQAYIDDKEEEWTDYSLQVSQWEVDKYMNK

SEQ ID NO: 11013 - protein, 399 aa, Vitis vinifera
  misc_feature (286)..(286): Xaa can be any naturally occurring amino acid
  misc_feature (382)..(382): Xaa can be any naturally occurring amino acid
MVRASGKFELLDRLLPKLQKAGHRVLLFSQMTRLMDILEIYLQMNEIKYLRLDGSTKTEERGTKLKQFNAPDSPYFMFLLSTRAGGLGLNLQTADTVIIFDSDWNPQMDQQAEDRAHRIGQKKEVRVFVLVSVGSIEEVILERAKQKMGIDAKVIQAGLFNTTSTAQDRREMLEEIMRRGTNSLGADVPSEREINRLAARSDEEFWMFEKMDEERRQKENYRSRLMEEHEVPEWAYSTPDGKEEKSKGFEHDASKITGKRRRKEVVYADSLSDLQWMKAVESGEDXSRLSVKGKRREHLPSEANESDSDKIGGEQKVLELRSENVSMTSEGTSEDTFSLAPKRLKSEGANSDQRTGGGSWNGHIPTWQTHTRRRSSYVVQSXSSDARGQNSNSRGNGWS

SEQ ID NO: 11014 - protein, 474 aa, Kineococcus radiotolerans SRS30216
MFSNAEEVLAFIAQEDVKFVDIRFCDLPGVMQHFTIPAKSLDLDALSEGQMFDGSSIRGFQAIHESDMKLIADPTSAFLDPFRKEKTLVINHSIVDPFTNEAYSRDPRNIAAKAESYLKTTGIADTVFFGPEAEFYIFDDVRFETNQRESYYHIDSIEAAWNTGRKEEGGNLGYKTRYKGGYFPVAPIDHFSDLRDEMVVELEKAGLQVERAHHEVGTAGQAEINYKFDTLKNAGDQLLLFKYIIKNVALRNGHTVTFMPKPLFGDNGSGMHCHQSLWKDGEPLFYDEKGYGGLSDLARWYIGGLLHHAPSLLAFTNPTVNSYHRLVPGYEAPVNLVYSARNRSACIRIPITGSSPKAKRIEFRVPDPSANPYLAFAAQLMAGLDGIKNRIEPADPVDKDLYELPPEEHANIKTVPYDLGSVLDALEADHDYLLEGGVFTPDLIETWIDYKRTNEIDPIRLRPHPHEFELYYDI

SEQ ID NO: 11015 - protein, 471 aa, Ralstonia metallidurans CH34
MAQSVADVMKLVNENDVKFVDFRFTDTKGKEQHVSVPVSHFDEDKFESGHAFDGSSIAGWKGIEASDMLLMPDSGTAYIDPFYEEPTLVLSCDVIEPSDGKGYDRDPRSIAKRAEAYLKSTGLGDTAFFGPEPEFFIFDGVTWNIDMQGCSVKIQSEEAPWSSGKEFEHGNSGHRPGKKGGYFPVAPIDTFQDMRSEMCLILESLGIPVEVHHHEVAGQGQNEIGTRFSTLVQRADWTQLQKYVIQNVAHTYGKTATFMPKPIVGDNGSGMHVHQSIWKDGQNLFAGNGYAGLSEFALYYIGGIIKHARALNAITNPGTNSYKRLVPGFEAPVKLAYSARNRSASIRIPYVSNPKGRRIETRFPDPLMNPYLGFSALMMAGLDGVMNKIHPGEAADKNLYDLPPEEDAKIPTVCSSLDQALEYLDNDREFLTRGGVFSNSMLDAYIELKMEEVTRFRMTTHPIEFDMYYSL

SEQ ID NO: 11016 - protein, 203 aa, Shewanella sp. ANA-3
MISILVSDVIENNEFANLGAPNEKDIMMKLPLVIFASLLSTSAFAATCPSYLDVEVRKLHSDEKINLCELTQGKPVLLVNTASNCGYTPQFKALEALHKEYKDKGLVVIGFPSDDFFQEENDEKDTAKVCYINYGVTFTMLATSPVRGSDANSVFKYLGDKADSPKWNFYKYVVSGDGNTVQQFNSKVKPDSAELKQAIESVL

SEQ ID NO: 11017 - protein, 278 aa, Musa acuminata
MRCPTAPPSSNKLSAGLQHQQQQQPPPSAHDFTKTIVLASTPFGMVPDGWTGVADGAQIQYPVLGAANVGQENASANSFENSTEKRKAPKSKQESRSSGAEEEGTARGGATSKNKKKASGSDAPKETDYIHVRARRGQATDSHSLAERVRRERISERMKYLQELVPGCSKIMGKASTLDEIINYVQSLQRQVEFLSMKLAAAEPRMHLSSSNFFDREEVHGCSTWDAGLHGFHDGEIHRVSHLCPGNQCKVNNNTSIAVCNQAETAPFALWEVSYPTI

SEQ ID NO: 11018 - protein, 576 aa, Azoarcus sp. EbN1
MIRKQLVRSLRTGNQPLHLPARQPEAQAMPDNVVIECGWGRLLPGQTWREPALLATELLQERAGQRDIAFYVEKPHVVVAAAPQQLFVDPSEAFRLSLGGYRSARQTRRGFTLRRLRTRADVAAINVLYRSRGMVPVDTQRVWRERASRAITYAMAEDRTSGEIIGVAMGLDHVEAFADAQHGASLWALAVAPQAAHPGVGESLVRYLAEHYQARGRISLDVSVMHDNCQAIALYEKLGFQRIPAFAVKRRNAINEPLFTGPEDGAQDLNPYARLIVTEARRRGVLVEVLDAENGYFRLTLGGRSIVCRESLSELTSAIAMSRCQDKRVTLKLLREAGLRVPAQADATDAEANERFLAEHGAVVVKPVEGEQGKGISVDLRSPDDVAAAIGRAHHFCDRVILEQYCEGEDLRIVVIDFRVVAAAVRRPPVVVGDGRSTVLELIEKQSRRRQAATGGESSIPVDEETERCLRMQGHGLEDVLDHDVQIRVRNTANLHTGGTIHDVTGELHPDLRDAAEAAARALDIPVTGLDFLVPAVDRGDYVIIEANERPGLANHEPQPTAERFIDLLFPRTRAA

SEQ ID NO: 11019 - protein, 183 aa, Salmonella enterica subsp. arizonae serovar 62:z4,z23:--
MQNSLLNTHVTTIDGEATTLEKYAGKVLLIVNVASRCGLTSQYEQLENIHKAWADRGFVVLGFPCNQFMGQEPGSEEEIKTYCANTWGVTFPMFSKIDVNGEARHPLYQKLIAAAPTAVAPDKSGFYERMVSKGRTPLYPDDILWNFEKFLVGRDGQVVQRFSPDMTPEDPIVMESIKIALAK

SEQ ID NO: 11020 - protein, 467 aa, Marinobacter sp. ELB17
MSKTIDLITQHDVKWIDLRFTDTHGKEHHVTIPATEASEDFFIDGKMFDGSSISGWKGINESDMILMPDDTSAVVDPFTEESTVNISCDIVEPTTMQGYERDPRSVARRTEEYLKSTGIADSALFGPEPEFFVFDSVKWKTDMQGSMYEIHSEEAAWSSDKDFDGNNTGHRPRVKGGYFPVPPVDSLHDLRGAMCGAMASMGLEIEVHHHEVGTAGQCEIGVGAATLTRKADEVQILKYCVHNVAHAYGKTATFMPKPVVGDNGSGMHVHMSLSKDGKNLFAGDSYAGLSEMALYYVGGIIKHAKAINAFTNPATNSYKRLVPHYEAPVMLAYSARNRSASIRIPYVNSPKARRVEVRFPDPAANPYLAFSALIMAGLDGIQNKIHPGDAMDKDLYDLPKEEALNIPKVAETLQEALQCLEADHEFLTRGGVFTEDMIRAYIDLKRADVERMNMTTHPVEFELYYSC

SEQ ID NO: 11021 - protein, 162 aa, Azoarcus sp. EbN1
MSVPANVFDFETRRLNGAPMPLAEFRGKVLLLVNTASECGFTPQYEALQELHDRFAPRGFSVIGFPCNQFGGQEPGGAEEIAAFCAKNYGVSFPLSEKIDVNGDNAHPLYRHLTSVAPGILGTEAIKWNFTKFLVDRDGQVVARFAPATKPESIARDIEALL

SEQ ID NO: 11022 - protein, 144 aa, Glycine max
MCKGAEGEKQHGFCSSFLHKESATRSAICCELCGLQASLYCQADDAYLCKKCDKRVHEANFLALRHIRCFLCNTCQNLTRRYLIGASLEVVLRGTVFSRGTLIPLCLNGKRSFALSEKGFNCKFSKRERFSIPRSSSSSNSSGS

SEQ ID NO: 11023 - protein, 392 aa, Verrucularia glaucophylla; identical to SEQ ID NO: 7455

SEQ ID NO: 11024 - protein, 85 aa, Triticum aestivum
EGKALANALATAPSMWTLGNAGMGALQRLAQDPNYAVARAASSAIDELKKQWELEEGDSLRFVMNQNLASEDTDGDDNSAADDDT

SEQ ID NO: 11025 - protein, 526 aa, Burkholderia sp. 383
MTNVELFHYLLLLICGAGALTWLAERISIPPAVVLLLGGCVVAVAGKRVPDMDPALLLAAVLPPLLMSSGFYTAWKEFRQELASIASLALGAVVFTTVAVALVVHAVNPTLPWAACFTLGAIVSPPDAVAAKAILQRHPLPSRLVAVLEGESLVNDASGLLLYQMAVSAALAVSITAASATGLFFSLTLIGIAVGLACGHAMSWVLPRLRDPMLGIVVTFAMAWGSYGIAEAVDGSGVLSVVTCGLVLGVRQHRVFDADMRIKAKATWEAIVFVLDALVFILIGLALHAILARVNHEGAVLMAGLRVALPATAAAIAARIVWVFVAMWLPGRLRAPRAGHAPWSWREAVVLGWSGMRGVVSLAAAIALPANFPGRDLILFSTFLLIIATLVVQGGTLAPLIRVLKLHPAARHTMSEHAVRAHAFGAALAELDALEQRGSTLERPSLDRLLAEYRNRVTFNDRAHRQGAEPAKVRSRMLRVELELVGVSRRALLDLHRDGKVDDAVLHRIESELDFEELRLQRLLEP

SEQ ID NO: 11026 - protein, 533 aa, Rhodococcus sp. RHA1
MLLVIIAAIAVTSFAKRRDLQAPLVLVTIGSVASFIPGMPRLELDPDAILGVVLPPLLYSAALKFSVATFRRHLAPILRLGIFTVLATAIGVAFFANWLVPEFTLGAALVLGAVVAPTDAVSAVAVGRRLGLPNRVIAILTGEGLVNDATALTLFTVAVSAVVGAAIPVHPVVFFGYEVVGGVLIGLVLAKIVEWVRHRMYDSPLETVLGLMLPFVAYLAAEEVHASGVLSVVAAGFLMGHKATDASVATRIQERSLWESVDLLLEMFVFAYMGLQLKFVIDDVRDQGLPVHHVFFYGFAVLAVVMAIRPAWILLHWLRRRVGLAIEPPGGSVALGWRESLVVSWAGMRGVVTLAAASGVPVVIASGQPFPGREVIQAIAFVVAVGTLLIQGATMPLLIRKLDLADPGEREREEEQVKLARAISRDAGERALVEFTEHPPEGIGRADLTDILERVRRSMRARLQAEEAEDGAEKQRAGALFDHYRRAALRAQREAIIAARDAGTLDDEVMRSVLEGLDVEEAAAEERVRRRRE

SEQ ID NO: 11027 - protein, 544 aa, Arabidopsis thaliana
MEKSGYGRDGIYRSLRPTLVLPKDPNTSLVSFLFRNSSSYPSKLAIADSDTGDSLTFSQLKSAVARLAHGFHRLGIRKNDVVLIFAPNSYQFPLCFLAVTAIGGVFTTANPLYTVNEVSKQIKDSNPKIIISVNQLFDKIKGFDLPVVLLGSKDTVEIPPGSNSKILSFDNVMELSEPVSEYPFVEIKQSDTAALLYSSGTTGTSKGVELTHGNFIAASLMVTMDQDLMGEYHGVFLCFLPMFHVFGLAVITYSQLQRGNALVSMARFELELVLKNIEKFRVTHLWVVPPVFLALSKQSIVKKFDLSSLKYIGSGAAPLGKDLMEECGRNIPNVLLMQGYGMTETCGIVSVEDPRLGKRNSGSAGMLAPGVEAQIVSVETGKSQPPNQQGEIWVRGPNMMKGYLNNPQATKETIDKKSWVHTGDLGYFNEDGNLYVVDRIKELIKYKGFQVAPAELEGLLVSHPDILDAVVIPFPDEEAGEVPIAFVVRSPNSSITEQDIQKFIAKQVAPYKRLRRVSFISLVPKSAAGKILRRELVQQVRSKM

SEQ ID NO: 11028 - protein, 671 aa, Candidatus Protochlamydia amoebophila UWE25
MNKNWLKIWFVTLMTILVSLEAREQDLLKSSDIDRIMSQILSQHVDKRTMTSKILNSSIAIFINQFDPERIYLLESEIAPYAHLTQKQLDELVEQYKQNNFEFFEQINKVFQNAIERSKKLRHEIEIKDKEALFQTTRPSVQRIEERSFAKDEKELKKRLLENLENFISLYKSRHGELSTSSKKEFVLKTYENHLTEFENQYLYQDDQGKPLSYAQQDNLLTIHILKALASSLDSHTTFYQTHEAYDMKVRLQKEFQGIGLVLRDQGDKIIVSRMLEGGPAAKSGVIQAGDILLGVDGIPTEKLSFDKVMEMLHESKQAQVELSFKRKKKDEIEDKIFKVELQKEEIVLNNNRVDVSEETFGNGIIGKITLHSFYQGNGISSEKDVRDAIIELEKKGNLRGLILDLRENSGGFLSQAVKVAGLFITNGVIVISKYSTGEERFYRDVDGKIAYDGPLVVLISKATASAAEIVAQALQDYGVAIVVGDEHTYGKGTIQTQTVTDDQSTSYFKVTVGKYYTVSGKTPQKNGVKADVIAPGPWSLKNIGEVDSSSLTSDFISDAYEDNLSDIAPDVKSWYLKYYVPTIQKRTDQWKDLIPTLRKNSEYRLAHNKNYQLFLKGKALDLENEEQDEESEWLSTGKKAKNFGVDDLQMQEAVNVIKDMIVLYSIEKKK

SEQ ID NO: 11029 - protein, 260 aa, Brassica napus
MALNVSKRVPRSPILAKRGSVSRSQSVLLTLPAIKGSSAEELQGLCCTKPLTFVSSRRSSSTVCFLGKSQDTETKPHEDCLDLPNSKTVQKEVEKEVMPRSKSNSSQVLVEYVSNDAKFVNERARSDFVLLSRGIVRLDARARQDVAILGSGFLKLDARAREDTEKIDRDVKRKAERLHHIATILKNIAQSKLKNAADKHWSDGALEADLRRADFRAKQRAMEDALMALEFIKNIHDMMVQKMVDSLVTSETGTTDRISL

SEQ ID NO: 11030 - protein, 62 aa, Brassica juncea
LADRKIEKFDKNITKRGFVPETTTKKGKDYPVGPILLGFFVFVVIGSSLFQIIRTATSGGMA

SEQ ID NO: 11031 - protein, 130 aa, Zea mays
VTESSRVTTQHVFATLSFIAEIFIFLYVGMDALDIEKWRIVSQSPRKSIGVSSLLLALILVGRAAFVFPLSFLSNLLKKSQSEKIELKQQVTIWWAGLMRGAVSIALAYNQVKESNFIAFNSSSLATFKF

SEQ ID NO: 11032 - protein, 618 aa, Corynebacterium glutamicum ATCC 13032
MGRAVGIDLGTTNSVVSVLEGGEPVVIANAEGSRTTPSVVAFAKNGEVLVGQSAKNQAVTNVDRTIRSVKRHIGTDWSVAIDDKNYTSQEISARTLMKLKRDAEAYLGEDVTDAVITVPAYFEDSQRQATKEAGQIAGLNVLRIVNEPTAAALAYGLEKGEQEQTILVFDLGGGTFDVSLLEIGDGVVEVRATSGDNELGGDDWDQRIVDWLVEKFQSSNGIDLTKDKMALQRLREAAEKAKIELSSSQSANINLPYITVDADKNPLFLDETLSRAEFQRITQDLLARTKTPFNQVVKDAGVSVSEIDHVVLVGGSTRMPAVTELVKELTGGREPNKGVNPDEVVAVGAALQAGVLRGEVKDVLLLDVTPLSLGIETKGGVMTKLIERNTTIPTKRSETFTTAEDNQPSVQIQVFQGEREIATANKLLGSFELGGIAPAPRGVPQIEVTFDIDANGIVHVTAKDKGTGKENTITIQDGSGLSQDEIDRMIKDAEAHADEDKKRREEQEVRNNAESLVYQTRKFVEENSEKVSEDLKAKVEEAAKGVEEALKGEDLEAIKAAVEKLNTESQEMGKAIYEADAAAGATQADAGAEGAADDNVVDAEVVEDDAADNGEDKK

SEQ ID NO: 11033 - protein, 483 aa, Bifidobacterium longum NCC2705
MVPMSVEEIAKAVDGRLIGDAGSESRATNTVSDSRQAGPGSVFVAIRGERVDGHDFVAKTAGQGATVAIVDHEVKSDGLPQIVVKDTVDALGELARYNIVRRRELDGDFDIIGLTGSVGKTTTKDLLSSLLATVGPTVAPVGSFNNEIGLPLTALRVDEHTRFFVAEMGASHIGEIARLTRIAPPNTAIVLKVGVAHLGEFGSRERIAQAKSEIVQGLLPGGTAVLNADDEHVVPMAGLANGDVLWFGLGSSQEPEVRAIDVTADRSDHAEFTLVDADGNHTPVHLGIPGRHNVMNALAAATVAMRYGMAPETVARILASQHTISPHRMALSTVNREGTSFTLIDDSFNANPDSMKAGLNGLKAWNSNDGKEPFRVALLGAMLELGADETALHTSIGTYADELGIDAIIAVGSAQDQHLDALAQALADGARQSQSASVDCVHDIDAAEQLVIDLARNHPDAVVLLKGSHASGLSALAERWAKN

SEQ ID NO: 11034 - protein, 447 aa, Kineococcus radiotolerans SRS30216
MDRQQEFVLRTLEERDIRFVRLWFTDVIGTLKSVAIAPAELEGAFGEGIGFDGSAIEGLSRVSESDMLLKPEPSTFQVLPWRASDEHQGTARIFCDILTPDGQPARSDPRFVLKRALDRAAQRGYTFYTHPEIEFYLFKTPLERGAVPEPVDYVGYFDNHPGSTTTDFRRTAISTLESMGISVEFSHHEGGPGQNEIDLRYADALTTADNIMTFRTVLKEVARDQDVYASFMPKPLAGEPGSGMHTHLSLFDGDANAFYEAGAEYQLSRTGRQFIAGILRHAAEITAVTNQFINSYKRLWSGGEAPSYVCWGHNNRSALVRVPMYKPSKGQSVRIEYRALDSAANPYLAFALLLSAGLKGIEEGYDLPDGAEDDVWSLTDAERRSMGIEPLPQSLEHAIAVMERSELVAETLGEGVFDYFLRNKRQEWADYRAQVTPFELQRYLPLL

SEQ ID NO: 11035 - protein, 453 aa, Streptomyces avermitilis MA-4680
MDKQQEFVLRTLEERDIRFVRLWFTDVLGFLKSVAVAPAELEQAFDEGIGFDGSAIEGFARVYESDMIAKPDPSTFQVLPWRAEAPGTARMFCDILMPDGSPSFADPRYVLKRALAKTSDLGFTFYTHPEIEFFLLKDKPLDGSRPTPADNSGYFDHTPQNVGMDFRRQAITMLESMGISVEFSHHEGAPGQQEIDLRYADALSTADNIMTFRLVMKQVALEQGVQATFMPKPFSEYPGSGMHTHLSLFEGDRNAFYESGSEYQLSKVGRSFIAGLLKHAAEISAVTNQWVNSYKRIWGGSERTAGAGGEAPSYICWGHNNRSALVRVPMYKPGKTGSARVEVRSLDSGANPYLAYALLLAAGLKGIEEGYELPPGADDDVWALSDAERRAMGIEPLPQNLGEALALMQRSELAAETLGEHVFDFFLRNKKQEWEEYRSEVTAFELRKNLPVL

SEQ ID NO: 11036 - protein, 254 aa, Oryza sativa Indica Group
MEAGYPGAAANGAAADGNGGAQQAAAAPAIREQDRLMPIANVIRIMRRVLPAHAKISDDAKETIQECVSEYISFITGEANERCQREQRKTITAEDVLWAMSRLGFDDYVEPLGVYLHRYREFEGESRGVGVGVGAARGDHHHGHVGGMLKSRAQGSMVTHHDMQMHAAMYGGGAVPPPPHPPPHHHAFHQLMPPHHGQYAPPYDMYGGEHGMAAYYGGMYAPGSGGDGSGSSGSGGAGTPQTVNFEHQHPFGYK

SEQ ID NO: 11037 - protein, 343 aa, Zea mays
  misc_feature (269)..(269): Xaa can be any naturally occurring amino acid
  misc_feature (320)..(320): Xaa can be any naturally occurring amino acid
MTKKRPSIPLCPSKPNCRPNSLAGSTCYLAPAFCRADSLPRLEMDPMDIVGKSKEDVSLPKSTMFKIIKEMLPPDVRVARDAQDLLVECCVEFINLLSSESNEVCSREEKKTIAPEHVIKALSDLGFREYIEEVYAAYEQHKLDTLDSPKAGKFTGIEMTEEEAVAEQQRMFAEARARMNNGAPKPKETEQEPPQQPQAQPQLQLHTEPQQPVQSQVQLHSPTQHSLQPQVQLHPQPQQLPQVQVHSQTQLHPQPQQPQVQVHPQLQQXPTLQAHSQPPQPQVQIHPQPQQSPQVQLQSSVQQTSQPQPQVHLQSQGALXSQLQPQLPGQLQTQGQTGPGIDS

SEQ ID NO: 11038 - protein, 647 aa, uncultured bacterium
MGKIIGIDLGTTNSCVSVMEGNTPKVIENSEGARTTPSIIAYQEDGEVLVGASAKRQAVTNPKNTLYAVKRLIGRKFTEKEVQKDIELMPYTISAADNGDAWVEVRGKKMAPPQISADILRKMKKTAEDYLGEAVTEAVITVPAYFNDAQRQATKDAGRIAGLDVKRIINEPTAAALAFGLDKTSTGDRKIAVYDLGGGTFDVSIIEIADVDGEKQFEVLSTNGDTFLGGEDFDQRIIDFIVAEFKKEQGVDLTKDVLALQRLKEAAEKAKIELSNSSQTDVNLPYITADATGPKHLNVKLTRAKLESLVEELIERTIAPCRMAIKDAGVNVADIQDVILVGGMTRMPKVQEKVKEFFGKDPRKDVNPDEAVAVGAAIQGQVLGGERTDVLLLDVSPLSLGIETMGGVMTKMIAKNTTIPTKFAQTFSTAEDNQPAVTIKVFQGERELASGNKMLGEFNLEGIPPAPRGTPQIEVSFDIDANGILHVGAKDKGTGKENKITIKANSGLSEDEIQKMVKDAELNAADDKKKVEVVQAKNQGDAMVHSVRKSLTEYGDKLDAGEKEKIEAAIKDVEEAIKGDDKDDIEAKTNTLMTASQKLGEKMYADMQAAQGAAGGAAGGPEGTAQAEAKPADDNVVDAEFKEVKKD

SEQ ID NO: 11039 - protein, 664 aa, Arabidopsis thaliana
MATCPPFDFSTKYYDGDGGCQRQSSFFGGTTVLDQGVGYAVILGFGAFFAVFTSFLVWLEKRYVGARHTSEWFNTAGRNVKTGLIASVIVSQWTWAATILQSSNVAWQYGVSGPFWYASGATIQVLLFGVMAIEIKRKAPNAHTVCEIVKARWGTATHIVFLVFCLATNVVVTAMLLLGGSAVVNALTGVNLYAASFLIPLGVVVYTLAGGLKATFLASYVHSVIVHVALVVFVFLVYTSSKELGSPSVVYDRLKDMVAKSRSCTEPLSHHGQACGPVDGNFRGSYLTMLSSGGAVFGLINIVGNFGTVFVDNGYWVSAIAARPSSTHKGYLLGGLVWFAVPFSLATSLGLGALALDLPISKDEADRGLVPPATAIALMGKSGSLAVTSAGSSELIAVSSLFTYDIYRTYINPRATGRQILKISRCAVLGFGCFMGILAVVLNKAGVSLGWMYLAMGVLIGSAVIPIAFMLLWSKANAFGAILGATSGCVFGIITWLTTAKTQYGRVDLDSTGKNGPMLAGNLVAILTGDEDVDVPAEELREEKLRRAKAWIVKWGLVFTILIVVIWPVLSLPARVFSRGYFWFWAIVAIAWGTIGSIVIIGLPLVESWDTIKSVCMGMFTNDRVMKKLDDLNHRLRALTMAVPEAEKIYLLELEKTKKNDEEG

SEQ ID NO: 11040 - protein, 295 aa, Debaryomyces hansenii; identical to SEQ ID NO: 889

SEQ ID NO: 11041 - protein, 178 aa, Zea mays
MAEAPASPGGGGGSHESGSPRGGGGGGSVREQDRFLPIANISRIMKKAIPANGKIAKDAKETVQECVSEFISFITSEASDKCQREKRKTINGDDLLWAMATLGFEDYIEPLKVYLQKYREMEGDSKLTAKSSDGSIKKDALGHVGASSSAAEGMGQQGAYNQGMGYMQPQYHNGDISN

SEQ ID NO: 11042 - protein, 910 aa, Chromobacterium violaceum ATCC 12472
MTEPQPSSRLIWRLRLADSGAQLQPLLQSAGPDGWSRGRACSLASLLQEQAEAVRPHDLPVLKPLLALWQAHGGDAGLVDAAPLLPALIDHPLLFDAEAPARRIRVEAGQPALQMERVGAELRLKLLPDGLAGCCGALWQRPQPERLLVYQLTDELKALADLVGHGLTVPWQARQRVLEAIREVAPGLPLVDASPAFDPALASEAADPALYALLTRQPEGLRLQLKVKPHPAAAWSAPGRGAAGLVLDVDGEYRQFVRDLAAEAGRLRALREACPAIARGQRDGDGWLFADQHTALSLLSQLQAAGEDRVICLWPQGDKIRLAAADGMPQLKLKVKRRGGWLQADGELELDDGRILTLRHLLAALANQKGKYLQLSDGDWLMLSGSLGERLGELARMVDHAGPDGLAISPLAGPRLQALGEDAGQFDGDDGWQRQAARWREAAVFDPEVPATLNATLRPYQLQGFAWMARLAHWGVGACLADDMGLGKTVQTLSLLLTRAHLGPQLAVAPTSVALNWLAEAARFAPSLRLRAYHQHRRLDDVGPGDLVVVSYGLLQREAEAFCDVHWASAVLDEAQAIKNPQSQRAQVAQSLRADFRLAASGTPVENHLGELWSLFRFIAPGLLGNLAQFEQRYAQPIADGDDTARAQLKALIQPYLLRRTKREVLTELPPKTETTRLIELSEQERHVYEAMRQEALARVAEADPAAGGQTMQALAELTRLRRFCCHPKLTQPDSALPASKLAAFAEICEELLDNGHKALVFSQFVDHLALVAEHLRQRGVRFHYLDGGTPSRQRKASMDAFQAGDGDLFLISLKAGGTGLNLTAADYVIHLDPWWNPAVEDQASDRAYRMGQQRPVTVYRLVAAGTIEEKIVELHRDKRALADSLLAGGDASASMDGEALLALLRGEAG

SEQ ID NO: 11043 - protein, 201 aa, Chlamydomonas reinhardtii
  misc_feature (75)..(75): Xaa can be any naturally occurring amino acid
MLLTRKNVAVRPARAARRDVRAMSLLGNLFGGGSKPTSSTSNFHQLSALDIDKKNVDFKSLNNRVVLVVNVASKXGLTAANYKEFATLLGKYPATDLTIVAFPCNQFGGQEPGTNAEIKAFASARGFSGAGALLMDKVDVNGANASPVYNFLKVAAGDTSDIGWNFGKFLVRPDGTVFGRYAPTTGPLSLEKYIVELINSR

SEQ ID NO: 11044 - protein, 341 aa, Arabidopsis thaliana
MMFLPTDYCCRLSDQEYMELVFENGQILAKGQRSNVSLHNQRTKSIMDLYEAEYNEDFMKSIIHGGGGAITNLGDTQVVPQSHVAAAHETNMLESNKHVDDSETLKASSSKRMMVDYHNRKKIKFIPPDEQSVVADRSFKLGFDTSSVGFTEDSEGSMYLSSSLDDESDDARPQVPARTRKALVKRKRNAEAYNSPERDDNESMLDEAINYMTNLQLQVQMMTMGNRFVTPSMMMPLGPNYSQMGLAMGVGMQMGEQQFLPAHVLGAGLPGINDSADMLRFLNHPGLMPMQNSAPFIPTENCSPQSVPPSCAAFPNQIPNPNSLSNLDGATLHKKSRKTNR

SEQ ID NO: 11045 - protein, 588 aa, Magnetococcus sp. MC-1
MAADQSDTRLFVQATLASLKNWGEPHDSTAAMLDEAVIDCGWGKLVFGQTFSDNQALCQAMRAEQPGQRNVALYLRDPHVVLSLYPQELFLDPSHTYRLALTQDPWQDFTPPAALSILPIRGEQDMAVVRQLYETRRMVPPRAGFRLDGQEGCAPLFLIAIDEQSEQIVGVVNGVDHRCAFNDPENGSSLWALAVDRKTAIGGVGEALVRALAHHFWQQGRGYMDLSVMHDNEQAIALYNKLGFKQIPVYCLKNKNPINERLFSGPAPEANLSIYSRIIVDEARRRGISVEVLDQSLELFRLKLGGRTVLCRESLSSLTSATAMTVCDNKRLTSRLLKSAGLQVPEQMVVGKGERVENFLARHGAVVVKPVRGEQGRGISVDVRDLTSLEQAIAKAQQEGDGEQVLLERLVVGDDLRIIVIGHEVVAAAVRKPPMIRGDGHSNIAALIQRQSRRRAAATEGESRIPLDGETQRCVQEAGLEMHSILDKGQQLLVRRAANLHTGGTIHDVTEQLHPALREAAEQASMVLDMPLVGLDFLVPDVQGPDYVIIEANERPGLANHEPQPTAKRFIDMLFPQTTLPRCVSTEA

SEQ ID NO: 11046 - protein, 660 aa, Ustilago maydis 521; identical to SEQ ID NO: 896

SEQ ID NO: 11047 - protein, 970 aa, Yarrowia lipolytica CLIB122
MFIVDYAKRAYRKLRHFRITFIVVHYFIIIGSAIFGTFLFYPAKTTKYIDALFQCACAATQAGLNTVDLNSLKLWQQMVLYCISMWTNPIVIHSGVVFMRLHWFEKSFKDIKNQSKLQSKLRRTATTLARQDTLENGLFQRPPLRHQNPGVAGLNSNINNDSSDETPHKEGHNNDNPNLNKEITFGNLPQPKRTHSVEPEDMYRSINLLSHEHPEGQSDSDDDGPALVIRGPRDRPDRDDDEEDSPEIERAPRAISFSTQEHPRAQKSALEQFKEEMRESQRQLDAEHAIDEGESSDATQPTSIKREDMYYRQHPDSDSSEGDTVKKVRSNVTVHRPSPEDDDFAGTQPMNRRAFTLDGDNTEEKNHEGAFAHFKRSLTFDRFLSNRRRGSDAASSSGATSNADLNKTMSSNYLSWSPTVGRNSAFVDLTEEQKEELGGIEYRALKVLSKVLVAYFVGFHLMCAIMLLPWAIYMPKYRDYVYSCGVTPTWWAFFTAQSTFNDVGFTLTPDSMGSYQEAIYVLLTMSFFIVIGNTGFPVLLRFIIWIMFKLSPRDSSLKECTGFLLDHPRRCFTMLFPSTATWWLFATLVILNSVDLVFFIILDFNAPAVTEMRPGYRVVSGLFQAFSTRTAGFTSVSIAELHPSIQVSYMIMMYIAILPIAISIRRTNVYEEQSLGIYGGGDEESEYDQAPTADEEAENEENDPEHLYKGKKKKHPSYVTAHLRAQLGYDLWYIFLGLFIICICEGTKIKDVTDLGFTGFTVLFEVVSAYGTVGMSMGYDDVNTSLSGKFSTISKLIIIAMMIRGRHRGLPYSVDRAIILPSDEMHRKDDAVTRSHLRRGRTMSANSNELTETMGLPYPMRSHTMMSSGPGAGGNESYPLRGSSHSRQTSNVSDIGPRDLDPIVPSSPMPSVDEDYLKRMEKREQEQEDNKLRGELSDNKKKLHKDEQGIEMDSYFPELKGPGGLDLADD

SEQ ID NO: 11048 - protein, 171 aa, Triticum aestivum
RRRTKKRTHVGSNNGPATKLASSKSSKTPKTMVIRIGAGEVGPSVSQLVKDVRLMMSPDTAARLKERRANRLRDYITMAGPLSVTHLMLFSRSESGNTNLRVAITPRGPTLNFQVEKYSLCKDVRKAYKRPRGRGKEYITAPLLVMNNFTTPSSADTKAENKVPKHLEVSR

SEQ ID NO: 11049 - protein, 233 aa, Arabidopsis thaliana
MAFSYASFSIPFNGFAANPSPITSAFLGPSLRFSTRTSKTRNPSNGVSVKSSNSHRFLVKSKNFSVYARAAAEKSVHDFTVKDIDGNDVSLDKFKGKPLLIVNVASRCGLTSSNYSELSQLYEKYKNQGFEILAFPCNQFGGQEPGSNPEIKQFACTRFKAEFPIFDKVDVNGPSTAPIYKFLKSNAGGFLGDIIKWNFEKFLVDKKGKVVERYPPTTSPFQIEKDIQKLLAA

SEQ ID NO: 11050 - protein, 968 aa, Physcomitrella patens subsp. patens; identical to SEQ ID NO: 7485

SEQ ID NO: 11051 - protein, 600 aa, Deinococcus radiodurans R1
MGWGCMARAGATNSFPRITCWEAPRSRLAVLQGLLDTDGHAGVVVEYVSVSEHLARGVVELVQSLGGVARIRQKATSHTYGGEKKTGLAWRATLKLPPELEPFRLAAKRAAYRRPTKYPPTRGIKSIEWVGHKPAQCIAVDAPDHLYVTEGYIVTHNTLQTLAHLLKEKEEGRADRPSLVIAPTSVIGNWQAEAARFTPDLKVLVLHGKDRHADFEKIPHADVVLTTYPLLPRDIDELRQHEYHLVILDEAQNIKNNKTAAAKAAGSLGARHRLALTGTPLENHLGELWSQFNFLAPGLLHDEKTFQKLYRTPIEKRGDTARQAALSARVRPFILRREKRDVARELPPKTEIPVRVTLEGDQRDLYETVRVTMQSRVREELAARGLARSTIAILDALLKLRQAVTDPRLVKLEAAREVQGNAKLDWLETNLPQMVEEGRRVLIFSGFATLLGHLEEFLKREGIPYSKITGQTKDRQKQIDAFQAGETHVFLITLKAGGVGLNLTAADTVIHYDPWWNPAAEDQATDRAYRIGQDKPVFVYKLIAAGSVEERILDLQARKAALARGVLDGGLTDATQLTVQDLDRLFAPLELEEEPEVVAS

SEQ ID NO: 11052 - protein, 137 aa, Glycine max
DPVGPAQELVEKPFFDTIARALRPGGVLCNMAESMWLHTHLIQDMISICRETFKGSVCYAWASVPTYPSGVIGFLLCATEGPPVDFVNPINPIEKLEGANEHKRELRFYNSEMHSAAFALPAFLKREVSVLRDLSLQ

SEQ ID NO: 11053 - protein, 291 aa, Trichodesmium erythraeum IMS101
MQLESQSLELDTLRPTKTTIMVIGGAEDKVHGKEILQTFFNRSGGVNAKLAVIPSASREPGSQGDRYRKVFKDMGTLNDNIRIFDIRERYQGEDPIWLKYLEDCTGVFMTGGDQLRLCSLLAETPLMDNIRSKALEGKIALAGTSAGAAVMGYHMIAGGGSGSSPNRSLVDITKGLAILPDLIVDQHFHNRNRMARLLSAIATHSDKVGIGIDEDTCALFERDSMIQVMGKGTVTIIDPVEMSYTNSAKVGVEDPLSLSNLRVHILCHGDGYDLHSHTMKPGLSETIMPLD

SEQ ID NO: 11054 - protein, 902 aa, Trichodesmium erythraeum IMS101
MKILKLQTLRGPNYWSIHRHKLVVMRLDLEDLYEKYTSDIPGFYKGLTEVLPSLVEHLCSPGVKGGFLTRVEKGTLIGHVIEHVAIELQELAGMPVGFGRTRETSTTGVFQVVIEYENEQAGRYAARAAVRLCQSIVDTGTYPATELQQDLEDLKELKNQASLGPSTEAIVKEAEARGIPWTQLGARFMIQFGYGVNQKKIQATLSNQTGILGVELACDKEGTKRILKDAGVPVPRGTVARYFDELQDAIEYVGGYPIVIKPLDGNHGRGITIDVKNWQEAEEAYDLARKASKTKTVIVERYYTGKDHRVLVVNGKVVAVAERVPAHVVGNGKSTIAELIEETNRDPQRGDGHDNILTRITVDKSALDILGKQGYSIDSIPLKGKKCFLRATANLSTGGIAVDRTDEIHPENVWLLSRVAKIIGLDIAGIDVVTEDISQPLREVEGVIVEVNAAPGFRMHVAPSRGLARNVAGAVMDMLFPGSKNGRIPILSVTGTNGKTTTTRLLAHIIKQTGKVVGYTTTDGTYIGEYLAETGDNTGPQSAHLILSDPTVEVAVLETARGGILRSGLGFSSCEVGIVLNVTADHLGIGDIDTIEQLAKLKSVVAESVMPKGYAVLNAEDPLVAAMADRVKGQVAYFSMDPNNELLLRHTEAGGLAAIYENGYISILKGDWTLRIEKAVNVPITMAGKAPFMIANALAACLAVFTQGVKIEHIRKGLSTFVASVDQTPGRMNMFNMGSYHALVDYAHNPASYEALGGFVRNWPGKRIGVVGGPGDRRDEDFVSLGELAADIFDEIIIKEDDDTRGRPRGNAAELICQGVKQFLNGIKNSESKATYESILDETAAINTALDRAPIDGLVVILPESVNRAISLIEGRHVIQDIELLQDSQREPKDQEVLKSSI

SEQ ID NO: 11055 - protein, 1142 aa, Arabidopsis thaliana
MSNTVEDDDDDFQIPPSSQLSIRKPLHPTNANNISHRPPNKKPRLCRYPGKENVTPPPSPDPDLFCSSSTPHCILDCIPSSVDCSLGDFNGPISSLGEEDKEDKDDCIKVNREGYLCNSMEARLLKSRICLGFDSGIHEDDEGFVESNSELDVLINLCSESEGRSGEFSLGKDDSIQCPLCSMDISSLSEEQRQVHSNTCLDKSYNQPSEQDSLRKCENLSSLIKESIDDPVQLPQLVTDLSPVLKWLRSLGLAKYEDVFIREEIDWDTLQSLTEEDLLSIGITSLGPRKKIVNALSGVRDPFASSAEVQAQSHCTSGHVTERQRDKSTTRKASEPKKPTANKLITEFFPGQATEGTKIRTAPKPVAEKSPSDSSSRRAVRRNGNNGKSKVIPHWNCIPGTPFRVDAFKYLTRDCCHWFLTHFHLDHYQGLTKSFSHGKIYCSLVTAKLVNMKIGIPWERLQVLDLGQKVNISGIDVTCFDANHCPGSIMILFEPANGKAVLHTGDFRYSEEMSNWLIGSHISSLILDTTYCNPQYDFPKQEAVIQFVVEAIQAEAFNPKTLFLIGSYTIGKERLFLEVARVLREKIYINPAKLKLLECLGFSKDDIQWFTVKEEESHIHVVPLWTLASFKRLKHVANRYTNRYSLIVAFSPTGWTSGKTKKKSPGRRLQQGTIIRYEVPYSEHSSFTELKEFVQKVSPEVIIPSVNNDGPDSAAAMEEPNSKPSSSRVRSCGVVVHCKTTSFSSMEAYKQWVWRNREYVQSFGSFANGLTWLLPEKFSASEIGPEAVTAFLGIFSTINEHIIENAPTPRGHVGSSGNDPSLSYPLLIAILKDLETVVEVAAEHFYGDKKWNYIILTEAMKAVIRLALFRNSGYKMLLQGGETPNEEKDSNQSESQNRAGNSGRNLGPHGLGNQNHHNPWNLEGRAMSALSSFGQNARTTTSSTPGWSRRIQHQQAVIEPPMIKERRRTMSELLTEKGVNGALFAIGEVLYITRPLIYVLFIRKYGVRSWIPWAISLSVDTLGMGLLANSKWWGEKSKQVHFSGPEKDELRRRKLIWALYLMRDPFFTKYTRQKLESSQKKLELIPLIGFLTEKIVELLEGAQSRSSKAPTDFLGNGFRLLLEIVFIATGREHNHRQMYLKR

SEQ ID NO: 11056 - protein, 1081 aa, Synechococcus sp. PCC 7335
MATLHGNWLPDLQRFFLWGETWRKANPIELSMLSAEEPTVTPATHPYQLSQAELQNVFQKSDELDLLWMRSELEVAKAKKGAKRNGKSAGRAGQRKWLSRTVVLPTLFNDFKQAKATGVGLLPVLSADHQVASAIHPWEISGALLGATTTVKLLSTLPLGRSEASDFVGDDLRYWSHLTRWCLDLLARGKFVPVVGGDKKGAIATWQLLLDSATDQTRLKDFCDRLPLICHSYPVPTTKKTSALKVDLPSASEPLIRSFLETIVDAQVRSIAKANTLPSNAPLSKDLPLQAWIDALGAEDPHFEGTPAGVVRLNDVINTWSAPLQNLTDTVEGFRTCFQLVPPASKATSSEQDWTLRYGLQAIDDTDYRVDASLIWQHPTNELSYQGRVIESPQETLLGGLGRATRLYEPIKQTLVDPSPTKCVLGPIEAFQFLKTTVWRLQDSGFGVILPDNLVDPSKVGASRLGLQISATAPPKTQRLGLQSLLNFKWDLSVGGQILTKAEFDELITQGTPLVEINGQWVELRPQDVRAAKDFFEKRKGQTKLSVEEALRISTGDNQLIDKLPVVKFDASGKLDELITTMTTGNQSLEPVTEPDGFAGQLRPYQAKGVSWLSFLEQWGLGACLADDMGLGKTVQLIAFLLYLKQENALGGPVLLVCPTSVLTNWQREVSKFAPNQVKTLVYHGDKRPKGSALVKAAEKLDLVITSYTLVQRDLKELKRVEWRGMVLDEAQNIKNPTAKQSVAVREIDSVFRIALTGTPVENRLSELWAIMDFLNPGYLGPLNFFKRRFATPIEKYGDTDSLKTLRSLVQPFILRRLKTDRSIIQDLPEKQEMTVFCGLSSEQARLYQKLVDSTLGEIDEATGLQRRGMILGLLVKLKQICNHPAQFLQQDSLGKSRRSGKLQRLDEMLEEVVAEGDRALIFTQFAEWGKLLSSHLEHRLGTESLFLYGSTSKNKREEMVDRFQLDPNGPKIFILSLKAGGVGLNLTRANHVFHFDRWWNPAVENQATDRAFRIGQTKNVQVHKFVCTGTLEERINEMINSKKALAEQVVGAGEQWLTELDTDQLRNLLLLDRDAVIDES

SEQ ID NO: 11057 - protein, 389 aa, Zea mays
MEVGDARNGSAAAALTKGSADDAARKPLPPCCVKAKARVPETEANCHDTVVSGWFTEPRSRFGKTSKVQYFNNPMWPGEAHSLKVEKILFQGKSPYQEILVFESSTYGNVLVLDGIVQLTDKDECAYQEMVTHLPLCSIPAPKNVLVVGGGDGGVLREIARHDSVETIDICEIDQLVIDVCKEFFPNLSIGFKDPRVRLHVGDAVDFLRNSPEGKYDAIIVDSSDPIGPAQALVEKPFIQTIARALKPGGVLCNLAESMWLHTHLIQDMLAICRQTFKGAVHYAWTSVPTYPSGVIGFLLCAKEGRAVNFLTPVNPIEKIEGAAKAGRELRFYNSEIHRAAFVLPTFVRRELEAYTTPSTSAENEKPKESVSEPQKIKILSNNAILTAS

SEQ ID NO: 11058 - protein, 495 aa, Salmonella enterica subsp. enterica serovar Paratyphi A str.
MADRNLRDLLAPWVAGLPARELREMTLDSRVAAAGDLFVAVVGHQADGRRYIPQAIAQGVAAIIVEAKDEATDGEIREMHGVPVVYLSQLNERLSALAGRFYHEPSENMRLVAVTGTNGKTTTTQLLAQWSQLLGETSAVMGTVGNGLLGKVIPTENTTGSAVDVQHVLASLVAQGATFGAMEVSSHGLVQHRVAALKFAASVFTNLSRDHLDYHGDMAHYEAAKWMLYSTHHHGQAIVNADDEVGRRWLASLPDAVAVSMEGHINPNCHGRWLKAEAVEYHDRGATIRFASSWGEGEIESRLMGAFNVSNLLLALATLLALGYPLTDLLKTAARLQPVCGRMEVFTAPGKPTVVVDYAHTPDALEKALQAARLHCAGKLWCVFGCGGDRDKGKRPLMGAIAEEFADIVVVTDDNPRTEEPRAIINDILAGMLDAGQVRVMEGRAEAVTNAIMQAKDNDVVLIAGKGHEDYQIVGTQRLDYSDRVTAARLLGVIA

SEQ ID NO: 11059 - protein, 162 aa, Glycine max
MSEAVGTPESGGAKEQERFLPIANIGRIMRRGVPENGKIAKDAKESIQECVSEFISFITSEASDKCMKEKRKTINGDDLIWSMGTLGFEDYVEPLKLYLKLYREMEGDTSKGSKSEQAGKKVGALNGQPGSSVICTSFSQVDIKMYSITSCLTPAIRLFCFA

SEQ ID NO: 11060 - protein, 259 aa, Zea mays
MKNRKGYGHQGHLLSPVGSPLSDNESGAAAAAGGGGCGSSVGYCGGGGGESPAKEQDRFLPIANVSRIMKRSLPANAKISKEAKETVQECVSEFISFVTGEASDKCQREKRKTINGDDLLWAMTTLGFEAYVAPLKSYLNRYREAEGEKAAVLGGGARHGDGGGAADDAGPLAAGGGAGDGVDRAGHDDDAHVGLMMGASSVGFGSGGGAAPSYYAAASRKAYGAGEGSKVMEFEGEEENVCVQRGRGFASHLHGAVQW

SEQ ID NO: 11061 - protein, 181 aa, Brassica napus
MASSMLSSAAVVTSPAQATMVAPFTGLKSSSAFPVTRKANNDITSIASNGGRVSCMKVWPPVGKKKFETLSYLPDLTEVELGKEVDYLLRNKWIPCVEFELEHGFVYREHGSTPGYYDGRYWTMWKLPLFGCTDSAQVLKEVQECKTEYPNAFIRIIGFDNNRQVQCISFIAYKPPSFTGA

SEQ ID NO: 11062 - protein, 472 aa, Paulinella chromatophora
MSKSPLDVIKFIKDEAIELIDLKFTDLYGKWQHLTVCSDLIEESSFNEGLAFDGSSIRGWKSINDSDMAMVPDSNTAWVDPFYRHKTLSIICSIQEPRTNEPYSRCPRTIGKKALNYLISTDLADKAYFGPEPEFFVFEDVRYHSSSSSGFYSIDSIESPWNTARLEEGGNLANKIQLKQGYFPVSPNDTLQDIRSEMLLTLGSLGVQIEKQHHEVATSQHELGIKFAELITAADNVMIYKYVVRNIAKKYRKTATFMPKPVFNDNGSGMHVHQSLWKADQPLFFGEGTYANLSQTARWYIGGLLKHAPSFAAFTNPSTNSYKRLVPGFEAPVNLVYSQGNRSAAVRIPLTGLNPKAKRLEFRSSDALANPYLAFSAMLMAGIDGIKNQIEPGQGYDMDLFELSSEELSKISTLPFSLDGALKALKLDKEYLIEGDVFTEDFIDNWIALKYEEVQQLRQRPHPHEFSMYFDA

SEQ ID NO: 11063 - protein, 95 aa, Brassica napus
MDPMDIVGKSKEDASLPKATMTKIIKEMLPADVRVARDAQDLLIECCVEFINLISSESNEVCNKEDKRTIAPEHVLKALHVLGFGEYVEEVYSAY

SEQ ID NO: 11064 - protein, 833 aa, Schizosaccharomyces pombe
MVQVGDTNFWIQGNSLYLHISLTIIASVLLFTGGTTTKIKYIDALFLASSATTQTGLNSVDLNSLSIWQQFILYGFTAITVPIWMHGSISFIRLYWFRRKFKDVVRQNRTRKFQRKLRKSLMKKSEDDEEQGVRGRKIRVMLPYLHSLRSPTSLKNFSRFDTHDSTNNPYFPDNPPSPKADISKDEYFGKYLPKKSDTLDMDLESHNMTFHDYEPSIENKNYDFGSSHSASMQMYEMDDLHPRLRRQSSFISSVNPLEADYTRETLSEGALVQESLPMAYSYSDTNLVVSRDSFTLTGDDNLFPEGGLRPANTIDGIVRSSLSSSSLSKDTEPSTVDMHIAFTGLNKPTIERERNLKLRKKSRFYKKSLRSRFSRGLHRPIRWTKSFTSNRRNLTLERVLSSAFAKKHEPSISSRHTTMSLPYLSYNPTVDRNSAFVALSKEQRDELGGIEYRALKCVCSMVILYFIIFNIAAFVTFIVFAYTAVGSREVIDSYDLRRGWWALFSSASSFNDLGFSLIPSSFVPMNRNIFLLLISSLFIIAGNTGFPCFFRTFIWTTYKLYPFSFEKKEAMAFLLDHPRRCFTLLFPSGATWVLFFVLLLLNVIDLVLFMVLDTGSKAVASLPKGIRVVNAIFQSVCTRTAGFTSVSISELHPAVLVSYMVMMYISVYPVAINMRNTNVYEERSLGVYRTEDDEGKSFLKDHLTEQLSYDLWYIFLGLFIICICEGGKISNPLDTDFSIFTVLFEVVSAYGTVGLSTGLSSSNCSLSARFTTISKLVIIALELRGRHRGLPRAVVRAILLPSEKNNLKEEEDYQRRHGFSIDNARGSIAVSRD

SEQ ID NO: 11065 - protein, 555 aa, Atriplex gmelini
MWSQLSSLLSGKMDALTTSDHASVVSMNLFVALLCGCIVIGHLLEENRWMNESITALLIGLATGVVILLISGGKSSHLLVFSEDLFFIYLLPPIIFNAGFQVKKKQFFRNFITIVLFGAVGTLVSFTIISLGALSIFKKLDIGTLELADYLAIGAIFAATDSVCTLQVLNQDETPLLYSLVFGEGVVNDATSVVLFNAIQSFDLTRIDHRIALQFMGNFLYLFIASTILGAFTGLLSAYIIKKLYFGRHSTDREVALMMLMAYLSYMLAELFYLSGILTVFFCGIVMSHYTWHNVTESSRVTTKHAFATLSFVAEVFLFLYVGMDALDIEKWRFVSDSPGISVAVSSILLGLVMVGRAAFVFPLSWLMNFAKKSQSEKVTFNQQIVIWWAGLMRGAVSMALAYNQFTRSGHTQLRGNAIMITSTISVVLFSTMVFGLLTKPLIMFLLPQPKHFTSCSTVSDVGSPKSYSLPLLEGNQDYEVDVGNGNHEDTTEPRTIVRPSSLRMLLNAPTHTVHHYWRKFDDSFMRPVFGGRGFVPFVPGSPTEQSTNNLVDRT

SEQ ID NO: 11066 - protein, 466 aa, Arabidopsis thaliana
MSEEVPQQFPSSKRQLHPSLSSMKPPLVAPGEYHRFDAAETRGGGAVADQVVSDAIVIKSTLKRKTDLVNQIVEVNELNTGVLQTPVSGKGGKAKKTSRSAKSNKSGTLASGSNAGSPGNNFAQAGTCRYDSSLGLLTKKFINLIKQAEDGILDLNKAADTLEVQKRRIYDITNVLEGIGLIEKTLKNRIQWKGLDVSKPGETIESIANLQDEVQNLAAEEARLDDQIRESQERLTSLSEDENNKRLLFVTENDIKNLPCFQNKTLIAVKAPHGTTLEVPDPDEAGGYQRRYRIILRSTMGPIDVYLVSQFEESFEDIPQADEPSNVPDEPSNVPDVPSNLPSTSGLPENHDVSMPMKEESTERNMETQEVDDTQRVYSDIESHDFVDGIMKIVPPDLDMGVDYWFRSEVGEVSITDMWPDEYWNQMITFDQDHAGPSDNKILEQPQTPSSPTPEESTATRSPTGS

SEQ ID NO: 11067 - protein, 377 aa, Dehalococcoides sp. BAV1
MTFRIKVLLGTILSMVGLLGSFALGYFSGGVSALNSDENLSSIVTAWQIITTEYVEPDIIDQAALAEAAIKGMMDELNDPHSVYLNAEDYQASLEYDDGQYVGIGATVQIEDGVITLIPYEGSPAALAGIQAGDILLEVDGQSVDGFSLADLSPLVRGEKGTLITLKVERSISAQPLLFNVTRDEILIPSVSSEMMGDIAYIRLSRFSERTDAELEQVLKNLGDAKGIVLDLRGNPGGLVSSVINVTSRFVSSGVVLTTVDNAGNSEEYKIVPKAVTTSLPMVVLVDQYSASGSEALSGALQDYGRATIVGKTTYGKGSVNRTFDVTGNTGIYLTIGRWYTPNGRMIEGQGITPDIELELAGDEAVNWALNFMHGEA

SEQ ID NO: 11068 - protein, 153 aa, Zea mays
VAFLKNAPEGTYDAVIVDSSDPIGPAQELFEKPFFQLVARALRPGGVVCTQAESIWLHMHIIEDIVVNCRQVFKGSVNYAWTTVPTYPSGVIGFMLCSTEGPAVDFQHPVFNIEEDEHPMKSKGPLKFYNSEIHTASFCLPSFAKRVIESKAN

SEQ ID NO: 11069 - protein, 336 aa, Nostoc punctiforme PCC 73102
METPFVTSIIQKVAEEIGAVVLVDPECIFVGLITFKNGNTSFFRNTRFSINSSGSTAIAKDKSVSSFFLNNFGYKVTEGKTFFSEELCEEIGNIRNIDQGFYYAKELGFPVIVKPINLSQGIFVTKVHNKQEYYQIAKKILQKVSGFIVERFYNGNDYRIVVLDDEVVSAYQRIPLFITGDGQSNVLKLMQQKQESFIKNGRKEIIDFDDYRIKKNLRRRKLNFSSVIPKNNIVYLLDNANLSTGGEAVDFTESIHPDFQKLAVSITKDMQLRLAGVDILASDITSPIVDYTILEVNGAPSLSHYASFGEVQTKRVENLYLKILKILENENNREKH

SEQ ID NO: 11070 - protein, 286 aa, Pseudomonas syringae pv. syringae B728a
MSDYQETLYEGYGQRFRMEKMLHEVRTDHQHLVIFQNPRMGRVMALDGVIQTTEADEFIYHEMLTHVPILAHGAAKRVLIIGGGDGGMLREVAKHMSVEHITMVEIDATVVEMCKEYLPNHSSGAFDDSRLNLVIDDGMRFVATTEEKFDVIISDSTDPIGPGEVLFSENFYQACHRCLNEGGILVTQNGTPFMQLSGVQTTAGRMNGLFADWHFYHAAIPTYIGGAMTFAWGSTDKSYRKLPLETLRQRFSGSGIVTRYYNPEVHIGAFALPQYVLQAVGKASND

SEQ ID NO: 11071 - protein, 693 aa, Pseudomonas putida GB-1
MKHFLPSTALAVMIGLGSLTLGGNAAAANKWDSLQPDRDEIVASLNVVELLKRHHYSKPPLDDARSVIIYDSYIKLLDPARSYFTAADIAEFDKWKTQFDDFLKSGNLDPGFTIYKRYLDRVKQRLDFALAELNKGVDKIDFTTKETLLIDRKDAPWMKDQAELDDLWHKRVKDEVLRQKIAGKEPKQIQETLTKRYKNQLARLDQTRAEDIFQAYINTFAQSYDPHTNYLSPDNAENFDINMSLSLEGIGAVLQSDNDQVKIVRLVPAGPAAKTKQVAPADKIIGVAQGNKEMVDVVGWRLDEVVKLIRGPKGSVVRLEIIPASNAPSDQTSKIVSITREAVKLEEQAAKKSVLKLKQDGRDYKLGIIEIPAFYLDFKAYRAGDPEYKSTTRDVKKLLTELQKEKVDGVVIDLRNNGGGSLQEATELTSLFIEKGPTVLVRNSDGRVDVLEDENPGAFYKGPLALLVNRLSASASEIFAGAMQDYHRALIIGGQTFGKGTVQTIQPLNHGELKLTLAKFYRVSGQSTQHQGVLPDIDYPSIIDTKEIGESALPEAMPWDTIRPAIRPASDPFKPFLAQLKAQHEARSDKDAEFTYIRDRLALTQKLMNEKTVSLNEQERRARHDEIEAKQLALENVRRKAKGEEPLKELKKEDEDALPAEDENTKPEDDAYLSETGRILIDYLSASTKVAKK

SEQ ID NO: 11072 - protein, 168 aa, Triticum aestivum
  misc_feature (113)..(113): Xaa can be any naturally occurring amino acid
  misc_feature (118)..(118): Xaa can be any naturally occurring amino acid
  misc_feature (151)..(151): Xaa can be any naturally occurring amino acid
DATAPVAGAEAVVAGAGEQAGISAVIPGWFSEISPMWPGEAHSLKVEKVLFQGKSDYQNVMVFQSSTYGKVLVLRRIIQVTERDDCAYQEMITTCPFAPSKDPKEVWLLGGGXGVLLXVQRHTPWDQIDICEMINGGNSQTIFPQPTVGLXPRVSLHIGDGFLKNLRR

SEQ ID NO: 11073 - protein, 285 aa, Xylella fastidiosa Ann-1
MTTNDTWFTEHFQATGSAIGFRVTGKLDEVQSPFQKIEIYNSTDWGKLMVIDGALMLTSRDNFLYHEMISHPALFTHTAPKCVVIIGGGDCGTLREVLKHPDIEQVTQCDIDEQVTRMAEKHFPELCTSNNDPRATLLFSDGVAYMADCPTNSVDVIIVDSTDPVGPAKGLFNRTFYESCFRALKNDGLLIQQSESPLALLELIKEMRHEMSKAGFKAFKTLPFPQPCYPTGWWSVTLSSKQPNANFAFRQTDAQTKPFDTLYYNAHLHHGVLVPPPFIAHALGE

SEQ ID NO: 11074 - protein, 623 aa, Emiliania huxleyi
MGKVVGIDLGTTNSVVAVMEGGKPTVITNSEGQRTTPSVVAYTKKGDLLVGQIAKRQAVINPENTFYSVKRFIGRKTSEVTEALRQVPYKVLQTEDIIKLDCPALGKQFASEEISAQVLRKLADDATKYLGETVTQAVITVPAYFNDSQRQATKDAGKIAGLEVLRIINEPTAASLSYGLDKKDNETILVFDLGGGTFDVSILEVGDGVFEVLATSGDTRLGGDDFDEKIVQWLVNEFKNDEGIDLTQDNQALQRLTEAAEKAKVELSTLTQSSINLPFISVTPEGPKHLEKDLTRAKFEELCSDLIDRCKTPIQNALKDAELSPSSIDQNVLVGGSTRIPAVQELVEQLLGKKPNQSVNPDEVVAVGAAVQAGVLGGEVKDILLLDVTPLSLGVETLGGITTKITPRNTIIPTKKSETFSTAVDNQPNVEIHVLQGERELAKDNKSLGTFRLDGIAPAARGVPQIEVTFDIDANGILSVTAKDKATNKQQSITISGASNLAKDEVERMVEEAEQNAASDKEKSEQIDVKNKADSLCYQTKKQLEELSSKLEAADKEKVEEVLTKLELAVQNDDLEGMKTLSEELQKNMMEVGQKVYTPDAGAEGGAAPSQDDAIETDFSTEK

SEQ ID NO: 11075 - protein, 1479 aa, Arabidopsis thaliana
MEANEESLKGKIEKLEGKEVIVESKEDEMDIIIEENREAEQEVMEVKARDGRGEQNDVLMEENNNQGEQKDEEMQDASSRSESSDFNSDEDEQILSRRDDELDLEKPLSEEEIDELISDLLAVESKAAEAQEALEKESLSKVESEVREELAQALRGDELDEAVAAEMMTFKDEWEATLDELETESATLLEQLDGAGIELPKLYEMIESQAPNGCYTEAWKQRAHWVGTQVTKETVESLANAERFLHTHRPVRKRHGKLLEEGASGFLEKKLADGAVKESLAGTSELDWSSLNKVFSEKRDESVSFGSKQWASVYLASTPHQAAAMGLEFPGVNEVEEIEEIDASLADPFLADAIDNERELALTEEQKTNYIRVKEEDDITCDRVLQLRLKRKRRKKRSKQVIRCAAENMDDDSVYLDGNNTTPNFAKDQVKSPETSTQVHNSEVNIEENGNFSNSDVDKMTPSTHINVDAKRDDSQNPANNFRCTACNKVAVEVHSHPLLEVIVCMDCKRSIEDRVSKVDDSLERHCEWCGHIADLIDCRTCEKLFCASCIKRNIGEEYMSEAQSSGWDCCCCSPIPLQRLTLELEKAMRDKKSIELSSDSSSDSSSDNNSVDTDADVNVTISSKKKSKKKIRRIIDDAELGKDTRTKIAIEKARQERLRSLQFSARYKTISSMGDVKSIPEGAEVEVLGDAHSGYIVNVVREIGEEAVRVPRSISAKLKVHQVTGIRFMWENIIQSISRVKSGDKGLGCILAHTMGLGKTFQVIAFLYTAMRCVDLGLKTALIVTPVNVLHNWRSEFEKWMPSEVKPLRIFMLGDVSRERRFDLLTKWRKKGGVFLMGYTNFRNLSLGRGVKDLNAARGICNALRDGPDILVCDEAHIIKNTKADTTQALKQVKCQRRIALTGSPLQNNLMEYYCMVDFVREGFLGSSPEFRNRFQNPIENGQHMNSTAEDVKIMNQRSHILYEQLKGFVQRMDMNVVKKDLPPKTVFVISVKLSPLQRILYQRFLELYGFSDGRTDERMRKNFFAAYQVLAQILNHPGIPQLRSEDSKNGRRGSIVDIPDDCSSDENIDYNMVTGEKQRTMNDLQDKVDGYLQKDWWVDLLQKNNYKVSDFSGKMILLLDILSMSADVGDKALVFSQSIPTLDLIELYLSRVPRHGKQGKFWKKGKDWYRIDGKTESSERQKLVDRFNEPDNKRVKCTLISTRAGSLGINLYAANRVIIVDGSWNPTYDLQAIFRAWRYGQKKPVFAYRLMARGTIEEKIYKRQVTKEGLAARVVDRQQVHRTISKEEMLHLFEFDDDDEKSEAVTEISKQNEAGHSNLVEQAILWTKKATLSRVGGDKLMENLLQRHGPNWISSFHEHETLLQENEEERLTKEEKDMAWEVYRRALEWEEVQRVPFSESPVVPKPSPSTQTEPLPQPKGFNRSRFVNRNCTRIAHQLTLISQGLKVGSSTVCGECGRVIRWEDVIPASKLSAVIVN

SEQ ID NO: 11076 - protein, 224 aa, Oryza sativa; identical to SEQ ID NO: 589

SEQ ID NO: 11077 - protein, 1077 aa, Clostridium acetobutylicum ATCC 824
MDKNELLQIFNESVAGKNQSKGQRVFENDLVSSVDIKDDEDSICIKGNVISESLFSQYSTEIQMDPTDKSIVGTYCSCADYEKNAAKKNYCCKHLIATFYSSLEELSKNTRLKKAEKRKLNKLLGIKDTLDILLGGDSSKEELKIEVYINKDRWDNRIYFELKIGLKTMTSNNLYVLKDINSFLLGIYQNIPIPYGKKLILNMKEQKLSVKDKKLVDFIQMIINIDKPFSYNRKIKKSFIDGKYVYVPDYLVREFFQVIKNHRVYLNEGFDLSTDVEIIEEKPPIEISLRDVEDDYVLSVPSGMPISLSSKNNVFLYGLGIYIPDYEYCEKIGPYFEVFNKAEEVRLSGEKEETILRKLVPDLKRLSNSISLSSNITDKIVVAKCEFKFYFDNEDGNTILTVKVKYGAFEFNIFEDFNEKVIYRDSKREIEVLETVRALRFERIKNKFLLGFGDDYAFTFFKTEIVRLQKIGEVFYSENFKGIKHISSKGISGHIKTGKYNYFEMKFKIDDIPPGETVMILRAFRDNLKYYKLKNGEFIDLEELQLKNFLKLLDSISPKKLDENNIKIPKSKSIYVDEYLEEKGIRYIKGQEELKKIREKFKEEKSLEFELPRTLKGHPREYQKKGYNWLKTLDYFGFGGILGDEMGLGKTFQVISFLLSSPGKKSLIVVPTSLVYNWIQEFERFAPSIKVAASVGTKKEREVIIENLNEFQVIITTYNLLKRDLSSYMALEFDYCILDEAQNIKNPHSQNAISVKKINAVNRFALSGTPMENSVMELWSIFDFIMPEYLYDEDRFSVRYYKKLKEEPAVIEDLNRLIKPFILRRKKKEVVKELPNKIEKIVAVDMESKQKKVYSTYAKYAVSLIEKRVEYDEFNKSKIEILSYITRLRQICLDPSVVMEDYTGGSAKINALIELLNHSIDEGHKILVFSQFTSVLKNIAERFREEKIKYSYLDGSINSKNRMNMVQDFNEGNNSVFLISLKAGGTGLNLTSADVVIHFDPWWNPAVEEQATDRAHRIGQKNIVEVIKLVAKGTIEEKIIRLQEEKKRLVDSLLSEDLSTSEVFSGLDENEIIELFK

SEQ ID NO: 11078 - protein, 398 aa, Thermoanaerobacter tengcongensis MB4
MSKKRFYVLLAVLLIVTNVFTFFIANTVSVALPGGKVIVSREDYRLLNQYKKLFEVGKILESRYVDKVNPSTLLEGALKGMAGSLQDPYTVYMNKKEFAEFMTQTTGTYGGIGIIVAVDQEDHIVVVSPIKNTPGERAGIKSGDIILEVNGKKVSGKNLDEAVSMMRGPKGTQVTLTIMRDGKTFTKTITREIIKLETVFDYMLPDKIGYIKITLFDQSTSSDFKKALERLKKDGMKGLIIDLRDNPGGLLEECVNIADMLLPKGVIVTTKGRAESQEFYSKGTGLGMPLVVLVNKGSASASEILAGAIKDRKAGVLVGTTTFGKGLVQTVVNFGDGTGLKYTIARYYTPNGTDIQGKGIEPNYVVELPKDYTLKDTPDLKGDTQLIKAYEIIKSEIK

SEQ ID NO: 11079 - protein, 680 aa, Vitis vinifera
MGFLCFLYFLFSLLLFLAFSGLPTVWGNSELRALMEMKASLDPVNRFLSSWTSDADPCSGSFEGVHCNEHRKVANITLQGKGLSGKVPPAVAGLKCLSGLYLHYNSLSGEIPREISSLTELSDLYLDFNNLSGAIPPEIGNMASLQVLQLCSNQLTGAIPSEIGFLKKLSVVSLQKNNLTGKIPPSLGNLGMLRMLNLSFNRLSGTIPANLAQAPALEFLDVRNNSLWGIVPSGLKKLKEGFQHANNSAGLCGVGFSSLRVCSYWDGMNINQSETFPATNTDFTPTIYPVSSNFRPHCNQTHCPNVSKFPRIVLVSGVTTVTVTLSAVGLLTFLCYRRRKQKIGSSFDTSECQLSTDRSIDCHRKIASPLVSLEYSTGWDPLADGRNGNVFSQEFCQNPRFNLDEIESATQYFSEVNLLGKSKFWSVYKGILRDGSLVAIRSISATSCKSEEADFLKGLNLLSSLRHENLVRLRGFCCSKGRGECYLIHDFVPNGSLSRYLDLEEGSSQVLNWSTRVSIIHGIAKGIGYLHSSEENKPSLVHRSISADKVLIDQRFNPLISDSGLPKLLADDIVFSALKTSAALGYLAPEYITTGSFTEKSDIYAFGVIILQILSGKQQLTNSMRLAAESCRFADFVDTNLKGEFSESEAAKLAKIGLACTHELPDNRPIMETVIQELST

SEQ ID NO: 11080 - protein, 418 aa, Vibrio angustum S14
MAAIAVFISIINHKIGRFQTTIAITGWSIAISLILLALTSFGYISIDKENALIELIQHIKFEDFLLKGVLGFLLFAGALNIDLDHLKDQKFEITFLALAGTLFSTFFIGIVLWLIFSLIGIELNFIYCCLFGALISPTDPIAVLAIVKKLKAPQRISTQIEGESLFNDGVGLVIFVTIFEVAFGKTAPTVSGTALLFIREALGGIAFGAVLGGIFHYLIKGSSDNMMRLILTMLIPTFGYVLGEHLEVSAPLAMVVSGILIGNITRKYISEQSANQMAHLWELVDEILNAVLFLLIGFVMITFSFHSIDIIAVIIAIPLVLLSRYLSIRLSYIGFTRYRQYNPESVKILTWGGLRGGLALAMAMAIPAHIYLPSHPDVSVKEIIVLMTYAIVIFSILIQGSTITPMIMKAKAVDNKPF

SEQ ID NO: 11081 - protein, 298 aa, Oryza sativa Japonica Group
MGLDRCESEEALGSSESEQPTRPARPRGKRSRAAEVHNLSEKRRRSRINEKMKALQSLIPNSSKTDKASMLDDAIEYLKQLQLQVQMLSMRNGLYLPPVNLSGAPEHLPIPQMSAALDQNSAKASDPSVVLQPVNQTSGALLPFELASQHKPLFLPGVPNATALEPRFLVESSRSNLQSLRFTEPAEMIYPDEMMLKHRLTSASESTIVPGTDEKSVRQNTYMMNADRFDRYALSKDQLQHIMPKNTESVLDMPHLQRILTKVLIVSDYKLTIQLPILDRLQTSDTKVRVEGRIKVNP

SEQ ID NO: 11082 - protein, 194 aa, Aspergillus nidulans FGSC A4
MASATTFYDFEPVDKKGEAYPLNQLKGKVILVVNTASKCGFTPQFKGLETLYQSIKAKRPDDFVILGFPCNQFGGQDPGSNDQIQEFCQLNYGVTFPVLGKTEVNGDNANPLWTWLKESQPGLLGLKRIKWNFEKFLISADGKVVGRWASTTKPEGLESRILEEIEKAEKQGLLASKAMQPEAAGTDGETAKLA

SEQ ID NO: 11083 - protein, 476 aa, Synechococcus sp. WH 8102
MPADAAPFLAPGIAWALVVLFSVLWIALGIVWGRRGKGDADDYMLAGRNIGLALSTATLMASWVTGNTTLLAPEFGYRTGLWGMFSYALAGLGLILFAPLAVRIKQLMPHGRTSGDFIRLRYGRLAWWVFMVITAVYTLGFLMTQAMGAGLLLQALSGFDYHVGMVVVIGVSTVYTLFGGMRAVIGTDFIQSLLIMVLLAVVAVLAFRQFPMPEVHARLISTHPDRLDLLLPAGLLIAWNSALFSMGEVFHNNIWWSRVFASRRSVVMTSFVLGGLAWMSIPLVTGSIGLVALARDLPLEQVNMVFPVMAADLLGAGGAALVFVVVFASLTSTLDSLLASTADLLAEDVYFRLLRPQASDAQLKQAARQMVVGLSVLTLALSWPRLDSLASVLFFTGALVASTVWPVACGLYWSSANRWAAIVAMAAGSAVGLSAYVLIAPYCAAVFSAAVSAVVMVVGSRWQPEGFDFNRLQEGV

SEQ ID NO: 11084 - protein, 214 aa, Zea mays
PAVPVRNSRVPNLSIGFKDPRVRLHVGDAVDFLRNSPEGKYDAIIVDSSDPIGPAQALVEKPFIQTIARALKPGGVLCNLAESMWLHTHLIQDMLAICRQTFKGAVHYAWTSVPTYPSGVIGFLLCAKEGRAVNFLTPANPIEKIEGAAKAGRELRFYNSEIHRAAFVLPTFVRRELEAYTSPSTSAENEKPKESVSEPQKIKILSNNAILTAS

SEQ ID NO: 11085 - protein, 444 aa, Listeria monocytogenes EGD-e
MAKYTKEDIFRFADEQNVKFIRLQFTDILGIIKNVEIPVSQLKKALDNKIMFDGSSIEGFVRIEESDMYLFPDLDTWVVFPWTAEKGKVARMICDIYNPDMTPFAGDPRANLKRVLKEMEELGFTEFNLGPEPEFFLFKLDENRRPTLELNDSGGYFDLAPTDLGENCRRDIVLELEEMGFEIEASHHEVAPGQHEIDFKYEDAVTACDSIQTFKLVVKTIARKHGLHATFMPKPLFGVNGSGMHFNMSLFNEKGNAFFDESGELELSQTAYHFLAGMLKHARGYTAVTNPTINSFKRLVPGYEAPCYIAWSGKNRSPLVRVPSSRGLSTRLELRSVDPSANPYLAMAVLLKAGLSGIKDELTPPAPVDRNIYGMNEEEREATGIYDLPESLGHALIELEKDDIIKAGLGEHIFEHFIEAKTIECDMFRTAVHPWEREQYLEIY

SEQ ID NO: 11086 - protein, 1308 aa, Lentisphaera araneosa HTCC2155
MKPLGEKWLIYKTQLSQLQVYIVKIFATCPQYFSPFQVAKVLRDAQIDGGLPLTTGVIKDEIKSLREFEIDVFSFSNNFSSSFQVEVLLEMSDEGQLDKFYQDFIGPQLAMIRSWDLAEKRIYLRFFYLSGKNPDEMKKGVKFYSKTLIKPQCEGFSYTSKINPQFIENFWYELLADEFFTGPMEREYEQDFNEWLEQSSSLNQVYHLAKALKTQDFVRLRDLVNSWQGELGRELVDAFDHFFRANYREASRVFARFAKIKLDKWTQFPNAIDEIYLRCLSLSGLRGDRKSLDGRQLNNSHKKALMHVNEYRETGQLPPFKEITLQGSEITFYKALRLFMEKRKLSDSELENCVYLAEADREDVVLYREWLSLLSLANAKINEVQLQDLNKRLCFPSFASFIEVKEEWESGLEFIEKFFSNDEQKRVVWRFTLNEAGWDLRPFEQKRGRSAWLKGKQIAFDKLQHKSYLSELDKQILSNIVYQSGNYIEWTGNEVLELVSRHPLLFDSYDLDKAVSIEIEEGGVCLDESENFFILDLPDEYKRNVIIKRSGPYKYIYYRFPESLSEVQEKLGDEGLKIPKTQGARIRALLPQISQSMPVMSNWRDEAESKAHLSESHSDIRIVAEPMDEDEGVNFRLRVPVFGSGTPEFVPGEGPVVIWKDGKQCVRDIDAERKKLREALSLVDGLPVLEEDGFLALYDQQMALDFLMALHQQDFDIFWPKKAWSVKQSKGRLTVKIEKDADWFNLYGKAEFDGDALHFSELFANLSKEGSYVKLSDQRFIKLSQQLQEQIQVMQANLGEYHGALGFPKLRQSEMARALAGVEDKFLPQNWDADVSKLRKIFSRHFIFPKNFKAELRSYQEEGFQWLSRMAEWGAGACLADDMGLGKTVQALAVLSARAHLGPSLVVAPTSVCGNWQEEVQRFAPMLKVQIYDSTFAESAMESLDENDLLVCSYTMLQRDVELISKRQWNGIVLDEAQAIKNPQSGRSKAARSLESKFKIATTGTPVENHPGEIWALFDFLNPGYLGSQTSFGKEINSAGVSQAINGLGERLRRRVQPFILRRLKKDVLKDLPERTEINLRIPLSPDERGVYNGLRARASDRLGKRGGDRNDKFFILEEITRLRQAACSPSLLDKQFSDQSAKLKRFIELVKELKEAGHRALVFSQFTSFLDLVEKALAEEDVDFLRLDGSTPAKKRPQLVKKFQVGKSSVFLISLKAGGFGLNLTAANYVIHLDPWWNPAVEDQATDRAHRIGQEKAVTVYRLISEGTIEEKILKLHESKRELADFMLGNQNQSAKMSADELLRLLN

SEQ ID NO: 11087 - protein, 192 aa, Xylella fastidiosa Ann-1
MNMLNVLRFPVLALALAFVSSGVLADVGSLLDLDYRPLAGKETVNLQRLYGGKVLLVVNTASKCGFTPQYEGLEALHQKLSPLGFAVLGFPSNDFKGQEPGDEQQIQEFCTLTYGVKFPMFQKVHVKGDEVTPLYQRLTQTTGVAPGWNFHKYLIARDGHVVAQFDSRTRPDDPILLEAIKRELAKSVQVVH

SEQ ID NO: 11088 - protein, 1866 aa, Ashbya gossypii ATCC 10895
MASQASRLDRHVILLESGSTQVVRNVAADQLGDLARQHPDEILVLLSRVYPYLLSRRWETRVTAARAVGAIVAHARLWDPNGEGGELAGEETRQLEALGRYEWRGLQDDSALYSLAQWELGKIFKAGRTLLAARSDAYAAEESKKQAVLAEYVLEPAVKREGVEAPMSPAESKKSARMLAMAKRRRKIQAKTTSKKPLDLSQSSVARNLMNQDAAADGSNEDEDSGNNNNSSNHNNNDNNDSSHSNTASPQQVPVQLNNPRLEITEQPDSNKIMIESMVAPLLEKQQRVSGLVWQFQGIFELLLDNLMNDSWEIRHGAALGIREIVKRHATGVGRIKGKTRQENDLRNKRALEDLATRLLTIFALDRFGDFVNDTVVAPVRESAAQALAALLIHLEDDLSVKIFSVLEQLVLQDPRYVGSPTKIWQATHGGLLGIRYFVSIKTDFLFTNNLLDNVVNIVLYGLNERDDDVQSVAAAILTPITSEFIKLEPSTIDLVVSAIWNSLSQLEDDLSSSVASVMDLLAKLCQHQEVLDVLHHKASTHPMEWSFKSLVPKLYPFLRNTITNVRRSVLNLLQAFLSIEDETSKQWINSKIFRLIYQNILLEQHDDILEQSFHVYRTMLEIYKSKNPDKSLDHIFSKHLAPILHLLITPIGEQGKNYSMEAQYLLKPSQSYQFNTERKRSSMTALNKSDIPMPLHTEHVNIDAPMIAGDVTLLGADVIFKTRVLAAKALGYTLAAFQESTVKSFFETALLSCLDLPYATPRMLVSITVAEYCSRWTFLHPETAFPPSFVADYFGPIFMEYLFDPSKLPVFRELVPSLKALRTQCQSLMTTFVEVGMLSPQRLPQLAIIVKGEAEAGPEAFYIETAEKVCDEHYEKLYQYMSNSCKILAKKPLEDARYRIQQAIDVAKEVRRSRNSNILASYASATLLFDGLPKKLNPFIRSLMDSIKEEQCEILQKRSGDSVIYLIMELVKNGKVNVANKVVKNLCGFLCVDTAEVPEFSPNMHYTDSILTLIREANSLAVQDNASIKLMTKEAQIKRRGAMHTLSCLLLQLGPNALTQVPQLKASIFDPLLSFGDLDSDSDSIEPEVGQQLVDALGVLRALFTYMDPVIHLEHVFTRLHDLLKYLTSRYSVVRYSAARTLAELAVANPTQVIPFIIKEVLPLMNNAGSVIARQSGTELVYHLCQSMGSDILPYIVFLVVPLLGRMSDPAPDVRSLATTTFASIIKLVPLEAGIADPEGLPEELLRGRERERDFIQQMMDPSKAKPFSLPVAIKATLRKYQQEGINWLAFLNHYHLHGILCDDMGLGKTLQTICIIASDQYLRQEDYKTTKSVETRPLPSLIVCPPSLTGHWEQEFEQYAPFLTVLVYAGGPSTRYPLRGKLGDADIVVTSYDVARNDIDIISKHDYNYCVLDEGHIIKNSQSKLAKAVKSIRANHRLILTGTPIQNNVVELWSLFDFLMPGFLGSEKAFQERFAKPIAASRNSKTSSKEQEAGALALEALHKQVLPFMLRRLKEDVLSDLPPKIIQDYYCELSDLQRQLYKDFAKKQKNIVERDIENTMELESKNHIFQALQYMRKLCNHPSLVLSKDHPQYNQVQDYLSQTGMDIHDIAHAPKLGALRNLLLECGIGVQDVDQNSISLPSSENVISQHRALIFCQLKDMLDMIENDLFKKYLPSVTYMRLDGSVESRDRQKVVRKFNEDPSIDCLLLTTKVGGLGLNLTGADTVIFIEHDWNPMNDLQAMDRAHRLGQKKVVNVYRIITKGSLEEKIMGLQKFKMNIASTVVNQQNAGLASMDTHQLLDLFDTDNSLAQVKEEKAGAISDDVTNETGLTGKAKEAVSELKELWDSSQYEEEYNLDNFIKTLR

SEQ ID NO: 11089 - protein, 475 aa, Moorella thermoacetica ATCC 39073
MSKTPGEVLEMARKNNIQMVDLKFIDLPGTWQHFSVPLDEFDEGAFTSGVGFDGSSIRGFKTINESDMILVPDPDTAFIDPFCDVPTLSLVCNVYDPMTGQNYNRDPRFVAKKAEAYLKETGIADTSYWGPEAEFFILDHVRFDQSQYAGYYFLDSDEGFWNSGVEMNGHPNLGYRPRYKEGYFPVPPTDTLQNLRTEMVLLLKQMGIAVEAHHHEVATAGQGEIDMKYAPLTRMADQLMMFKYVVKNVAIKHNKTATFMPKPVFQDNGSGMHVHQSLWKGNEPLFYDANGYAGLSELALYYIGGLLKHAPVLTAFCSPTTNSFKRLVPGFEAPVNLVYSQRNRSAAIRIPMYSSSPAAKRIEYRPPDPSCNPYLAFAALLMAGLDGIKNKIHPGEPLDKDIYDLPPEEAARVKSLPDSLEEAIAALEKDHEFLLQGGVFDEDLINAWIEYKQKREINQIKLRPHPYEFVLYYDV

SEQ ID NO: 11090 - protein, 212 aa, Vitis vinifera
MKVCELCNSPAVIYCDSDQASLCCDCDAKVHSANFLVAKHSRTLLCHVCQSPTPWNGSGPKLGTTISVCQRCVNRSRTVNETPSTDEDEDEEGEEDGEDEGDDENDEENQVVPWSSTPPPPISCSSASEEESSSRFCNGEEGPSDSKSASSLKPMRQQSSFRPTSQVRLFSPSLRTISMSIKSPQIPIYSTSQNDLGRSVSPPAHNLRIFMK

SEQ ID NO: 11091 - protein, 233 aa, Candida glabrata CBS 138
MSQDIVVELGLLSEVDGSAKLLMNSTNVLCAVTGPVEPKARQELPTEMALEVIVRPAKGVPTPREKYLEDKIRAIFTPLITRHKYPRQLCQITCQIMEAGENEQLHNQKELSACVNSALLALVNAGVALNDLAAAVTIAVIDDQSQENKAQYIIGPSDEELEKSSSVHTIAMEVGDNGKKVKRVLLIESNGIFNDKVIFDILELSESACLNLCSNWRGVLTKHIQKELDLQSS

SEQ ID NO: 11092 - protein, 476 aa, uncultured bacterium
MEDGRMTPEQVLEFAKENNVEFVDVRFLDFPGLWQHLTVPVTELTLQSFTQGFGFDGSSIRGWQAINESDMLIIPVPDTAIIDPFCQHPTLSMICDIQDPLTRQRYSRDPRSIARKASDHMCSTGIADTAYFGPELEFFIFDQVCYDQGMNYAHYRVDSREGTWRRGQDEPDNLGNQLRPKEGYFPVPPADTMHNLRSEMVAVLQQCGIEVETHHHEVATGGQAEIDMRFDKLVRMGDKMMLYKYILKNVAARHGKVVTFMPKPLHGDNGSGMHTHFSLFKGDQPLFFDKDKYAEFSDLGRWSIGGLIKHAGAVVAFTNPTTNSFKRLVPGFEAPVNLFWSMRNRSAFVRIPVYQHNPNTKRIEFRCPDSSCNPYLAFSAILMAALDGIENRLDPGPAVDENLYEMSPERVAEIGQTPTSLEGALDALGRDHQFLLKGGVFTEDVIHYWIQYKMDNEVNQLRSRPHPYEFCLYFDI

SEQ ID NO: 11093 - protein, 967 aa, Desulfitobacterium hafniense Y51
MALFANPDPKSVRETLNLEFELQIEIHRRVHAQLQIKVGQNRLYIVKNLEEFLAAIQGGHLLTFGKQFTYDPFLHTFSDEDQTIIHMLQEMSKQYEAFNEQRSFHYASPFSQKPFVLTEYYLGKFFDALGAKHFSLALTSSRGGLPELSPSLQIIRQDIPLDFAIQSKEQDLTLALQSKLPLQLTEDGRYYLYDQNIHQVSPVQQSYLPNLIKVMSGKNHQTLTFPDHQKDFFASEAIPLIEQMGSVAIDPQLAEKFVREELQARIYFDRMGEYGIRARLEFHYGDHIINPFTSQTGANRQEAADSQILIRNIERERKILGIFEQAEFIVSQGVISLEDDEKLFDFITTWLPQLQDCAETFYSDDFKLTIRTSTSFSGRVRLDESSDLLEISFQYSDIDRDELTQIFHSLQVKRNYYRLRDGSFLDLRQPELESMAMFLEHLNLRGEDLNEQTLRLPKFRAMYIDSFLRQANLPGIQRNKAFKQLVQSILEPQDGEYDPPPSLMSVLRDYQKTGFRWLKTLAAYGLGGILADDMGLGKTLQTLAFILSEKLSSPALVVAPTSLIYNWQAEGEKFAPGLHILVVDGSPQERQEQLKGLDQADLVVTSYALLRRDIETFAQVDFSYCFLDEAQNIKNPQTLNAKSVQRIKAKSYFALTGTPIENSLAELWSLFNFCLPGYLLSHQEFQKKYSTPIIKDGDPLALRELSRHIKPFILRRLKKDVLKELPPKIETEIKAALTEEQRKIYLAYLQQTKSQIAQELATHGFAKSQIQILAALTRLRQICSHPGMFIDNYTGESGKMLLFQELLEDSLAGGHRVLVFSQFTSMLDIIGEYLHSENIDYFYLSGSTKALERSRMAASFNNGEGQVFLISLKAGGTGLNLTGADTVIHFDPWWNPAVEDQATDRAHRIGQQNSVQVIKLLTQGTIEEKVNALQAKKKKLIDSVIQPGETMLSKLTEEELRELFELN

SEQ ID NO: 11094 - protein, 1457 aa, Yarrowia lipolytica
MNGHNNNHDETNRGAMSISSILSGGERRASDASQQPPAPPLQQQSPLQQQPPPALHHPPPPPHLSPHQTHQAPHISPQHSPQNGHTMPGPPMMGHEQHYMQQQHPQHPQHPQQQSPPMLPQHHQHHPHPHHSPQHSPPMLQHQHHSSTSPPMYHKQQPHPQHQHPPPPHPGHMSPQGHPNMSPHPVQHQGPHPGHQGHPGHPGHQGHPAPPDMYAPRIYMSQQQIPQQAPWPIQIPIQGHTSVDGDHSAPESPPADADDPAYADAKTGFLQQVQSRLEAVVQLEELRDKVVIDEYTKTKAYTNAARYAAVKQSAKTSLQKEAIVRVAFVEYEEGGGLAGAHTSASPAASSSSSAAPVSSTSSAPASASSAAGAAAAAAATTSSVSTPKAKKRSKAVSKTSAAASVAAGTSSKEASPAPKPKTKKQLQAEQREKDREIREENAAAKEAAAAAKQLDQAYDSIWKDMARRDAAKVHKTVAATIAVKQSNHRKTAVLASKEARRWQYRTNKSIKDMQGKARRAMREMLSFWKRNEKEERDLRKKAEKEALDQAKKDEEDRESKRQARKLNFLLTQTELYSHFIGRKIKTDEMEDGEAAKDGDEDYEAMEKIAKSGSDVETKRAAELDFDEDDDDKLRQIAMQNAHNQVRRNQQQAQAFDAQSETPTAESGAAADSDDAFQNPTSLGDLQLSQPKLLNCTLKEYQLKGLNWLANLYEQGINGILADEMGLGKTVQSISVMAYLAETHNIWGPYLVIAPASTLHNWQQEISKFVPDFKVLPYWGNGKDRKILRKFWDRKNVKYTRDSPFHVLVTSYQLVVSDAQYFSRVKWQYMILDEAQAIKSSSSSRWKSLLAFQCRNRLLLTGTPIQNSMQELWALLHFIMPSLFDSHDEFSEWFSKDIESHAKEKSQLDQQQLKRLHMILKPFMLRRVKKHVQQELGDKIEIDVYCNLTTRQRVMYKILKSQINLQELLAKAQSGSEENTQSLMNLVMQFRKVCNHPDLFERADVKSAYNFGPSNCGSDKDTWIGSSNRNLISFEVPKLVYREGGFLDVPGEHSKAGSLNKLLKVDLNIWEPSWMGRKRDLVVEEEGGVGRVSRVSQMGVMERVINEVNRDVPSVGALPRYTPAPSPFDVFETLYDSYLHRLEPAYDPRVVAPPVDFVCRDRGFQIEQEEKMGGVDVRRALTPLTLGQELWWLEKAEAEVKGTNVTALTPGSVSLPPNDLFPSRVLDFNGINTLRMPSMSKFISCSGKLAKLDELLAELKAGGHRVLVYFQMTKMMDLAEEYLTFKQYNYCRLDGSSKLSDRRDLVNDWQTKPELFVFLLSTRAGGLGINLTAADTVIFYDSDWNPTIDSQAMDRAHRLGQTRQVTVYRLLVKGTIEERMRDRAKQKEHVQNVVMSGQSQSHEEEVNSKPSRDVALWLLDDDQDEASFVKGKENRGVKRGAEGEEEKKVEEIKKPKTE

SEQ ID NO: 11095 - protein, 1237 aa, Arabidopsis thaliana
MKRKHYFEFNHPFNPCPFEVFCWGTWKAVEYLRIENGTMTMRLLENGQVLDDIKPFQRLRIRSRKATLIDCTSFLRPGIDVCVLYQRDEETPEPVWVDARVLSIERKPHESECLCTFHVSVYIDQGCIGLEKHRMNKVPVLVGLNEIAILQKFCKEQSLDRYYRWRYSEDCSSLVKTRLNLGKFLPDLTWLLVTSVLKNIVFQIRTVHEKMVYQIVTDEDCEGSSSSLSAMNITVEDGVVMSKVVLFNPAEDTCQDSDVKEEIEEEVMELRRSKRRSGRPERYGDSEIQPDSKDGWVRMMPYRYNIWNVSSDDDDEEEDCEDDKDTDDDLYLPLSHLLRKKGSKKGFSKDKQREIVLVDKTERKKRKKTEGFSRSCELSVIPFTPVFEPIPLEQFGLNANSLCGGVSGNLMDEIDKYRSKAAKYGKKKKKKIEMEEMESDLGWNGPIGNVVHKRNGPHSRIRSVSRETGVSEEPQIYKKRTLSAAKDKATNVVEQWQGLKNPASFSIEAEERLSEEEEDDGETSENEILWREMELCLASSYILDDHEVRVDNEAFHKATCDCEHDYELNEEIGMCCRLCGHVGTEIKHVSAPFARHKKWTTETKQINEDDINTTIVNQDGVESHTFTIPVASSDMPSAEESDNVWSLIPQLKRKLHLHQKKAFEFLWKNLAGSVVPAMMDPSSDKIGGCVVSHTPGAGKTFLIIAFLASYLKIFPGKRPLVLAPKTTLYTWYKEFIKWEIPVPVHLLHGRRTYCMSKEKTIQFEGIPKPSQDVMHVLDCLDKIQKWHAQPSVLVMGYTSFLTLMREDSKFAHRKYMAKVLRESPGLLVLDEGHNPRSTKSRLRKALMKVDTDLRILLSGTLFQNNFCEYFNTLCLARPKFVHEVLVELDKKFQTNQAEQKAPHLLENRARKFFLDIIAKKIDTKVGDERLQGLNMLRNMTSGFIDNYEGSGSGSGDVLPGLQIYTLLMNSTDVQHKSLTKLQNIMSTYHGYPLELELLITLAAIHPWLVKTTTCCAKFFNPQELLEIEKLKHDAKKGSKVMFVLNLVFRVVKREKILIFCHNIAPIRLFLELFENVFRWKRGRELLTLTGDLELFERGRVIDKFEEPGGQSRVLLASITACAEGISLTAASRVIMLDSEWNPSKTKQAIARAFRPGQQKVVYVYQLLSRGTLEEDKYRRTTWKEWVSSMIFSEEFVEDPSQWQAEKIEDDVLREIVEEDKVKSFHMIMKNEKASTGG

SEQ ID NO: 11096 - protein, 472 aa, Neisseria meningitidis FAM18
MSIKNAVKLIEESEARFVDLRFTDTKGKQHHFTVPARIVLEDPEEWFENGQAFDGSSIGGWKGIQASDMQLRPDASTAFVDPFYDDVTVVITCDVIDPADGQGYDRDPRSIARRAEAYLKSSGIGDTAYFGPEPEFFVFDGVEFETDMHKTRYEITSESGAWASGLHMDGQNTGHRPAVKGGYAPVAPIDCGQDLRSAMVNILEGLGIEVEVHHSEVGTGSQMEIGTRFATLVKRADQTQDMKYVIQNVAHNFGKTATFMPKPIMGDNGSGMHVHQSIWKDGQNLFAGDGYAGLSDTALYYIGGIIKHAKALNAITNPSTNSYKRLVPHFEAPTKLAYSAKNRSASIRIPSVNSSKARRIEARFPDPTANPYLAFAALLMAGLDGIQNKIHPGDPADKNLYDLPPEEDALVPTVCASLEEALAALKADHEFLLRGGVFSKDWIDSYIAFKEEDVRRIRMAPHPLEFEMYYSL

SEQ ID NO: 11097 - protein, 734 aa, Mycobacterium marinum M
MTRQISRISLTDRGSATPKLAIIGGRLEDDNAAVYHEMHRLAGGRIVVFPTASSVPDEVGAEAVGVFRAYGFDAALAGVYGAGAAAAAQDTAIADLVEDYGSVYFTGGDQALITGALAPKGTESRVLKAIRTAQLNGAMVAGSSAGAAMMSNVMISGGTSLEAATYGVVDDPDEPGMLLEPGLGFFPWGMVDQHFIKRGRFGRLVVGMQASGAKRGFGIDENTALFIEGTSARVIGEYGAFMLHLEEARVDRRRKLIENIGFSYADDGDSYDLETGEVLPGPGKRPVTQRDITYRAPARSLRNVFAAYTLYDLTARLVLGDPEAYPADRARAIEPKAGCATSVEISRQGGRAAAYIPGAGRDFRMTAVDFRASMRTRQLNAAQLAENRWAALSRDYGMKPGQQARMMMLGSAPLDRGSPLLAELASRCEGPVGVLAAASAEPNAAAREYIGALRGHGVEATDLRVTIDNVDRRMREEALVEQIAALRTIILTGGNQIRLVESLLYRGDVTPLLTAIAQARAAGAMIVGVGGAASALSGFMIGGGTSYEALRFGIASDMGRHGLVIQEGLGFFGAAIVDQKLSSSLRLGRLAVACAEESVRFGLGLLEDSGVIANHDNTQLTAIGARGAVLVELDPLKTELAGDDFIAPDTKLCFAGPGDVIDMVTGTVTRVAPATASAAALDTLVDALIKDCVGDAGPVTAPGVTHEAHIALRYRSHDDGTGHLDIESIRDRHG

SEQ ID NO: 11098 - protein, 584 aa, Colwellia psychrerythraea 34H
MLKENITLSLDDNRRLTGRNLLSDQPGAIIDAFVSGIDKITVVNVWSKYAQQLLNAVNWLEDKTFSRIFEDGISIAISAPLDALYAACDLNELAWQLTCNELTQTPNEESISAAISRLNQVIAEEVNPELLELIKQSTSKNIVYLVDDDEFSLGYGTTAQSWPISALPEVSTINWSQYKSIPLAYVTGTNGKSTSVRIMSQIIKQAGKCCGVTSTDFIRVGDNIIDHGDYSGPGGARMLLRHPDTETAILEVARGGILRRGLPIDNVDAALITNIAEDHLGQYGINTVSALAQAKAVVAKGLLPNLEDKGQEHNRQDKGRLVLNADDENLVVLAPEIPVTKSWFSLHEDNATLQQHKQKGGAVCFVREQHLVYSVGNEESVIIAVNDIPMTLNGAALHNIQNALGAIALAKCLNVENEAIKIALSNFASNVEDNPGRGNHFTVKSAEVIMDFAHNVHSMEAMAVTTANMKAQRKFLMLSHAGDRTDNEIINMTKTALKMKPDFIVAAELVPYLRGRTLGEIPQLIVDTALAYGMKRSDIYIADSPFKGANYIVEQLREKDLALLMVLSEREEIIELLLDKAFFR

SEQ ID NO: 11099 - protein, 226 aa, uncultured bacterium
MAGVQLGAGCWICEYLSPWDVYAHGVAKTLVHRKTKFQEMHIIETGTFGKALILDGFWQSCTGDEFLYHEPLVHPAMLLHGRPRRVLVLGGAEGAAVREVLRWKSVEQVVMVDIDGEVVEACRQHLPEMHQGACDDPRVEVRIQDALVYLDETRSTFDVIISDLSDPIEDGPSFKLFTRETFERARGSWRRRGCSSCKPAASRRPSCTCTPAWSARSDGCSPTPPH

SEQ ID NO: 11100 - protein, 117 aa, Arabidopsis thaliana
  misc_feature (80)..(80): Xaa can be any naturally occurring amino acid
MASSMLSSATMVASPAQVTMVAPFSGFKESVAFSVTRKVNNDITSIISNGGIVNCMQVGPPIGKKKFETLSYLPDLNDSXLAKEVDYFIREKRVPLGGTCRGGMEFEHREARVLTPE

SEQ ID NO: 11101 - protein, 695 aa, Ustilago maydis 521
MAADSIPPPLSQGVGYGVVLGFGFAFAGVMFYITQLLWRFNGENNSHFETYATAGRKVGTGLTATAVFSSWAWSTALLSSSVVVFSFGVGGSYWFAAGCLVQISAFALLAIQSKLKTPHAHTVLEVVKVRYGTAAHWLYMFFCLANNLIAIANMLLGASATVSALTGMHIIASTFLLPVGVCLYTISGGLKATFLTDWMHSVALLIIVLFLTLKTITNDAVQSPGHLWELVKQHNVDNPIAGNYRGSALTMTSKSAVEFGVLHTLGNFGLVALDSSYWQKAYSADISAAVPGYVLGGVLYFGLPWCLGTVMGLAGWSLQTNPIWPAYGRELSSTELSDGLPLAYTALAVAGKGGAVAVVILIFMAVTSTTSAQLIAVSSIISSDVYHTYIRPNASDKQVIRVSRAACIGFAIFASAFSTMLYYIGISLTWTLYFLGLITCPAMVTLPLTVLWKKQTWWAATVSPVVGMVAGIATWLATASSYGGGVLNVTTTGELLPCLWGTIVAAFVPAILSPLITLAFPQPVDFAWERFNEIKLIQDDSSRSSSTDDLAQEKLATTHAQRVADAHASKSVPYSDAERRFMNKQSAVAGWTGLALFIAVWVLWPFIMYAAKYEFSRPFFVGWVVVAVIWAFAALLIFTFLPLWQGKRLIVTIVRGVLTGKDDNAHDTVATTASSTTPIEQREPGASFTSTSSSA

SEQ ID NO: 11102 - protein, 235 aa, Alkalilimnicola ehrlichei MLHE-1
MATPLRPTTPEYIQHNQQVLEDRHSDFQHIVIAEDPDYGRLLYLDDDLQISEADQPYNQAMVDPLARHGSLGRVLILGGGDGGVLREAISRGAREAILVDIDRAVIDLCRRYLPQLCGDAFDAPQARVVVDDALAWLHREDEYDGIIYDLTMEPFSPDQSRTRFIDQVLAHAGRRLRPGGTFSMQCCGANEPALREEIRQGLARRFRTWEDTTVSIPSYDVDWVFAWARHPRLGA

SEQ ID NO: 11103 - protein, 450 aa, Synechococcus sp. WH 7805
MPTPRLRPEHSHRQGILLILGAGGIAAAVAIAAPGLGLPSTNSSSITDSPKEVIDQVWQIVYRDYLDSTGNYSPERWTRLRRDLLTKNYAGTDESYEAIRGMLASLDDPYTRFLDPKEFKQMQIDTSGELTGVGIQITLDKDTKEIVVVSPIEGTPASKAGVLPKDVIVSVDGKTTKGMTTDDAVKLIRGKEGSEVTLGLRRKGEVVIVPLKRARIEINAVESRLNTSADGTKVGYIRLKQFNAKASREMRAAIRKLEQKGAQGFVLDLRSNPGGLLEASVDIARQWLDEGTIVSTKTRDGIQDIRRATGNAVTDRPVVVLVNEGSASASEILSGALQDNKRAVLVGQKTFGKGLVQSVRGLSDGSGLTVTIAKYLTPKGTDIHKNGIRPDVPVELSEREIQSLTVDQLGTGKDSQYRAAETTLIKALRSPERGQAFQPGSANLQSALQR

SEQ ID NO: 11104 - protein, 683 aa, Shewanella sp. ANA-3
MRKLTLATSIATVFVGFSAWAVPPTIQISELPTLKQEAQHKVASKRVTDLYTRSHYHRFALDDAFSAQIFDRYLQQLDYRRNVLTQADVDSFKPYTNQFDDMLSSGDLDPAYKMFDLVQKRRYEGFVYALSLLDKEMDFTVPGDAYEYDREDAAWPKDQAEINELWRQRVKYDALNLKLTGKKWPEIVDILQKRYNNAIKRLTQTNSEDVFQAVMNAFSRSIEPHTSYLSPRNAERFQMEMNLSLEGIGAQLQLEDDYTVIKSLIAGGPAASSEKLSPEDKIVGVGQEGGEIVDVIGWRLDDVVDLIKGPKGSKVILQILPKKGGSNAKPFNLTLVRDKIRLEDRAATSKIIEPKDGEYANRKVGVIQIPGFYMNLSQDVEKELVKLNEAKVEGVVIDLRGNGGGALTEAVLLTGLFIDMGPVVQVRDADGRVSAHRDNDGKTTYAGPLTIMVDRYSASASEIFAAALQDYDRALIVGESSFGKGTVQQHKSLGRIYDMYEKPIGHVQYTIQKFYRINGGSTQLKGVTPNIAYPSALEPGEYGEAEEKNALPWDKVPMAQYGTLNDITPELVASLEKKHLARIQNDVEFNYINQDIADFKKHHKEKTVSLVESERIASREADEKKVLDRTNERRVAHGLAAVKSMEDIKDKDDVEAPDAFLDETAYITLDMADAKKLANAGTK

SEQ ID NO: 11105 - protein, 162 aa, Pseudomonas putida KT2440
MAATMLNIPCVTLGGEHKTLGDFPGKVLLVVNTASQCGFTPQYKGLEQLWQAYRDRGLVVLGFPCNQFGKQEPGDAREIAQFCERNFGVSFPLFRKVEVNGPGAHPLFVELKQRAPGILGSQKIKWNFTKFLVDPASGQVKRYAPTTKPQALEADIERLLSR

SEQ ID NO: 11106 - protein, 153 aa, Mesembryanthemum crystallinum
PPIIFNAGFQVKKKQFFKNFSFILMFGVLGTIISFCLISSGAVLLLKKIGLTQLNLNDYLALGAIFSATDSVCTLQVLNQDETPLLYSIVFGEGVVNDATSIVLFNAVQSLDLSNLSSMTALALLGTFLYLFFTSTILGILVGLLSAYVIKKL

SEQ ID NO: 11107 - protein, 81 aa, Physcomitrella patens subsp. patens
MRARAKRGCATHPRSIAERVRRTRISERMKKLQDLVPNMEKTTNTSDMLDETVEYVKSLQMKVKELTETIAQLKAATQMSP

SEQ ID NO: 11108 - protein, 677 aa, Neurospora crassa
MSTTTPPSTLTSTREAYSGAPPGHVPLNNTFNWCFSQPFLSANDYTPQAQVLDKIEDERPIFVDNASDRKLTYGQMRSDALALAAGLLSLGLNPSDIIKLPPTPTCPQGPEIPPVVLIQLPNSLAFAPVLLGTLAAGLTATLVSPALTSDEIAWILQNSRPRAIITAKACLGAMREALEKQEPRDRAFFDAVPIFIFDAAKDHYPSVSSSSPPTSVGSGSSSSSKKTNKTQDWKVLLRSSRATVVPSSFLPSSASPARTAVILWSSGTSGRSKGVLLSHHALNFSGAHMWHDAADYHSLAKVRQQRWLGYVPFYHVFGLCNIVLLAIMTGSTVYVMPSFSLDGMLAAIPKRKITYLHMAPPIAVMLAKAPVVEKYAKRDPKTGKNGFSSIVAAVTGGAPLGHEVVVEVYKRCGFRVRLGYGLSETCSTSLQRGTSEKEMVEQAGETGVPHWGVEVMIADMDVPAPGLVDGKTKAARIGQEGEILIRSPTLLSAYLPVGMFRTPKGQEPDMSVTREALTVDGWFRTGDVGTISAQGRLRITDRLKELIKVRAYQVAPAELEAVLCSSPSVADAGVVGVYDESEATEWPRAYVVPHKPEALENKTELEKLAHELRVLVEKRTTKYKWLMGGVVFVKQIPKSPSGKILRRILKSGGEDTEGVEIQVYQKKRRGATAASKL

SEQ ID NO: 11109 - protein, 636 aa, Penicillium marneffei
MAPAIGIDLGTTYSCVGVFRDDRIEIIANDQGNRTTPSFVAFTDSERLIGDAAKNQVAMNPHNTVFDAKRLIGRKFSDPEVQADAKHFPFKIIEKATKPVIEVEFKGEVKQFTPEEISSMVLIKMRETAEAYLGGTVNNAVITVPAYFNDSQRQATKDAGLIAGLNVLRIINEPTAAAIAYGLDKKVEGERNVLIFDLGGGTFDVSLLTIEDGIFEVKATAGDTHLGGEDFDSRLVNHFASEFKRKYKKDLTTNARALRRLRTACERAKRTLSSSAQTSIEIDSLFEGIDFYTSITRARFEELCQDLFRSTMEPVERVLRDAKTDKSSVHEIVLVGGSTRIPKIQKLVTDFFNKEPNKSINPDEAVAYGAAVQAAILSGDTSSKSTNEILLLDVAPLSVGIETAGGVMTPLIKRNTTIPTKKSETFSTYSDNQPGVLIQVYEGERARTKDNNLLGKFELTGIPPAPRGVPQIEVTFDMDANGIMNVSAVEKGTGKSNKIVITNDKGRLSKEEIERMLAEAEKYKAEDEAEATRIQAKNGLESYAYSLKNTLSEGKLTIDASEKEKLEAEIEKTISWLDSNQTATKDEYEAQQKELESVANPIISAAYGGAGAAPGATGASATREADEVEERPEELD

SEQ ID NO: 11110 - protein, 474 aa, Frankia sp. CcI3
MFTKAEDVLRYIRDEDVQFIDVRFCDLPGIMQHFTIPTQVFAESVFTEGLMFDGSSIRGFQAIHESDMLLLPDPHTAFVDPFREHKTLAMTFFIHDPITKEQYSRDPRNIAKKAEAYLRGTGVADTAYFGPEAEFYIFDDVRYDYNPYGSMHQVDSVEAAWNTARKEEGGNLGYKPRFKGGYFPVPPTDHFTDLRSEMTRVLYETGITVEMQHHEVGTAGQAEIDIRYDTLLKTADNLMLYKYVIRNVARGRGKTVTFMPKPLFEDNGSGMHVHSSLWKDGEPLFYSPNGYGGLSDTARYYIGGLLHHAPALLAFTNPTTNSYRRLVPGYEAPVNLVYSARNRSACCRIPLSGDSPKAKRVEFRVPDPSCNPYLAFAAILMAGLDGVRNKIDPPDPIDKDLYDLPPDELAAVPQVPGSLEKVLDALEADNEFLREGDVFTADLIETWLDYKRVNEVDAIRLRPHPYEFTLYYDI

SEQ ID NO: 11111 - protein, 1122 aa, Medicago truncatula; identical to SEQ ID NO: 7562

SEQ ID NO: 11112 - protein, 653 aa, Candidatus Protochlamydia amoebophila UWE25
MYKFLICLICLTTFVLEAKSPDLSPKEVTFKANEIMKAHASQKQLSPTLTRRILNNYLENLDPNKTYFIESDIYEWTHPTDELLTNIIDDYNNSNFSTFESIHTALIKAILKRRQLENKIDYQSLPKNVRAEEFKDIPWVQTEEELIERLKRIRALQIETAAKLNDHMKENALQRIGKRQAKYEEEALNPKEQEKQPLILSNVLKATASALDAHTAYFTPGEAAQFMINVQQRLFGIGAQLRDDINGFTVIKIIEGGPAALGKELKLKDRIVAVNGEPVVGMDITDAVDLIRGEEHTPVILTVIRETTSTAGEKTEEKLDVTILRGEVILKESRFKSSYEPYGNGIIGYLKLYSFYQDRDSSSATDLEEEINKLKKNQNMFGLILDLRYNSGGLLSQAVAVTSLFITKGIVVSIKDENGKIQHLRDLDGTSTWDGPLIILVNRMSASASEIVAQTLQDYGRAIIVGDDHTYGKGSYQTFTLTTTEHEQVNPQGEYKVTRGRYYTVSGKTPQLSGVLSDIPIPGVLSESEIGEKYTKYPLENDHIKANFDDDLSDVPFLQRDKIRKLYKFGLQEKLDTYHPYFEVLKKNSSKRLENDPNYQNMLKEIRKKENSDIESMEDFGQNDLQLEEAYKIMKDLLIMMQEKGIPLISSKL

SEQ ID NO: 11113 - protein, 157 aa, Griffithsia japonica
MSATKLSDLQGLKDIEGGAIDPSRFAGKVVFAMNVASACGYTKPGYELLKRLTDKFAPADFVAVAIPCNSFLWQESGSAEDVKTFALARADKLLVTEKAAVNGNHPHPIVALAKQAFPGRVMWNFDGRFVFDRNGVPVARFGNSAKPEEIEAAIANA

SEQ ID NO: 11114 - protein, 911 aa, Mycobacterium marinum M
MNIDSISVYVGPNVHALEAVIRLQVDVKPSYAETLRGLGAGVIDRLAAVLPGLALEHAEWVAALHAGAGLSIGDLVARLALALEHAAGIDGTLAWSRSTDDPDIVEVFYSYGNEDIGIEAGEVACDMLAAIARADSDDQEAPDLDKNVEDFLTYADRRSLGPSAMELVRTAQARDIPVYRLNDASLIQIGQGKYQQRIEAALTSKTSHIAVEIASDKNLANNLLADLGLPAPRQKLVYSVDEAVGAAERIGYPVVIKPLDGNHGRGVTVNITSEDGIAEAFETADAEGSAVLVETMLRGDDHRLLVVNGQLAAAARRVPGHVKGDGRHTIAELVNIVNQDPRRGVGHENVLTRLELDDQATRLLEEKGYTAETVPAEGEEVYLRKTANISTGGTAVDVTDTIHPDNKLMAERAIRAIGLDVGAVDFLTTDITKSYRETGGGICEINAGPGLRMHIAPSEGTPRDVGGAIMDMLFPPGTQARVPIAALTGTNGKTTCSRMLAHILKMAGHVVGQTSTDAVLIDGNVTVKGDMTGPVSAKMVLRDPSVDIAVLETARGGIVRSGLGYNFCDVGAVLNVASDHLGLGGVDTLDDLARVKRVVAEVTRGTVVLNADDEQTLKMAAFSPARQVMYVTRNPEHELVREHIRLGKLAVVLEQGVNGDQIVIYDNGTQMPLMWTQLIPATLEGKALHNVENAMFATGMAYALGKTLDQISAGLRTFDNSFFQSPGRMNVFDEHGFRVILDYGHNEAAVGAMVDLVDRLKPRGRRIVGLTCPGDRRDEDATAIAAKVAGHFDTYICHRDDNLRDREPDEVPELLRDALIAEGVAPDAISIIGEEEQALDAALEQAQPDDLVLYFCEAITRCWKQIIHFTPKFTAPEPESVAKRLATSIFDVPDGFALTSDDRGVLIVPAK

SEQ ID NO: 11115 - protein, 455 aa, Desulfococcus oleovorans Hxd3
MNNRKSRWIKILGVTSTLACLLIIGAGFSCTISAGSDETYKSLKIFSSVIETLEKEYVDPVDTTELIEAAIQGMVKSLDPHSEYLPSDAFKDFQSDTRGEFEGIGIVITMPKGVLTVISPIEGTPAFKSGIQPGDIITTIDDEPTADMELWEAVKRMRGEKGTSVTITIRREGVAEALSFDLVRAVIPIVSVKHAMLKPGYGYVWVTNFQANTTDELKTALAGLEADNGGDLKGLILDLRNNPGGLLDQAVAISDMFLDEGTILSVKEREKESNYNARPDKTRHDYPLVLLINGGSASASEIVAGALQDHKRALVIGTTSFGKGSVQTVQPLSDGSGIKFTIARYYTPSGTSIQTKGIVPDIEVKPGLLDSADEKEVPRLKEKDLKNHLEAAPMKDAPADDKTQAPAADDKKTREDLTNTRYGDLDPDLMLRDAQIVRALDALISYEIFSARHAK

SEQ ID NO: 11116 - protein, 240 aa, Schizosaccharomyces pombe
MAEVEEKGLLSYYFPGERIPDSIISQDGSIRLGPGLVFQKKDREEEIVVSKAGRLHQTGKNAMLIDSRTKRYIPATNDQVIGQIISRFAEGYRVDIGSAHIAQLNALAFENVTRKSRPNLNVGSLVYARVSLADRDMEPELECFDATTGKAAGYGELKNGYMITGLSLSHCRKLILPKNTLLQTLGSYIPFEIAVGMNGRVWVNSENLSTTVLICTAIRNCEFMSDEEQIKYCKDLIKKL

SEQ ID NO: 11117 - protein, 1898 aa, Oryza sativa Japonica Group
MDPPARSRRCTLLTRALLLAVAALALRLIYAAFLAGMALYPPLPAAAVLGSKTYLHSAVATPDAWRTRDWRKAVDYHATLLAPHLADGILSPTSRAVCLGAVQEALAMRELGVSTAVAVARKRSPPLAVAGNDRRLPFQDSSVDFVFAARALDSSKRPADLAAESARILKPDGHLVVLTTSAADAFSLRALQALLPSLRLLRSRQIKGPDDSTLRELVFQKIQDSTDDPVNKCTIGDHKLQLLTHAEPLIQEEPRKPWITLKRNIKNIKYLPTLADISFKRNYVYVDVGARSYGSSIGSWFRKHYPKQNHTFQVFAIEADPAFHSEYAAKKAVTLLPYAAWVKNETLNFEINADPGKEDEAKANGRGMGRIRPMAGKKMSGEVRSVPAFDFAEWLKRTVSEQDYVVMKMDVEGTEFDLIPRLFDTGAICLIDELFLECHYNRWQKCCPDRAEAFEMAKGVSCFYWSIQFPNFKDHLCFRNCSNASSTRHFSYRSLLIRTEKPVTTRNHAYAEVVVFVLDQVTQLSLPFPFLCVCSSPSTMTRHTQVTSTQRKQARSSSSSASPLLSLRITYYLFMVMGATAFEVFYDGSWHGVNCIRIRNGNLFVKFIYSGSTVEHNVDGDCLRLRSRRATCSDCSNVLKPGVDVCVQSSHTPEASSQGGTNASVLLRHDARLITIKKNHQEDKCLCLFVVILYKNQCPGNAEKVITDRRAEVVTINDIFLLQKLQPEVHEGSMKWSFSKDRLSLNKGRLISARFSSEITHLIVLSILRGMEFNIKLVEGQIVYQIIKGDQAQWNLDSMAIPPGFGNTMEIISFQLRDEALRPTITNIPITHVKKNNITEDMRFTVKSEMDSELDRALDVEILYEHVDLRRSKRLKTQPDRFTSYDTPRFLSGYKKKEASSSPTKHVRGAVHCDSPVDDSKKEVESCCVEIPGNVTQKQTGVHSPMVDEKSNSPEGQHKNTTKRTTCSLVKEKASSPEGQHEKTTKRTTCALPVKEKASSPEGQHKNTIKRTTCSLPVKEEPSSVEIEEKSSKEQSAPEFHIPRTPAQNKEKHNRPPFSCKPKLFTSSGTLGVNCEPAFCQKVGGKRKRHMCEREYKQMIDQCIGNIESEMERDSMFNFDANMMNYVQHSYREEDFTWPPSADNQEVEEDELEELWKEMDYSLTTLALLEQKQVMAQSRINMLVDNFDGLRLDCLTLTDDYRCYYQKKEKFAESGSVNESTDYFGKVGGIPCHHECILDEELGLACRLCNVVCTEAKDIFPEMFNGNDYKDRPGCSNICLDDDILDPSLLANLAPELSELKNSGSVWSAISDLDPKLLPHQRKALDFLWKNLAGSIQVEGMDNSNVSTGGCVIAHTPGSGKTLLLISFLVSYMKAHPRSRPLVLTPKAAIHTWKREFEKWGISLPLHVFHHANRSGKPLGAMDSKLRSLLNNFHRPTWTNMRLMDSLDKLFKWHAHPSVLLMTYSSFLGMTKQDSKVRNRYREFIAEVLMNNPGLLILDEGHNPRSNKSKLRKLLMKVKTEFRILLSGTAFQNNFEEYFNTLCLARPRFIGDIMSELVPERKRETVGRRAKHQEAVARRAFVEKVGQKIESDNKHIRSDGISLLNKLTRGFIDSFEGAKLINLPGIHVYTVFMKPTDIQEEMLAKVTMPKLGSSRFPLEVELLITIGSIHPWLIKTTKAVSTFFSPAEVKKVERYKRDFAAGCKAKFVIDLLHKSSFRGERVLIFCHNVSPITFLVKLIEMVFGWRLGEEVLVLQGDQELPVRSDVMDKFNGDSAGKRKVLIASTTACAEGISLTGASRLVMLDSEWNHSKTRQAIARAFRRGQERTVYVYLLVASGTWEEEKYNSNRRKAWMSKMVFLGRYVDDSSQNRVTDIDDEVLKELADEDHTGTFHMIVKQD

SEQ ID NO: 11118 - protein, 287 aa, Crocosphaera watsonii WH 8501
MLQLETQSQPSPMSQPTTTAILVIGGAEDKVHGKEILHTFWFRSGGTNATIAIIPSASREPVLIGERYQSIFEEMGAKYVKVLDIRDRDQGNDPYFKEYVEECTGVFMTGGDQLRLCGLLADTPLMERIRQRVQLGEISLGGTSAGSAVMGHHMIAGGSSGESPNRALVDMAMGLGIIPEIIVDQHFHNRNRMSRLLSALSTHPERLGIGIDEDTCALFERDGLMRIVGKGTVTIVDGRDMSYTNQADISATEPLSLHNLRVNILSHGDCYHLHQHQCIAKISSPVQ

SEQ ID NO: 11119 - protein, 872 aa, Crocosphaera watsonii WH 8501
MKILKTLTLRGPNYWSIRRKKLIVMRLDLEDLAERPSNQIPGFYEGLVDILPSLVEHYCSPGHRGGFFERVKKGTYMGHIVEHVALELQELTKMPVGFGRTRETATPGIYNVVFEYVDEQAGRYAGRAAVRLCQSIIETGSYPLKELEQDLSDLKDLQANAALGPSTQTLVTEAEARNIPWMPLSARAMVQLGYGVNQKRIQATISDYSGILAVELACDKEATKTILLDAGVPVPRGTTIQFFEELESAIADVGGYPIVIKPLDANHGRGITIDVNSWEDAEEAYDLASKESKTRSVIVERFYKGSDHRLLVINGKLVAVAERVPASVVGDGQHTIEELIAITNEDPRRGEGHDNVLTKIKVDKTSLAILDKQGLRLETVLDKGEVAYLRATANLSTGGVPIDRTDEIHPQNLWMAERVSKIIGLDIMGIDVVTPDISKPLQEVDGVIVEVNAAPGFRMHVAPSQGLSRNVAAPVMDMLFPPDTPSRVPIVAITGTNGKTTTTRLTAHIYRQTGKVVGYTSTDGVYIGDYLVEKGDNTGPFSAAMILKDPTVEVAVLESARGGILRSGLAFDSCDVGIVLNVAADHLGLGDINTIEQMAQVKGVIAEVVHPDGHAVLNADDPLVAAMAEKVKGKVAYFSMNPDNEIIENHLRRDGLAAVYENGYLSILEGQFTLRIEEAVNIPMTMGGMAPFMIANALAACLAAFSQGVDIEDIRQGVRTFTASAEQTPGRMNLFNLGEHHALVDYAHNPAGYEAVGEFVKNWQGQRLGVVGGPGDRRDEDLVLLGQIAARVFDRIIVKEDDDKRGRDRGEAADLIIKGILSEKPQADYEAILDETEAINYGLDKVDKGGLVVVFPESVTRAISLIKQRESV

SEQ ID NO: 11120 - protein, 181 aa, Brassica napus
MASSMLSSAAVATSPAQATMVAPFTGLKSSAAFPVTRKSNTDITSIASNGGRVSCMKVWPPVGKKKFETLSYLPDLTDVELAKEVDYLLRNKWIPCVEFELEHGFVYREHGSTPGYYDGRYWTMWKLPLFGCTDSAQVLKEVQECKTEYPNAFIRIIGFDNNRQVQCISFIAYKPPSFTGA

SEQ ID NO: 11121 - protein, 180 aa, Bacteroides thetaiotaomicron VPI-5482
MKSFILMVITMVCAISLEAQNKSFYDFNVTTIDGKEFPLSSLKGKKVLVVNVASKCGLTPQYAKLQELYDKYKDKNFVIIGFPANNFMGQEPGSNEEIAQFCSLKYDVTFPMMAKISVKGKNMSPLYQWLTEKKLNGKEDAPVQWNFQKFMIDENGNWVGFVAPKESPLSEKIVTWIEQE

SEQ ID NO: 11122 - protein, 159 aa, Saccharophagus degradans 2-40
MASIYDINIQSLQGQLIGFSDFKGKALLIVNTASKCGFTPQYEGLQQLHQQYASEGLVIIGCPCNQFGKQEPGDAKAISEGCLINYGVDFLITEKIHVNGANTHPLYRYLKTALPGFMGNNIKWNFTKFLIGKDGTPIKRFAPFTKPASMEGAVKKALG

SEQ ID NO: 11123 - protein, 205 aa, Zea mays; identical to SEQ ID NO: 125

SEQ ID NO: 11124 - protein, 241 aa, Arabidopsis thaliana
MAAKVSVSPTSLLNQIVVPGDVVLDLSNMNNQTIKLGSGLLQDNDAISAMRAGKLSYSKPNKYWLESSHKRYIPRPDDHVLGIVVDSRADNFWVDIKGPQLALLPVLAFEGGTRRNIPKFEVGTLLYLRVVKTNIGMNPELSCTEASGKAALFGPLRDGFMFETSTGLSRMLLNSPTRPVIEALGKKLSFEIAVGLNGRVWVNATAPRIVIIVANAIMNSESLSGTQQRIMVEKLLAIISD

SEQ ID NO: 11125 - protein, 760 aa, Chlamydomonas reinhardtii
MATQVERIKWVKGTNFIVDGFAFTSPKCKHYFLTHAHSDHTIGLRKSFSAGVIYCSHVTARLLIHDMGIRPEVVRPLEVGVPVVISGVRVTPLDANHCPGSVMFLFEVPVPTAGRQQAAAGADAAGICGGGGGAAAAAEAAAIGVKAEAVNGVEAGALVADEAGMGTAAGMQHVAGQQAADEHIKREVEEEENCSCQGGGNEDEETGELSRGAELEAGCQQLAALAAAAAAGGTQHRSKAAGATSEARQEELTQTGDGDSAPAVEGAGSPSARVPGTAGASGSASMGGCSGGMATHNILHTGDMRWQRWMRDQPGLAGVRVDTLYLDTTYALPRHRLPPQTEAIAMMVQAMREAVAEEPATLFVVAAYHIGKERAFLGAAQQLGAKVWAAPDKRKVLALLDLAPEQAALLEERPEAADIHVGGWGLKHEELQAYLASHKGSRWKRVVGIRPTGWTFRRKGGVSVWREGEVSILGVPYSEHSSWTDLCDAVSQLRPQRVVPTVNAATPAHRRSLVDRFAHLMDLSTDRSRLDVYLSRAAEAARVKIEAGDTLASDAAAAASHAGSATAAAAAAVCRVDLAAVDVGEQERILAQVQEQHRRRQEMQQRRTQLQQAQQQRRQAVQQAGKGKGRKRDRAEDGRPAEEAEGGALSGRCSGDDEEAAAGTANGRQLLQRRRQSSVRRSSCGPAATGTCMVDLTIDDETDEDEQKQQVQEPSPSRNEQSGTASKVAHTAIEDGGAQAAGAEHGSIRRFLEKRAGRKE

SEQ ID NO: 11126 - protein, 362 aa, Coprinopsis cinerea okayama7#130
MILWILFLNALLTLSTFFRPAPGLFAAFVLFNGAAQAAAGGYLQTSIIAVASLFGPPAVQAMIAGQAAVAVVVSGVQVISSATSIGRSQKTDASGDGSAEERSAFIFFALSTLFLVGSYVAHEWLVRTPIYDRVAGTLERGAHKISLGAEEGRPLNRSLSRARSEVAEEASNVIRVAKANALYEIAVAAVFMITLSVFPPVTISVSPTNPDFHPLLFASIHFLVFNVGDFIGRWMCSFRFMVIWSAKALLSLSFARILFIPLFLMCNIQRPSAVAKIDPPVNSDFVFMLLMLAFGWTNGYVSSLCMMAAPSVEHNPRLKGRMADVDVAATVASFCLVGGLALGSISSFAVRAAICNCNPFTT

SEQ ID NO: 11127 - protein, 538 aa, Triticum aestivum
MGYQVVAAQLARLSGALGTSDHASVVSITLFVALLCACIVLGHLLEENRWLNESITALIIGLCTGVVILMTTKGKSSHVLVFSEDLFFIYLLPPIIFNAGFQVKKKQFFRNFMAITLFGAVGTMMSFFTISLAAIAIFSRMNIGTLDVSDFLAIGAIFSATDSVCTLQVLNQDETPFLYSLVFGEGVVNDATSVVLFNALQNFDPNQIDAIVILKFLGNFCYLFVSSTFLGVFTGLLSAYVIKKLYIGRHSTDREVALVMLMAYLSYMLAELLDLSGILTVFFCGIVMSHYTWHNVTESSRVTTKHAFATLSFIAETFLFLYVGMDALDIEKWKFASDSPGKSIGISSILLGLVLVGRAAFVFPLSFLSNLTKKTELEKISWRQQIVIWWAGLMRGAVSIALAYNKFTRSGHTQLHGNAIMITSTITVVLFSTMLFGILTKPLIRFLLPASSNGAASDPASPKSLHSPLLTSQLGSDLEAPLPIVRPSSLRMLITKPTHTIHYYWRKFDDALMRPMFGGRGFVPYSPGSPTDPNVLVE

SEQ ID NO: 11128 - protein, 508 aa, Cyanobium sp. PCC 7001
MLTPVQVRLLLVSAALSSAVGLVLQLLLVTQASYLAGDAALATGVVVGTFLAAMGLGAWLSQFVAAGAGAQASLLRAFVLVELCLSPLCLFGPLALFSLFAADGPLWLALVLLTLAVGGLGGMELPLLTRLLEGQEQLRRALAQVLALDYLGALLGSLAFPLLLLPWLGLLPTAALLALVPLLCSGALCWGFPGLRRWRWPVAAALPLAGVAALLVAPLGDRVEDGLYDDPVIGRLQTRHQRIVLTRRRDDLRLYLDGNLQFSSLDEYRYHEALVHPAMALHGRPRRVLLLGAGDGLALREILRWPDLERVDLVELDPAMLRLARRHPLLRRLNGSSLDDPRVHVHLGDALALVPGLAGRYDVIIADFPDPATPALARLYSLGFYGRLLGRLAPGGLVVTQASTPFFTPRVLASIQATFEALGLDTRPYSVTVPSFGPWGFVLAHRPTLTLAAGDLPFQARWLDRAQLRHLFDLPRDLRPGPGERVEPNRLVRPVLVDYQRQSRWRSN

SEQ ID NO: 11129 - protein, 532 aa, Xylella fastidiosa Ann-1
MRIKTGIKKAFILMLSVVLVSLVAIAVVAAHQFYIRLPQSRLFYAWKKVDEVYYDRTFAGFDWPAVLATYKKQLPRFDSDGQKTSPIINDMLSLLEVSHLQHFPAFLVPEEKKKTAVLASYFPELRDISGMVMVMDMLPRISRVLSLETWSPLYTHGVRVGDRILLETLDTDISDKNKPVRLYCYHINTAGVKKEFEFDLPAPPLGAQQTAVPAGDHVLHIARFDQGEIQALKHVSEDRNSSITQLHYISLGAVTTALHLPKNKVIDVVKDSEADKAGVEIGSFIGNGTNIKAGPENIGGKKVIKTDSRYEVVLPDGRKVTFSINKIIPKLNDIEGIRSAQLIGKTLVITFNEMSDENTQWALQQIKNTPATAIVLDLRYNTGGSGIAGEKLLAGFLASGTRIATEIRGKKTNEINVPAGYTPTDKPTAVLISLLSASGAELAARTLQFHHRARIYGAQSSGQVLTSRFYKLTDGTYMQIADTNLLDPAGKPIEWYGVMPDVKKWKTLSDVRAGRDPVLECALTDLSGGRCH

SEQ ID NO: 11130 - protein, 140 aa, Mesembryanthemum crystallinum
KKQFFRNFITIIVFGALGTLVSFTIISLGAMEFFKKLDIGSLELGDYLAIGAIFAATDSVCTLQVLHQDETPLLYSLVFGEGVVNDATSVVLFNAIQNFDLTHIDHRIAFKFAGNFLYLFFTSTLLGAITGLLSAYIIKK

SEQ ID NO: 11131 - protein, 241 aa, Oryza sativa Japonica Group
MASTTTTTAAAAARFTCLAPATRPASASASAGRFLLPARQWGAATTHGSAAVPVVAAPSRRWAPGVAYATAATGKSVHDFTVKVVAFRALDIDGKDVALSKFKGRALLIVNVASQCGLTTANYTELSHLYEKYKTQGFEILAFPCNQFGAQEPGSNPQIKQFACTRFKAEFPIFDKVDVNGPNTAPIYKFLKSSAGGFLGDLVKWNFEKFLVDKTGKVVERYPPTTSPFQIEKDIQKLLAA

SEQ ID NO: 11132 - protein, 452 aa, Frankia sp. CcI3
MDKQQEFVLRTLEERDIRFVRLWFTDVLGYLKSVEIAPAELEGALAEGIGFDGSAIEGFARVHEADMLARPDPSTFQVLPWRGEHPLTARMFCDLVMPDGTPAAADSRWVLRSALARAADAGFTFYTHPEIEFFLLREPPKRGGPVPPPVDESGYFDLTPNDISHDFRQQAISMLERLGISVEFSHHEVAPGQQEIDLRYADALTIADNIMTFRQVVREVALRQGIYATFMPKPFGNQAGSGMHTHLSLFEGDRNAFHDPTDDYQLSKVAKAFIAGLLAHAAEITAVTNQWVNSYKRLIGDQRVGEVLEAPAYVCWGHNNRSALVRVPLYKLHKSNATRVEFRLPDSACNPYLTFALVLAAGLRGVQGGYELPPASADDVWTLTDTQRRERGITALPGSLAEAVKVMEHSALVRETLGDELFDFFLRNKRAEWLEYRRQVTPFEIDRYLPVL

SEQ ID NO: 11133 - protein, 478 aa, Rhodococcus sp. RHA1
MAFTTAEEVIKFIKDENVEYVDIRFSDLPGVQQHFSIPASAFNQDVFEDGLAFDGSSVRGFQSIHESDMMLLPDVATAQLDPFRAAKTLNINFFVHDPFTRESYSRDPRNVARKAEEYLKSTGIADTAFFGAEAEFYIFDSVRYDSGINGAFYELDSISGSWNTGNDVNADGSPNLGYKVRPKGGYFPVAPYDHYVDLRDEISTNLQNAGFELERGHHEVGTGGQQEINYKFNTLLAAADDLQLFKYIVKNTAWQHGKSATFMPKPLFGDNGSGMHVHQSLWKDGKPLFHDEAGYAGLSDMARHYIGGILHHAPSLLAFTNPTINSYHRLVPGYEAPINLVYSQRNRSAAVRIPITGNNPKAKRLEFRAPDSSGNPYLNFAAQMMAGLDGIKNKIEPQAPVDKDLYELPPEEARNIPQAPTSLSAVIDRLEADHDYLTEGGVFTSDLIETWISLKREQEIAPVNLRPHPYEFQLYYDV

SEQ ID NO: 11134 - protein, 159 aa, Exiguobacterium sibiricum 255-15
MNTSLYEIEVQDATGQTVSLNDYAGEVLVIVNTASKCGLVKQLGDLQQLHDKYADQGVKVLGFPCDQFNNQEFADQQETMQFCQRNYGVTFPMFQKIDVNGPAEHRLYTYLKQQQGGLLSSNIKWNFTKFLVDREGRVVKRFAPVDSIQTIEKTLARYV

SEQ ID NO: 11135 - protein, 499 aa, Bacillus cereus G9241
MFKGAGDLKLKELANLLLIKETIGNMDVEITGLEMDSRKITDGDLFICVSGIDGFLEDRHQFVEDAVKNGAVALIVERDVNIEIPKIIVKDARYAMAVIASHFYGYPSNKMKLIGITGTNGKTTTSYLIEKILSDYGYHTGLMGNNGVKVGSKWYSTDINTQEPPTLQRNLQMMKNQNADYCVMEVTSQGLHMERVKGCNFKIAVFTNLTQDHLDYHGTFDEYKHVKSLLFARLGNNLSTIDKKIAVLNADDPSVEYFKKITSAEVITYGIHNGADVQAKNITLSPKGIRFLVSSFNGEIEVSLNLVGRFNVYNALAAITVALVEGIPLTNISDSLSNLKSIEGRMEIIDENQDFLVIVDYAHTPDALENVLSTISEFAKGKIITVFGCGGDRDAKKRSIMGGIAGSYSDFVFITSDNPRSEDPQAIMKDIEKGFSQNNNLNYKVEVDRELAINHAINMASSNDIVLIAGKGHETYQILKDSTIHFDDKEKARQAIINK

SEQ ID NO: 11136 - protein, 914 aa, Pseudomonas syringae pv. syringae B728a
MSSILEKVLAAAWTDLFHERTLERGRDYARQKRIVLEDSSPQIIRTACRGSGLEIYTQTLLFKDPDRYKNYLTCKCTCPVRNDCKHCVAALLFLQDPHNRPLLQAALASHQQEMEKPVEQKPRLPERLIDDLQPRPRLILASIEFSAYEPRNGRMQRHIQHRAALAFAYGKHYAVGTTNVSILVSSLGSDLVNQKSDIIEHTDTETLRIRRQGERERQLRQELADLGFKVATRQSKALPDSAGDMYELPNDKAWLHFVLDDLPRLREQGWEIDIQEEFGFDVTPVEDWYAVIDEENERDWFDLELGIIVNGERLSLLPILINLIRSHPELMSPSAVAKRGDEEQLLVQLNHFTQSGGSPVQIALPYGRLKPVLATLGDFYWRQEGNNALRMSKADAARLTQLEDLPLTWQGGDRLRHFAERLINIKDAPVSLPDGLNATLRPYQLEGLSWMQSLRELEVGGVLADDMGLGKTLQTLAHLLMEKQAGRLDRPALAVMPTSLIPNWLDESEHFTPDLKVLALYGANRHQDAGNLQDYDLILTTYALLPRDLELLEKQPFHVLILDEAQYIKNPNSKAAQAARNLNARQRLCLSGTPLENHLGELWSLFHFLMPGWLGNSKEFNSNYRTAIEKHGNQDRLHHLNARIKPFLLRRTKEQVATELPPKTEIIHWVDLNDAQRDVYETVRLAMDKKVRDEITRKGVARSQIIILEALLKLRQVCCDLRLVNQDMPVNSKQGTSGKLNSLMEMFEELLAEGRKILLFSQFTSMLSLIEEELKQRGIAYALLTGSTRDRRTPIHDFQSGKLPIFLISLKAGGTGLNLTAADTVIHYDPWWNPAAENQATDRAYRIGQDKPVFVYKMIARGTVEEKIQRLQREKSALASGVLDGRTTGDWKLRDEDLQALFAPLPAAPKKTRK

SEQ ID NO: 11137 - protein, 491 aa, Shewanella oneidensis MR-1
MLLRELLAPWFPYAGEQTFLDLTLDSRAIRRGDVFLALPGHKVDGRQFIDKALAQGATAVLVHTDNPQEQGKVIVAEQGVQIYFYELAKHVSAVAAVRYPVIQGHAMGIVGITGTNGKTSTSQLCAQLVTLLSGKAAVMGTLGNGLWGELVDSGNTTADAITLMRQLHEFANKGVNTCAMEVSSHGLVQGRVDAVPFDVAVFTNLTRDHLDYHGDMENYAAAKQMLFRFDSLRHGLLNLDDPIGGAWLAELKNVPAKIWGFSIEAHKAAAFYTKNVRFNDQGVQATLVWPEGEIDISSPLLGAFNLSNLLAALSALYLQGMDMRALAAKVPYLVPVAGRMERFTTADNITLVVDYAHTPDAIEQALNALRRHCAGVLWCVFGCGGDRDKGKRPLMGQAAEQFADRIMVTSDNARSEDPNQIITDIIQGLTHPERALTEVDRVAAIKQVVAQAKSGDVILLAGKGHETYQEAAGVRHDYDERALARQLSEQS

SEQ ID NO: 11138 - protein, 581 aa, Pseudomonas putida GB-1
MKAHEIAYGQRLLRGQAPSYERLQARLAGDGSQPHDQPRAVHCGWGRLLIGHTYPDPVSLAEDLLDECPGERDIALYVAAPQQLLAQAPQQLFLDPSDTLRLWFTDYRPAQRVFRGFRVRRAQNPADWQAINTLYQARSMLPVDAELLTPRHLGGPVYWLAEDEDSGAVIGSVMGLNHAKAFDDPEHGSSLWCLAVDPHCTRPGVGEVLVRHLIEHFMSRGLAYLDLSVLHDNRQAKRLYQKLGFRNLPTFAVKRKNGINEQLFLGPGPQADLNPYARIIVDEALRRGIEVQVDDAAGGLFTLSLGGRRIRCRESLSDLTSAVTMTLCQDKRLTQHALHNAGLQVPAQQLAGNADDNLAFLDEHGAVVVKPVDGEQGQGVAVNLTCIDDITRAVAHARQFDSRVLLESFHAGFDLRIVVIGYEVVAAAIRHPAQVLGDGKHSVRQLIEAQSRRRQAATSGESRIPLDDETERTLRAAGLGYDDVLPAGQRLAVRRTANLHTGGTLEDVTERLHPVLADAAVRAARALEIPVVGLDFMVRDAGQPEYVIIEANERAGLANHEPQPTAERFIDLLFPHSRPLA

SEQ ID NO: 11139 - protein, 524 aa, Solibacter usitatus Ellin6076
MKIRTSLQLALIVGGCTVLAPLYGPAISASAATTQDDLDKNIKSLAGALSILEDNYADKISSEKAIYQGAIPGMLRTLDPHSNFLDPSEYQDMQRKQRAQYFGIGMLISMDGPKVIAMEPFPGSPAWRADLRRGDVIVAVDGNDVTKKDSSAVADLLRGPRGSQVRVSVMREGAPAPVTVTVTRGEIETSLVDAFWIKPGIAFLKVTSFEAQNVARDVEAAMQKLGEANVKGLILDLRENRGGLVTEAVSLAGRFLRDGQVVVSHRGRAEKEQVFRANKANPAAQKYPIVVLVNGNSASASEIVSGALQDHDRALIMGETTFGKGLVQAQFPLSEGALLLTIAHYYTPSGRLIQRDYSKGSFFDYYYARKPIQNSDDIKATDTGRKMYGGGGITPDEKYDPEKSTMFERRVFSSSIIYRFANSYFGAAKPSLPANWTPDADLLSRFKDYLHTKNVAFTDAEFNRDKKWITEQIRDEFYLRAFDKKTSDRAQFLDDPEVHQAVESLPKAEAMHAEAQKVMAARRQ

SEQ ID NO: 11140 - protein, 236 aa, Triticum aestivum
  misc_feature (48)..(48): Xaa can be any naturally occurring amino acid
  misc_feature (138)..(138): Xaa can be any naturally occurring amino acid
  misc_feature (158)..(158): Xaa can be any naturally occurring amino acid
  misc_feature (177)..(177): Xaa can be any naturally occurring amino acid
NRPRLESSKLDTLEEAANEKEVTVCNHEIQIHEDLGHVCRVCGMIVRXRADTIIDYQWRKASRSRSYFSEKRSKDSDEIVTADVRVPEELNALGIAIHPRHEKQMRPHQLAGFHFLVKNLVSDKPGGYILAHAPGSGXTFMLISFIQSFLAKYPSGRXLVVLPKGILGTWKREFQRXQVEDIQLYDLCSVKCDRADQLEILNTWQANRSILLVGYTQFSWIINIDGGVTVAKKKKK

SEQ ID NO: 11141 - protein, 168 aa, Xylella fastidiosa Temecula1
MSSIYTFTFTRLDGRPQALADWRGQVLLLVNVASRCGFTPQYAGLEMLWQRYRDAGLIVIGFPCDQFAGQEPGDEAKIAEFCTLTYGVDFPMAAKIKVNGADAHPLWQWLKHRRRGLFGVAAIKWNFTKFLIGRNGQPIARYSPIKSPEQLEVHIVRALGEEGGGNTH

SEQ ID NO: 11142 - protein, 445 aa, Bifidobacterium longum DJO10A
MDKQQEFALRTVEERDVRFIRLWFTDVLGTLKSVAIAPAELEAAFEEGLGFDGSAIEGMTRVSEDDMIVQPDPSTFQILPWRGGPQGTARMFCDILTPDGEPSLGDPRHVLKRTLAKAKDKGFTFYVHPEIEFYLFESQDDWSKAPTPIDEGGYFDHVPRSPGMDFRRATVNMLEQMGISVEYSHHEAGPGQNEIDLRYADALTMADNIMTFRTVVKEISLERGIHASFMPKPLADAPGSGMHTHLSLFEGDSNAFYEAGQEFNMSLTARQFAAGILYHAAEICAVTDQYVNSYKRLWGGNEAPSYICWGHNNRSALLRIPQYKPGKGNSARMEFRALDPVANPYLAYSVLLAAGLDGIDKQMQLGEPTSDDVWELTDGERQAMGIQPLPRSLDEALKIMEKSDFVADVLGEHAFGYFLDNKHQEWEEYNQQVTPYELKKYLPKL

SEQ ID NO: 11143 - protein, 617 aa, Propionibacterium acnes KPA171202
MARSVGIDLGTTNSCVAVLEGGEPTVIPNAEGARTTPSVVAFTNSGETLVGEVAKRQAVTNVDRTVRSVKRHMGEAWTMGVDDKTYKPQQISAFILQKLKRDAEAYLGEPVTNAVITVPAYFSDAQRQATKEAGEIAGLAVDRIVNEPTAAALAYGLDKTDKDQTVLVFDLGGGTFDVSLLDISDGVFEVKATNGDNHLGGDDWDQRIVDWLVTQFKNANGIDLAADKMAKQRLQEAAERAKIELSQASETHINLPYITAGAAGPLHLDEKLTRAEFQRMTSDLLERCRTPFNAVMKDAGLNVSQIDEVILVGGSTRMPAVAELVKELAGKDPHKGVNPDEVVALGASLQAGVLKGEVKDVLLLDVTPLSLGIETKGGVMTKIIERNTTIPTKRSEVFTTAEDNQPSVMIQVFQGEREFVRDNKSLGNFELTGLMPAPRGIPQIEVSFDIDANGIVHVHAKDMATGKEQSMTVTGGSALGKDEIDRMVKEAEANAEADKKRREAVEMRNEADALAFRTEKLLDENSDKIPEDTKTPVTEAIATLKETLKGTDNDDEVKAAMDDLNQKASAMGQAIYAAAQQAQAENPQGQDAESASSESGDDTVVDAEIVDDEDEKK

SEQ ID NO: 11144 - protein, 323 aa, Oryza sativa
MEAEAAAKRARESGDAAAAGAGEQAGISAVIPGWFSEISPMWPGEAHSLKVEKVLFQGKSDYQNVMVFQSSTYGKVLVLDGVIQVTERDECAYQEMITHLPLCSIKDPKKVLVIGGGDGGVLREVSRHSSVEQIDICEIDKMVVDVSKQFFPHLAVGFEDPRVSLHIGDGVAFLKNAPEGTYDAVIVDSSDPIGPAQELFEKPFFQSVARALRPGGVVCTQAESIWLHMHIIEDIVANCRQVFKGSVNYAWTTVPTYPSGVIGFMLCSTEGPTVDFQHPIFNIEDNEFSTKSKGPLKFYNSEIHSASFCLPSFAKRVIGSKAN

SEQ ID NO: 11145 - protein, 469 aa, Vibrio sp. Ex25
MSVENVLSLIQENEVKFVDLRFTDTKGKEQHISIPAHQIDADFFEEGKMFDGSSVAGWKGINESDMVMMPDASSAVLDPFTEDATLNIRCDILEPATMQGYDRDPRSIAKRAEDFMRSTGVADTVLIGPEPEFFLFDDVKFATDMSGSFFKIDDVEAAWNTGSDYEEGNKGHRPGVKGGYFPVAPVDSSQDIRSAMCLVMEEMGLVVEAHHHEVATAGQNEIATRFNTLTTKADEIQIYKYVVHNVAHAFGKTATFMPKPLVGDNGSGMHVHQSLAKDGVNLFAGDKYGGLSEMALYYIGGIIKHARAINAFANPSTNSYKRLVPGFEAPVMLAYSARNRSASIRIPVVPSPKARRIEVRFGDPAANPYLCFASMLMAGLDGIKNKIHPGEAMDKDLYDLPAEEAAEIPTVAYSLKDALAELDADREFLTAGGVFSDDFIDSYIELKSQDVERVNMTTHPVEFELYYSV

SEQ ID NO: 11146 - protein, 162 aa, Triticum aestivum
  misc_feature (117)..(117): Xaa can be any naturally occurring amino acid
  misc_feature (119)..(119): Xaa can be any naturally occurring amino acid
  misc_feature (141)..(141): Xaa can be any naturally occurring amino acid
MSDSPQSPPKEVDQGAPSPDDEAQMNEQQDPQSANAAGYEFEGVKEQDRWLPIANVARIMKNALPDNAKIAKEAKECMQECVSEFISFITSEASEKCQQEKRKTVNGEDILFAMTSXLXFENYAEALKVYLSKYREQQNQXHRERVNMDNGQWGSGTMMGDA

SEQ ID NO: 11147 - protein, 191 aa, Cryptococcus neoformans var. neoformans B-3501A; identical to SEQ ID NO: 1039

SEQ ID NO: 11148 - protein, 449 aa, Desulfovibrio desulfuricans subsp. desulfuricans str. G20
MSTNYPVFNCKNGDDVIRAVKDYNVSFVQFWFVDILGNLKSFQVTPDELEAAFEEGMGFDGSSILGFTRIEESDMIAFPDASSFQICSWRPMDRPVARMFCDIRTPDGNPYEGDPRYVLRRLVDKAAQKGYTYYVGPELEFFLFADSTCPRPLDSGGYFDAPPLDLGNEVRRDIIFALQKMGIDVEYSHHEVAPSQHEIDLRYNEALKMADIAMTYKVVVKEIARKHGVYATFMPKPIFGENGSGMHVHQSLFKNGKNAFFDANDPHHLSAEARHYIAGLLTHASEITCITNQWVNSYKRLVPGYEAPVYIAWAQRNRSSLIRVPMYKPGKEAATRIELRNPDPACNPYLAFAAMLGAGLEGIEKGYEVPRAVEENIFAMEAEDLSAKGIDSLPGSLYEAAVALRDSALMKEVLGEHTHQNLVGNKLIEWDAYRTHVSEFELKRYLPVL

SEQ ID NO: 11149 - protein, 444 aa, Bacillus sp. SG-1
MAKFTREDILEMADKENVKFIRLQFTDILGTIKNVEIPVSQLGKALDNEMMFDGSSIEGFVRIEESDMKLYPDYDTWVVFPWTAEKGKVARLICDIYNPDGTPFEGDPRNNLKRVLKEMEELGFTDFNLGPEPEFFLFKLDVEGQPTLELNDNGGYFDLAPTDLGENCRRDIVLELEEMGFEIEASHHEVAPGQHEIDFKYASALKACDDIQTFKLVVKTIARKHGLHATFMPKPLFGVNGSGMHCNMSLFKDGKNSFFDENGELQLSETARQFLAGTIKHATGFTAITNPTVNSYKRLVPGYEAPCYVAWSAQNRSPLIRIPASRGMSTRVEVRSVDPAANPYLAMAVLLAAGLDGIKNEMKAPKPVDRNIYVMNKQEREEEGIEDLPATLFNALEALKKDEVMIKALGGHIFEHFIEAKEIEWDMFRTQVHPWEREQYLQMY

SEQ ID NO: 11150 - protein, 256 aa, Physcomitrella patens subsp. patens
MVMAKVEVGAAPSLNVAERADGRSASQLRPLSLSRGLLTRAHGSATWSQENTTVLAAVYGPKPAAMKKENAERAIIEVVWRAKSGLSGSYEKDAEVVVRRSLEYIILTALHPNTAISVILQVINDDGSLLACAMNAACAALVDAGIPLNGLLSAVSCGVTHDGQVFLDPTKPEEQKCKAYVSFVFPSRRLSAVPELPADVDGEPVEYGILTSVTRGAMEVEEYFSCVENCRAAAAKVSEFSRSSIEQSLKGNRDGC

SEQ ID NO: 11151 - protein, 206 aa, Oryza sativa
MESRKPPPSALVDNHVVPGDVVLDLTEMTNQTIKLGAGLRQDCDTIQATSAGRLRLSKPNKYWVESSQKRYIPSVEDTVLGVVVDTKPDNFLVDIKGPNLAFLPVLAFEGGTRRNIPKFEIGTLIYARVVKANSIMNPELSCMDATGKAAEFGQLKDGYMFDTSTGLSRIIFEWHRATKYGGKSLGETILMVAVDECTHKQVHERS

SEQ ID NO: 11152 - protein, 256 aa, Triticum aestivum
LHSGTPPPAPPHVSVQTAHRADEARLASRLQTFLSSPLSPTPPLQIPADCQAAESLVRPRFQVKKKQFLRNFATIILFGAAGTLISFVIITFGAMGLFSKLDVGPLELGDYLAIGAIFSATDSVCTLQVLNQDEAPLLYSLVFGEGVVNDATSVVLFNAIQNIDINHFDVFVLLQFIGKFLYLFFTSTVLGVAAGLLSAYIIKKLCFARHSTDREVAIMILMAYLSYMLSMLLDLSGILTVFFCGIVMSHYTWHNV

SEQ ID NO: 11153 - protein, 453 aa, Streptomyces coelicolor A3(2)
MDKQQEFVIRTLEERDIRFVRLWFTDVLGFLKSVAVAPAELEQAFDEGIGFDGSAIEGFARVYESDMIAKPDPSTFQVLPWRAEAPGTARMFCDILMPDGSPSFADPRYVLKRALARTSDLGFTFYTHPEIEFFLLKDKPVDGSVPTPADNSGYFDHTPQNIGMDFRRQAITMLESMGISVEFSHHEGAPGQQEIDLRYADALSTADNVMTFRLVMKQVALEQGLQATFMPKPFSEYPGSGMHTHLSLFEGDRNAFYESGAEYQLSKVGRSFIAGLLRHAAEISAVTNQWVNSYKRIWGGTERTAGAGGEAPSYICWGHNNRSALVRVPMYKPGKTGSARVEVRSIDSGANPYLTYAVLLAAGLKGIEEGYELPPGAEDDVWALSDAERRALGIEPLPQNLGEALALMERSDLVAETLGEHVFDFFLRNKRQEWEEYRSQVTAFELRKSLPVL

SEQ ID NO: 11154 - protein, 430 aa, Zea mays
MIQLIDHAIGAIFSATDSVCTLQVLNQDETPLLYSLVFGEGVVNDATSVVLFNAIENLDIDNFDAIVLLNFVGKFLYLFFTSTILGVATGLLSAYIIKKLCFARHSTDREVSIMILMAYLSYMISMLLDLSGILTVFFCGIVMSHYTWHNVTESSRVTTKHTFATLSFIAEIFLFLYVGMDALDIEKWKLASSSWADVMSVQQQQSLLVPNKLGPKKPIALSAIILGLVMVGRAAFVFPLSFLSNLSKKEARPKISFKQQVSARSLFFFFHSSAIVSLWKPERAKLLFTASGHTEVRVNAIMITSTVIVVLFSTMVFGLLTKPLLSLLIPPRTGLNTSSLLSSQSMLDPLLTSMMGSDFDVGQINSPQYNLQFILTAPARSVHRLWRKFDDRFMRPVFGGRGFVPFVPGSPVERSVPESHLGTVTEAERS

SEQ ID NO: 11155 - protein, 407 aa, Zea mays
DCCILSQDFFCTPDYITPEMPQVANEFDDDDKENIPCPKSPEKSANPRSKRYRTDCSPKARDDHQITPVLFDSLTRDDSEEEQPKQPALEKRGGYVSQSAVALRCRVMPPPCVKNPYLNTDPCIDAAVYGGRQCNSAVFSPSIGGNGLSRYRTDFHEIEKIGYGNFSVVFKVLNRIDGCLYAVKRSIKQLHNDMERRQAVKEVQAMAALGSHENIVRYFTSWFENEQLYIQMELCDRCLSMNRNQPVKRGEALELLYQICKGLDFMHERGIAHLDVKPDNIYVRNGIYKLGDFGCATLVNRSLAIEDGDSRYMPPEMLNDKYEHLDKVDIFSLGAAVYELIRGTPLPESGSHFASIREGKIALLPGCPMQFQSLIKSMMDPDPVRRPSAKEILRHPSFDKLHKASSK

SEQ ID NO: 11156 - protein, 471 aa, Zea mays
  misc_feature (452)..(452): Xaa can be any naturally occurring amino acid
DAWVKGGVLLIGYSSFRNLSLGKHVKDKNSANEITYALQCGPDILVCDEAHMIKNRRADITQALKQVRTQRRIALTGSPLQNNLMEYYCMVDFVREGFLGSTHEFRNRFQNPIENGQHTNSTSDDVKIMNQRSHILFEQLKGFVQRKSMNVVKNDLPPKKVFVITVKLSQLQRKLYKRFLDVHGFSSSGYSEKSHRSFFAKYQTLSQVWNHPGLLQMAKEQRGNLRREDAVENFMMDESSSDDNVENYLPNGEKQKDKADQQSKKSNIIMNEESNWWEELLDENTYMNADYSGKMTLLLDILSKSSELGDKVLVFSQSLTTLDLVEFYLAKLQINGKEGKHWKRGKDWYRLDGSTPSSDRQNLVEMFNDLENTRVKCTLISTRAGSLGINLHAANRVVLLDGSWNPTHDLQAIYRVWRYGQTKPVYAYPLMAHQTMEEKIYKRQVTKEGLAXRVVDRQQVSRTTSKKRCLI

SEQ ID NO: 11157 - protein, 684 aa, Enterococcus faecalis V583
MEFTFLIIVFALSITFSNIFNRIVPVIPLPIVQIIVGVLIGLTKMGQEIEFEPEVFLVMIIAPLLFREGELINLKAMMKNFGMILFLAFFGVLITLVGVGWTLHMILPTLPLAACFAFGAALGPTDAVAVGSLSGRIDIPERSMNILSGEGLINDASGVTAFQFALAALLTGSFSPVEAAGTLVISSIGGAVVGIVLVLLKQQIVHLLETAVAKDVTGYLLIELLLPFIAYLISELIGVSGIIAAVIAGIMQASSLKKVSLFEAELSNVGESIWSLIEFTLNALVFLFLGIELSQVFSPIWIDQQYSNWFLLLVVLIISAVVFLIRFLAIFSVYTLQHGLKKVKNAMNEMLILTFGGVKGTVSLATIFILPTAINGEHFKERPLLLFITACVILVTLIGGILVLPFLTDSETEVENEESVEIDLLRDVIDVLKQQNEENPRGEMNAVIENYQDRLKELYTEQLSAERKQEVQELRTLIVSIERDGLEESLKQGEISVRSYRMYQRLITRMQRSIAKQLLSIVGFWLLFARQIISILLHPKLFFNRGEASEEEKELRNEELENIRQVFLRNSQVILKSLDNLRGVYDDDLIDFFIDGRLDLAHKFEKGEFIDSYIVHTETDYVKDLLLGFQEERRMIDHYEQSERISIIEANELRKNVNLLESYSISGEVNNVPLKRFVKNFNKE

SEQ ID NO: 11158 - protein, 446 aa, Rhodococcus sp. RHA1
MDRQKEFVLRTLEERDIRFVRLWFTDVLGYLKSVAIAPAELEGAFEEGIGFDGSAIEGFSRVSEADTVAKPDASTFQVLPWSSSKGHQHSARMFCDIAMPDGSPSWADSRHVLRRQLNKASDLGFSCYVHPEIEFFLLENGPIDGTPPKPADSGGYFDQAVHDSAPNFRRHAIDALESMGISVEFSHHEAAPGQQEIDLRYADALSMADNVMTFRYVVKEVAIAEGVRATFMPKPFSDQAGSAMHTHMSLFEGDTNAFHNPDDPMQLSETGKAFIAGILEHANEISAVTNQWVNSYKRLIHGGEAPTAASWGPSNRSALVRVPMYTPNKASSRRVEIRSPDSACNPYLTFAVLLAAGLRGIEKGYELPPEAEDDVWALTSAERRAMGYRELPGNLDGALREMEKSELVAEALGEHVFDFFLRNKRREWEEYRSHVTPFELKTYLGL

SEQ ID NO: 11159 - protein, 279 aa, Brassica napus
ARFELELLLKNIEKYRVTQLWVVPPVFLALAKQSVVKKYDLSSLKYIGSGAAPLGKDLMEECGKNIPNVVLMQGYGMTETCGIVSVEDPRLGKRNSGSAGMLAPGIEAQIVSVESGKPQPPNQQGEIWVRGPNMMKGYFNNPQATKETIDRKGWVHTGDLGYFNEDGNLFVVDRLKELIKYKGFQVAPAELEGLLVSHPEILDAVVIPLPDEEAGEVPIAFVVRSPNSSITEEDIQKFIAKQVAPYKRLRRVSFISTVPKSAAGKILRRELVQQVRSKM

SEQ ID NO: 11160 - protein, 1111 aa, Magnaporthe grisea 70-15
MPRASRASAAADTDASMVDAAPESAKRRGDEMEVDETPDYTDSDTNPNTTASSVAGDLTVDGRKRRTEANQLRRSIFGRKHDRLGESKEDDTLRRFRYLLGLTDLFRHFIETNPDPNIRNIMEKIDAQNQEATKGKKGASRQGGASSGRVRRTEAEEDAELLKDEKHGGSAETVFRESPAFIQGTMRDYQIAGLNWLISLHENGISGILADEMGLGKTLQTISFLGYLRHIMGITGPHLVIVPKSTLDNWKREFGKWTPEVNVLVLQGAKEERAALIAERLVDESFDVCITSYEMILREKSHLKKFAWEYIIIDEAHRIKNEESSLAQVIRLFNSRNRLLITGTPLQNNIHELWALLNFLLPDVFGDSEAFDQWFSGEGQDSDTVVQQLHRVLRPFLLRRVKADVEKSLLPKKEVNLYLKMTEMQRTWYQKILEKDIDAVNGANGKRESKTRLLNIVMQLRKCCNHPYLFEGAEPGPPYTTDEHLVYNSGKMVVLDKLLKRLKAQGSRVLIFSQMSRVLDILEDYCVFREYKYSRIDGGTAHEDRIAAIDEYNKPGSEKFVFLLTTRAGGLGINLTTADIVILFDSDWNPQADLQAMDRAHRIGQTKQVYVYRFLVDNTIEEKVLERAAQKLHLDRLVIQQGRAQVAAKAAANKDELLSMIQHGAAKVFNKDSDGDVVKSADDIQDDDIEAMLASGESRTRELNARYEKLGIDDLQKFSSESAYDWNGENFALVNKSKDIGANWINPAKRERKEQTYSVDKYYRQAIYGHTGQPKEVKPKAPRPPKQDRETAFYRKEIGYKVPLPDGDDATLSDREAEQALDQQEIDNATPLTEEEQQRKQELSEEGFSEWNRRDFQQFVNGCHKFGRNDFEGIATEVVGKTAAEIKAYSKVFWQRYTEIADYHKYIKTIEDGEEKLRKIEHQRKMLRKKMSQYRVPLQQLKINYSVSTTNKKVYTEEEDRFLLVQLDKHGIDSDGIFETIRDEIRDSALFRFDWFFLSRTPTELSRRATTLLTTIVKEFDDMNTTKGTNGTANGRAKRDVDDEENDEDSILGMAPPKKKAKNGVKNKTLDNVKSTTASKNNSAAPSRASSVNSNTSPAPPAKSKAKGKKK

SEQ ID NO: 11161 - protein, 435 aa, Ruminococcus albus 8
MKYTEREVLQFVEENDVKFIKLMFCDIFGALKSVSVPASELSGIFAKGLLFDASKLSGFMNFSSTDLILFPDPDTLALLPWRPQQGRVVRFFCTIKYTDGTVFEGDGRTFLRNAVEYARGKGYNFQIGTSCEFYVFEKNDNGHITKIPHDYAGYCDIAPADKGENLRRDICLTLEQMDIYPESSRHESGPGQNEIDFQYSNALNAADNLVTFKNVVKSVADRNGLYATFMPKPLCDRPGSGLHIMLFCMKGTENIFKPRLDELGHEAKSMIAGILERVREITLFLNSTASSYSRLGNSRAPKYITWSHENFAQLIRVPMINTDENAMILRSPDNTCNPYFALGLIIYAALEGALSGAELCSATNLSPDNIAELTERLPATLDEAIEAARSSSFLADRLPENLIEHVLNEKSREAKEYAECEDKEMFETVRYFYTL

SEQ ID NO: 11162 - protein, 232 aa, Brassica napus
MASSSYAPFSAVFSGFAATKPNPPPTCSAFLVPKRRSNSRNLKNGVSLKSWNKHGFQFTSRNLSVYARATEEKTVHDFTVKDISGKDVSLDKFKGKPLLIVNVASKCGLTSSNYTELSQLYDKYRNQGFEILAFPCNQFGGQEPESNPDIKRFVCTRFKAEFPIFDKVDVNGPSTAPIYQFLKSKSGGFLGDLIKWNFEKFLVDKKGNVVQRYPPTTSPLQIEKDIQKLLVA

SEQ ID NO: 11163 - protein, 500 aa, Oryza sativa Japonica Group
MAGSGRPPAAQKKILQSLRPPLPFAASSRSPFAAPNDYHRFPAGGAAAAAASGSGGIGAGGAGGGGDIEEGLVIRTPTRDADRYGKNLIHAVVGAKQKRKAPEESDVAESSDCMITSPGFAVSPMLTPVSGKAVKTSKSKTKNNKAGPQTPTSNVGSPLNPPTPVGTCRYDSSLGLLTKKFINLLKQAPDGILDLNNAAETLEVQKRRIYDITNVLEGIGLIEKTLKNRIRWKGLDDSGVELDNGLSALQAEVENLSLKEQALDERISDMREKLRGLTEDENNQRWLYVTEDDIKGLPCFQNETLIAIKAPHGTTLEVPDPDEAGDYLQRRYRIVLRSTMGPIDVYLVSQFDEKFEDLGGGATPSGHANVPKHQPTEVFNTTNAGVGQCSNSVAVDNNIQHSQTIPQDPSASHDFGGMTRIIPSDIDTDADYWLISEGDVSITDMWKTALLNMETADVQWDESLDTDVFLSEDVRTPSSHNQQPSAVGGPQMQVSDMHKP

SEQ ID NO: 11164 - protein, 508 aa, Neisseria meningitidis MC58
MNPMYITFAIYLVAVLLIGLAAYFSTRNFDDYILGGRSLGPFVTAMSAGASDMSGWLLMGLPGAIYLSGLNEAWIAIGLLVGAYFNWLLVAGRLRVHTEYANNALTLPDYFFHRFGAGGHLMKVVSALIILFFFTIYCASGIVAGATLFQSLFEGMTYNQAMWLGAGATIAYTFLGGFLAVSWTDTLQASLMIFALILTPVMVYLGLGGAEQMSAAIQSVAAGTGKEYGSLFAGTTVIGIISTAAWGLGYFGQPHILARFMAAESAKSLVSARRIGMTWMALCLAGAVAVGYFGIAYFGANPDKVSSMSGNHERIFIALSTLLFNPWIAGIILSAILAAVMSTLSCQLLVCSSAITEDFYKGFLRKNAQQSELVWVGRLMVLAIAVISILIASDPNSKVLGLVSYAWAGFGAAFGPIVILSVLWKRITAYGALSGMVAGALTVVVWAEWVKKPAQAAGESGLLTMYEIVPGFIVCLIVAVLVSLFNKEPSRETQERFEKADADYRATR

SEQ ID NO: 11165 - protein, 641 aa, Bordetella bronchiseptica RB50
MSKIIGIDLGTTNSCVAVLDGGQVKIIENAEGARTTPSIVAYMDDGETLVGAPAKRQAVTNPKNTLYAVKRLIGRKFDEKAVQKDIDLMPYSIVKADNGDAWVEVRGKKLAPPQVSAEVLRKMKKTAEDYLGEEVTEAVITVPAYFNDSQRQATKDAGRIAGLEVKRIINEPTAAALAFGLDKTEKGDRKIVVYDLGGGTFDVSIIEIADVDGEMQFEVLSTNGDTFLGGEDFDQRIIDYIISEFKKEQGVDLSKDVLALQRLKEAAEKAKIELSSSQQTEINLPYITADASGPKHLNLKITRAKLEALVEELIERTIEPCRVAIKDAGVKVSDIDDVILVGGMTRMPKVQDKVKEFFGREPRKDVNPDEAVAAGAAIQGSVLSGERKDVLLLDVTPLSLGIETLGGVMTKMIQKNTTIPTRYSQTFSTADDNQPAVTIKVFQGEREIAAGNKGLGEFNLEGIPPAPRGLPQIEVTFDIDANGILHVSAKDKGTGKENKITIKANSGLSEDEIQRMVKDAEANAEEDHRLAELAQARNQADALVHATRKSLTEYGEKLEAAEKESIEAAIKDLEDILKTGDKAEIDAKVEALSTASQKLGEKMYADMQAQQQAQQQQAADNAKPVDDNVVDADFKEVKRDQ

SEQ ID NO: 11166 - protein, 160 aa, Bacillus thuringiensis serovar konkukian str. 97-27
MTVYDFSAKTIIGEEKSLKDYEGKVLLIVNVASKCGFTPQYKGLQEVYDKYKEQGLEILGFPCNQFGGQEPGTEVDITSFCELNYGVNFPMFAKIDVKGDKAHPLYTYMTEQAPGLLGMKAVKWNFTKFLIGKDGKVVGRFAPQTKPVDLEVEIEKVLGE

SEQ ID NO: 11167 - protein, 472 aa, Pasteurella multocida subsp. multocida str. Pm70
MSDTTAIANVFKLIEEYDIKFVLLRFTDIKGKEHGVSLPVNLVDEDLFEDGKMFDGSSVEGWKAINKADMLLMPMPETAVVDPFAQIPTLSLRCSIYEPSTMQSYDRDPRSIAIRAENYMRSTGIADEALFGPEPEFFLFDDVRFDVSMNRSSYSVDDIEAAWNTNKKYEDGNNAYRPLKKGGYCAVAPIDSAHDIRSEMCLILEEMGLVIEAHHHEVATAGQNEIATRFNTLTTKADETQIYKYVVQNVAYEHGKTACFMPKPITGDNGSGMHCNMSLSKDGKNVFQGDKYAGLSETALYYIGGIIKHAKALNAFTNPSTNSYKRLVPGFEAPVLLAYSASNRSASIRIPAVTNPKAIRIEARFPDPLANPYLAFAALLMAGLDGIINKIHPGDAMDKNLYDLPPEELQNIPAVASSLEEALNALEQDYEFLTKGNVFTQAFIDAFITIKRKEVERLNMTPHPVEFEMYYA

SEQ ID NO: 11168 - protein, 168 aa, Glycine max
MAGVREQDQYMPIANVIRIMRRILPAHAKISDDAKETIQECVSEYISFITAEANERCQREQRKTVTAEDVLWAMEKLGFDNYAHPLSLYLHRYRESEGEPASVRRASSAMGINNNMVHPPYINSHGFGMFDFDPSSQGFYRDDHNAASGSGGFVAPFDPYANIKRDAL

SEQ ID NO: 11169 - protein, 293 aa, Gloeobacter violaceus PCC 7421
MGSPLGCGWESEGLLVQPLPTIDAHTRALNQGSPLIIIGGAEDKEREKSILKAFLARAGGSEARLLLVPSASSMPEILAEVYRLLFVQLGAASVEVLNITNRFEAELDENVARLHNSTGLFMTGGDQVRLCKLVAGTALARAMQQASTAGRLVIAGTSAGASAMGECMIARGYSGEPPKRNIVELSEGLGLLKDVIVDQHFHNRNRLPRLMTAVASQPHCIGIGIDENTAVVLHGDGILEVIGEGTVTVVDGSELVYNTINDIQSYQPLSVGNFRIAVMAQGLRYNLRERQTL

SEQ ID NO: 11170 - protein, 382 aa, Bacillus sp. SG-1
MIMMKQAVHFGAGNIGRGFIGALFSQSGYHVTFVDIAEQIINKLNEEKQYNVVLATEQKESVTIDNVSGLNNLHQADEVIDTIVNSTYLTTAIGPNILPRIAPLIAQGIAKRVASTDENLFVIACENQIGATDILKEHIMENLDEETKAKLEGRVYFFNSAVDRIVPIQSQDSLDVLVEPYYEWVVETKESIPPVNGMTIVEDLAPFIERKLFTVNTGHAVIAYFGYLQGKETIDKTLADEQIAKQVKETLKETGAYLVKQYGLDEEEHMAYINKNIERFKNPFLNDGVTRVGRAPIRKLGPEDRLVRPTTEAQKAGLPYSNLAKAIAAALLFDFAEDEQAMEIQNMIKEDGVAAVLKKVSGLDEDSAITEEVIQQYEMLKK

SEQ ID NO: 11171 - protein, 1098 aa, Vitis vinifera; identical to SEQ ID NO: 1074
  misc_feature (55)..(55): Xaa can be any naturally occurring amino acid
  misc_feature (325)..(325): Xaa can be any naturally occurring amino acid
  misc_feature (895)..(895): Xaa can be any naturally occurring amino acid
  misc_feature (1040)..(1040): Xaa can be any naturally occurring amino acid

SEQ ID NO: 11172 - protein, 698 aa, Cryptococcus neoformans var. neoformans JEC21
MSTAPPDTEILNPEDEEFYASWGLCILCVLLIGALISSYYLQVKRIRAVHETVISIFAGMVVGLIIRLAPGHMIRDMMSFKHTFFFNALLPPIILNSGYELKQENFFRNFAVILTFAFLGTFITAVGVGVLVYIWSFLGLEGLKFTLLECLIFGSTLSATDPVTILAIFNTAKVDPKLYSIIFGESILNDAVSIVMYETLSHFHGEDIYVSSLFHGVGIFLFSFLISMALGVSFGLACSLGLKHSHLASYPHIESCIITLVAYTSYFFSNGLAMSGIVSLLFCGITLKHYAYHTMSRRTQRTTKYMFGVLAQLSENFIFIYLGLNLFTQDVQVFKPLFILVSAIAVMASRYAAVFPLSELINWIFHTRGQRTEEIPHSYQMMLFWAGLRGAVGVALAAGITGDNADALRTTILVVVVLTVIVFGGTTSRMLEVLGIRVGVEDEDASSDDEEPWTAQPGHLALQSGAGFRRYPYSSQNSRGWEDPSELDLQSPEGSPYNQTLKLSHSRQARSSSYGQGRYGYGVRSGFSTNSDESDEEVLPSAGPSGSYGDGYDPEANVPGTSSDNRAGEGKGPSMIFRDGQWFTALDERYLLPLFSNSVTARRHHAKKAVRKGALAASGAGGRDTPGTGSKSGSTSGTPRRASLELGDDGYGGDGESENGKNKGLPRTFSGSVSDFFFSKSEPSPLPSTSLPLDERGK

SEQ ID NO: 11173 - protein, 262 aa, Zea mays
MNNPQNPKASAPCTLPSELPKEAVATDEAPPPMGNNNNTESATATMVREQDRLMPVANVSRIMRQVLPPYAKISDDAKEVIQECVSEFISFVTGEANERCHTERRKTVTSEDIVWAMSRLGFDDYVAPLGAFLQRMRDDSDHGGEERGGPAGRGGSRRGSSSLPLHCPQQMHHLHPAVCRRPHQSVSPAAGYAVRPVPRPMPASGYRMQGGDHRSVGGVAPCSYGGALVQAGGTQHVVGFHDDEASSSSENPPPEGRAAGSN

SEQ ID NO: 11174 - protein, 436 aa, Synechococcus sp. RS9916
MVVLGAGGLAAAVALSSPGLGLPSAGSPSITDSPKEVIDQVWQIVYRDYLDSTGKYDPQQWRTLRRNLLTKAYAGSEESYEAIRGMLASLDDPYTRFLDPKEFKDMQIQTSGELMGVGIQISLDKDSKEIVVVSPIEGTPASRAGVQPKDVIVSIDGKSTKGMTTEDAVKLIRGKEGTEVVLGLRRKGAVVSVPLVRARIEIHAVESQLNTTAGGEKIGYIRLKQFNANAAKDMRAAIRKFEAEGANGYVLDLRSNPGGLLEASVDIARQWLDEGTIVSTKTRTGIQDVRRATGSALTQRPVVVLVNEGSASASEILSGALQDNKRAQLVGQKTFGKGLVQSVRGLSDGSGLTVTIAKYLTPNGVDIHKNGIKPDVAVAMSEKEIESLQLEDLGTKKDSQYRTAETTLLRAIKAANQTQTYKPGGANLQSALQPAG

SEQ ID NO: 11175 - protein, 243 aa, Triticum aestivum
  misc_feature (149)..(149): Xaa can be any naturally occurring amino acid
  misc_feature (181)..(181): Xaa can be any naturally occurring amino acid
  misc_feature (201)..(201): Xaa can be any naturally occurring amino acid
  misc_feature (215)..(215): Xaa can be any naturally occurring amino acid
  misc_feature (225)..(226): Xaa can be any naturally occurring amino acid
MEAETAAKRAREGEGAAAADGAGEQAGISAVIPGWFSEISPMWPGEAHSLKVEKVLFQGKSDYQNVLVFQSSTYGKVLVLDGVIQVTERDECAYQEMITHLPLCSIKDPKKVLVIGGGDGGVLREVSRHSSVEQIDICEIDKMVVDVSXKQFFPRLALGFEDPRVSLHIGDGVAFLKNAPXEGTYDAVIVHSSDPVGPAQXELFEKPFFQSVSKXLLRPGGVVCXXGQMGCTKRIFKAPGFKG

SEQ ID NO: 11176 - protein, 541 aa, Hordeum vulgare
MGLGLGDPPADYGSIMAVGLFVALMCICIIVGHLLEENRWMNESTTALLLGLGAGTVILFASSGKNSRLMVFSEDLFFIYLLPPIIFNAGFQVKKKQFFRNFMTITLFAVVGTLISFSIISHGAMGLVSRLNIGALELGDYIALGAIFSATDSVCTLQVLSQDETPFLYSLVFGEGVVNDATSVVLFNAIQNFDLGNFSSLKFLQFIGKFPLSIWPQYLSWEVSSGLLSAYVIKKLYFGRHSTDREVALVMLMAYLSYMLAELLDLSGILTVFFCGIVMSHYTWHNVTESSRVTTKHAFATLSFISETFLFLYVGMDALDIEKWKIVSETYSPMKSIALSSIILALVLVARAAFVFPLSYLSNLTKKTPGEKISVRQQVIIWWAGLMRGAVSIALAYNKFAKSGHTQLPSNAIMITSTIIIVLFSTIVFGLLTKPLIRLLIPARHLTREVSALSEPSSPKSFLEQLTVNGPETDVENSVSIRRPTSLRMLLASPTRSVHHYWRKFDNAFMRPMFGGRGFVPFVPGSPTESSLPLLAHGSEN

SEQ ID NO: 11177 - protein, 446 aa, Deinococcus radiodurans R1
MAFPTILAALFTLTALLSYLNARFLRLPPTIGVLLGGLFLAAGVAVLGRLGVQGAQDLPRHIAALPFDQVVIAGLLSFLLFASAIQTDVRALLRERGVVLALAVVTTLLTMLLLGAGLYVVMQLFGSPLTWTQALLFGAIVAPTDPVAVTPLLERARVPERLRALIAGESLFNDGVGVAAFTVLSSAALQGSAVRLGELGGLLLREMLGGMALGAALGWLTARLTTSARSQDTAVLLSLALVTGGYALGEALHVSAPVTVAAAGVTLMLLGQLARRRRAASGFPTLSAEARRASLQIRSFWEVTDQVLNAVLFVLLALEVLVLRPRPGLLLAGIVVAMLAIVARGIAVGVPLTLYQWRARRRPELQPFTPYTRRLMTWAGLRGTVALALAFSLPPGELRDTLLFLTYVVVIFSLLVQGLTVPILGRKAAAAAKAAEAQGSVPGASV

SEQ ID NO: 11178 - protein, 1016 aa, Aspergillus nidulans FGSC A4
MVSTDDLDDLDTVTVCSFDDDTNSTPSEKDHDTTHAHPSPEPESIKPKVKIPSPSPSRSTLASTHRIKSSPPDQKIPVDHATDGKSSDNDSFNEGEAVYKEFKNRKSRKRKRTSTAVAKNKSSKAAAKDTFVGRVPRKKEVRGFRPTYLRDYKEEVLSDDDLMEDTLPDYLQKRRLQFDRRLEHLQDAGLKLPPSYDHVYFSDDEQLDYLRRKPAFSGIKPCAEYKDISLPCSLGVIPAPIAQWLRPYQVEGAAFLHQLFVYQKGGILGDDMGLGKTVQVIAFLTAAYGKTGDERDDKRMRKMRRSEGDLWYPRTLIICPGTLIENWKSEMSRWGWWHFDAYQGSNKDLVLHAAKSGRVEILITTYSTYLKNRDAVNMVDWDCVIADECHAIKERSSETTKAMNDINALCRIGLTGTAIQNRYEELWTLLNWTNPGRMGPVTTWKSHVSEPLKIGQSHDATVQQLRRARVTAKKLVENLLPQFFLRRMKTLIADQLPKKIDRVVFCPLTDTQAQAYERLLDSDIIHYIKTSTNKCDCGSGRKAGWCCHQYLPSGRRWQTYVFPAMQILQKLSNHLAILIPQSTDSFEKQEKDKEMLEIAVPDEWERLYRTRDSIINYADAEYCGKWKVLRKLLKWWHGNGDKVLVFSHSVRLLKMLQMLFNHTSYNVSYLDGSMTYETRAKVVDEFNSDPRQFVFLISTRAGGVGLNITSANKVVIVDPNWNPSHDLQAQDRAYRIGQTRNVEVFRLISAGTIEEIVYARQIYKQQQANIGYNASSERRYFKGVQEKKDQKGEIFGLQNIFEYQNDNIVLRDIVNKTNIAESKAGVQVMDIELELEEAGSEDGSWSRNPDDDDEAMSQLAARIRGETDDEVIFPHRQQSTTPSKHDPIQAILAGAGVEYTHLNNEVVGSSKVEEQLSRQAQLAEDDSLANLQVFCDSQDEVAGAVVAPTFQKNGRPVTFKYHPPEDVMKRQFCSMARRFGFPNATEFALVVESMTQAERRACLDRWYRERRQALLE

SEQ ID NO: 11179 - protein, 574 aa, Solibacter usitatus Ellin6076
MQVQAITAFSPALLLQAQLMTLSTVDLAIIVLYFAAVLGIGFYLKRFTKTGEDFFLAGREMTAWIAGLSFLAANLGSLELMGWAASAYQYGILATHWYWIGAIPAMLFLGIVMIPFYYISKTHSVPGYLKLRFGEPARALSAISFGLMTVFMSGINMYSMALVMKVVLGWDIHVSIWISSITVMLYVGLGGLLSAIFNEVLQFVLIWLGAMLISIIGLIEAGGWDGMVAKIHANFPQGDYTHAWRTLGSFNDNPMGINWVGIVFGLGAVISMGYWTTDFLVVQRVISAKDLRAAKLAPIIGAAFKMCVPFIVILPGLLGLAVLPEHLLPESQALATGGHSYNEVLPIMLARYCGPGLLGLGITALIAGFMSGMAGNVSAFATVWTYDVYRAMFNKNATDSHYVSVGRWCTFWGVLASIGTAYMVMSFASIMDYVQALFSFFIAPLFGTVILGMLWKRASPAGGFWGLAAGTASSIGMWAWVKIDHTAIQYVAMSPNAKDMAENMFRALWSWLVCVIVTVVVSLMTKPKPEKELVNLVYGCTDIPSEGHLPVWQRPAFWACVVGAVFIALNIIFW

SEQ ID NO: 11180 - protein, 456 aa, Coxiella burnetii RSA 493
MSLKRKIIAIVVAAFISPGLTTVFAFSPPFLPKTLISTPAEDKNDELSRKDVERFVTAIALVHQYYIKNMSNKKLLDSAISGMMANLDPHSSYLDNNDLKELKTTVSGEFVGVGIELTVSKDGLLKVISPLEDSPAARAGIQPNDYIVKIDDQLVQNMSLPEAVSRIKGKKETTVKLTVLRKSANKPLIFSIQREPIHLVSVKSKTLEPGYGYVRITFFQGPVENQLRDAIDKLKKESQGPLKGLVLDLRNNPGGLLDVSAQVADSFLDASKMHRYNDLIVYTKGRVPGADIQIKATPGDLIPHTPMVVLINGGSASASEIVAGALQDYKRAIIMGTPSFGKGSVQTVLPIGKEDAIKLTTALYYTPAGREIQAKGIIPNVAVPEFSITPPKSQLSLDEADFQNHLPNDGAASTKANPTTAEEEKNLLQIQLQLAKTDYQLYQALMMLQGLQVVKH

SEQ ID NO: 11181 - protein, 469 aa, Legionella pneumophila subsp. pneumophila str. Philadelphia 1
MTKNVVLDAIKEHDAKFVDLRFTDIRGKEQHITIPVSAVDDDFLENGKMIDGSSFKGWQKIHQSDLALVPDLTSIKPDPFFQDNTLFIRCNVVDPQTMMGYDRCPRSIAQRAENYLQSTGIADGVNFGPEPEFFLFDNVQWETTISGSFYKIDSDEAHWNSGKEMEGGNIGHRPPLKGGYFPVPPVDSSHDIRSAICITLESLGMVVEAHHHEVATANQCEVATRFNTLTKKADELQILKYVIHNVAHNYGKTATFMPKPLVGDNGSGMHCHQSLYKDGYNLFSGDQYSGLSETALYYIGGIIKHARALNAFTNPSTNSYKRLVPGFEAPVLLAYSARNRSAAIRIPHVSNPKARRIEVRFPDPTANPYLAFSAMMMAGIDGIQKKIYPGQPMDKDLYDLPPEELVDVPTVCSSLEMAMDHLRADHEFLLQGDVFSRDFINNYIQMKEEEITKIRSLTHPYEFELYYSL

SEQ ID NO: 11182 - protein, 842 aa, Oryza sativa Japonica Group
MSCDCCFFLCRTDHGQMGLGKTLQAISLLSYLKIHSISPGPFLVLCPLSVTDGWLSEFNKFCPSLRVIQYVGDKLHRRDLRRMMFQDVQKSSSSSHSTELPFDVMMTTYDIALMDQEFLSQIPWHYVVIDEAQRLKNPSSVLYNVLEQRFIMPRRLLLTGTPIQNNLSELWALMHFCMPSIFGTLDQFLSTFKQSGDSLTGGETNKTDKQFKILKHVLRAFMLRRTKALLIQSGILALPSLTELTVMVPLTPLQKKLYLSVLRKELQTLLTFTGGLSRHQSLQNIVIQLRKASSHPYLFSGIEPEPYVEGEHLVQASGKLVMLDLILKKLHEVGHRVLLFAQMTQTLDILQDFLELRQYTYERLDGSVRAEERFAAIKSFSSQPTKGVVRDDNQSGAFVFMISTRAGGVGLNLIGADTVIFYEQDWNPQADKQALQRAHRIGQLNNVLSINLVSQRTIEEVIMRRAERKLKLSHSVIGEEDATYGKGKYVENEASDMRSIIFGLHLFDTSDTTAETMNDDTASETIKEETMLKLKSMSEKVVLMRSHEPSEKDERAFEINPNMTDNSGAVVTRVSDSVNVDPDFNEAAYLSWLEKFKESSHSKENTRAELERQRIAPEEKFLKREAIKKKVEEKRLAKWESLGYQTLKIKDPDILPNQNIPDSGSVQLVYGDCTNPSVVCPAKPAIIFSCVDNSGTWGHGGMFDALANLSTCIPDAYNRASEFDDLHLADLHLIQLDEAKCNRSLDAPLWVALAVVQSYNPRRKVPRSEISIPDLELCLSRVAFSAAQHSASIHMPRIGLQGGGGGGSQRSEWYTIERLLRKYSSLHGVDIFVYYYRRGNKH

SEQ ID NO: 11183 - protein, 186 aa, Arabidopsis thaliana
MASSMLSSAAVVTSPAQATMVAPFTGLKSSAAFPVTRKTNKDITSIASNGGRVSCMKVWPPIGKKKFETLSYLPDLSDVELAKEVDYLLRNKWIPCVEFELEVINTKHGFVYREHGNTPGYYDGRYWTMWKLPLFGCTDSAQVLKEVEECKKEYPGAFIRIIGFDNTRQVQCISFIAYKPPSFTEA

SEQ ID NO: 11184 - protein, 642 aa, Rhodomonas salina
ARGIDLGTTYSCVGVWQHDRVEVIANDQGNRTTPSYVAFTETERLIGDSAKNQVAMNPHNTVFDAKRLIGRRFQDPAVQEDIKHFPFKVLCKDGDKPAVEVKFKGETKVFAPEEISSMVLLKMKEIAESFLGKEVKNAVITVPAYFNDSQRQATKDAGAITGLNVLRIINEPTAAAIAYGLDKKTSGSKSERNVLIFDLGGGTFDVSLLTIEEGIFEVKATAGDTHLGGEDFDSRLVNFFVSEFKRKYKKDVTSSARSLRRLRTACERAKRTLSSGTQTTVEIDSLIDGIDYYASITRAKFEELCMDLFRGTLEPVEKVLRDSKISKSEIHDVVLVGGSTRIPKVQQLLIDYFNGKELCKNINPDEAVAYGAAVQAAILAGDTSEKMQDLLLLDVAPLSLGLETAGGVMTVLIKRNTTIPTKKTQVFSTYADNQPGVLIQVFEGERSRTKDNNILGKFELTGIPPAPRGVPQIEVTFDIDANGILNVSASDKSTGKSNKITITNDKGRLSKEEIERMVEEAEKYKNEDEKTRQKMEAKNSLENYAYNIRNTVRDDKLKDKIEEEDKKTIEEKVKEVLEFIETNEDLEKEEYEEKEKNLKNLANPIISKLYQQGSVPDMGNFNGQQTEGAEGANMGPKIEEVD

SEQ ID NO: 11185 - protein, 387 aa, Zea mays
MEAGGAGSGLNGAVQAKGTGADDGSAKRLPPCCVKARAAAPESEARCHATVVSGWFTEPRSRCGKASKVQYYNNPMWPGEANSLKVEKILYQGKSLYQEVLVFESSTYGKVLVLDGIVQLTDKDECAYQEMITHLPLCSIPSPKKVLVIGGGDGGVLREVSRHSSVESIDICEIDQLVIDVCKDFFPHLSVGFQDPRVQLHVGDAVEFLRNAPEGTYDAIIVDSSDPIGPAQELVEKPFFDTIARALRPGGVLCNQAESMWLHTHLIQDMLSICRETFKGSVPYAWASVPTYPSGVIGFLLCAKEGPLVNFLTPINPIEKLEGATKAGREIRFYNSEMHRAAFVLPTFARRELEAYCVSTETEQAEETPAAPLKLTLASRSEIFATS

SEQ ID NO: 11186 - protein, 159 aa, Arabidopsis thaliana; identical to SEQ ID NO: 10866

SEQ ID NO: 11187 - protein, 557 aa, Escherichia coli CFT073
MRKPVYYMEILLTILILTLVVSLTSVLTRLSPVQIPLPLIQIAAGAVLAQPIFGLHVEFNPELFLLLFIPPLLFAESSKIQPKELIKHSREIISLALVLVLITIFGVGYVIHLLLPNVPLIAAFALAAVLSPTDAVALLGIVGKGRISKNIQEVLEGEALMNDASGLVALKFAVAVTMGTMEFSVHGATIAFFVVALGGIAVGIAVTWLYGKGLLLISRYAHDEPSIQIVLMLLLPFIVYLVAEHFGLSGILAAVAAGLTTSRIGVVHHAPIRLRIKAKSSWSMLEYVFNGMVFLILGLQLPGIISESLIRAENDPLVDTGSLLLDVIWIYLALMVVRLGWLWLMRLYSRKRPGKHPMLFAGYKTRHMLLATFAGVRGAITLAGVLSIPLLLPDGTPFPGRYLLVFLATGVILFSLVCGIIILPLLLGKNVGIFSDNRQKEEEAADLFMAKMAILSVQKTEQRLLRARTENLDNELIMETGARVIGYMRHSEEDMSPNDNSLHMQRAKLERTFNLAALNAKRAAIYQMRARQEVSDETLAKIVSELDVLETLIMDSR

SEQ ID NO: 11188 - protein, 166 aa, Bordetella parapertussis 12822
MNTMYDFSAPTITGAERALADFRGQVALVVNVASRCGFTPQYSGLEELYRSYRNEGFVVLGFPCNQFGRQEPGDEAAIAQFCETQYAISFPLFAKIDVNGAHAHPLYRWLKAHKPGLLGTRAIKWNFTKFLVGRDGLPLRRYAPAHTPESLRHDIARACAAPGPTP

SEQ ID NO: 11189 - protein, 505 aa, Clostridium thermocellum ATCC 27405
MDVTGKSLKRILLSLAVFCILITGPGIACAEEATTQEKEILFSDYFKSMMDMAQDKYKGEITEKQMLEGALKGIFSTMDSYTVYYTVEESQDFFTDINGSYTGIGVVMSEVDGKIVIDKVYPSSPAEEAGIKKGDVIAQVDGKSVENLSLEEVAGLIKGPSGTKVVIGVLRNGTDGVIELEVTRRQIIINPVTHKIEGDIGYIKLESFNSNASKAMEEALKQMDKNNIKKIILDLRDNPGGDVGQAVSIARKFVKKGLITKLDFKSESQKDEEYYSYLEELKYKLVVLVNENSASASEILAGAIQDTGSGILVGTTTFGKGKVQNLYPILTPEAVEKYRKETGETFVNGYDLLEKHGIYPSDEEIIGWVKITTGEYYTPNGRMIDGVGLEPDVYVENEPEGKYKILEGVEKLRKVTKPSLNAQSEDVLNAEKILSALGYDVDTPDNLMDEKTVKAVAEFQRDCGLYSYGVLDFATQQALNDKLDELLLVKNRDKQYEKAVELLEN

SEQ ID NO: 11190 - protein, 474 aa, Salinibacter ruber DSM 13855
MSTSSQQPPPGRRGVLWRLWSWWRSLSPPQLFVGAFLTLILAGTVGFMTLPGLYAGPPLNWVDALFTATSAVCVTGLIVVDTATYFTTWGQAYVLLLIQLGGLGIISFTSVILAALGQRLSLRHEQLAGSGTSLVDDIDYRALTWAILRFTFVAELIGGVLLYAAWVPRFGWGGAAWHAVFHTVSAFCNAGFSTFTTSLEGFQANLPLLMVVMGLIVVGGLGFLTLEELNVWRRKRRAEGRFRLSVHSQIVLGTTAFLIVAGWVAFTAFEWHNTLAGMSVGERLVNGLFASITPRTAGFNTIDYAQVETETNFLTIVFMMIGGSPGSTAGGIKTTTFALLGLLAWSRLQGRPTTSISSRTIPESTLQKAMSLFIGAFGIVTVAIFVFSVTEFGDGVAAGAAPFLSYMFEAFSAFNTVGLSMSATGTLTTPGRLCTVVLMFIGRVGTLTFVAAMAREPKRIKGGFRYAYEDVSIG

SEQ ID NO: 11191 - protein, 479 aa, Bacillus halodurans C-125
MVVVIAAIVGAVAYLSNFGLAGDNVSSPQEETASSESSPPATLSDEEAFAKFQQAFQLIQDRYVDEVDEEKLLQGAIEGMLGTLDDPYSVYMDPETAAEFVQSLDSHFEGIGAEVSMTNGYVTIVAPFRESPAEKAGLQPNDRILEIDGESTEGLSLYEAVLKIRGEKGTTVDLTIERPGASNVVNITVERDEIPIETVHVHRFERNGLTIGMLEITSFSEDTADRFEEGLAQLEGEGIDGLIIDVRGNPGGYLNAVEDIGSLIIPEGEPIVQIQNRDGEKMRYLSTLKEEKPYPIVGLTDRGSASASEILAAALKEAGHYDVVGETTFGKGTVQQSIELGDGSEIKLSLFRWLTSDGNDINGVGVEPTVEVLQPDYFYTAPLSVEEPLELDMLNDQIEHAQMMLKGLGFEPGRTDGYFEEQTEKAVRAFQDSQELETTGVLDEETAIALQQSIVDLVRDQENDQQLRVALDLIVEQAQ

SEQ ID NO: 11192 - protein, 491 aa, Staphylococcus epidermidis RP62A
MNDHQKNHATSQDDNTKSTPSKNSKHIKIKLWHFILVILGIILLTSIITVVSTILISHQKSGLNKEQRANLKKIEYVYQTLNKDYYKKQSSDKLTQSAIDGMVKELKDPYSEYMTAEETKQFNEGVSGDFVGIGAEMQKKNEQISVTSPMKDSPAEKAGIQPKDIVTQVNHHSVVGKPLDQVVKMVRGKKGTYVTLTIKRGSQEKDIKIKRDTIHVKSVEYEKKGNVGVLTINKFQSNTSGELKSAIIKAHKQGIRHIILDLRNNPGGLLDEAVKMANIFIDKGNTVVQLEKGKDKEELKTSNQALKQAKDMKVSILVNEGSASASEVFTGAMKDYHKAKVYGSKTFGKGIVQTIREFSDGSLIKYTEMKWLTPDGHYIHGKGIRPDVSISTPKYQSLNVIPDNKTYHQGEKDKNVKTMKIGLKALGYPIDNETNIFDEQLESAIKTFQQDNNLKVNGNFDKKTNDKFTEKLVEKANKKDTVLNDLLNKLK

SEQ ID NO: 11193 - protein, 602 aa, Oryza sativa Japonica Group
MRKDHELDLFFDDILTSAGYEGPRDFGGKKTGLVWDLVPGVREDMFPHQQEGFEFMWRKLAGGTSIEQLRNNANTIEGGCVISHAPGTGKTRLAITFVQSYFAFFPECCPVIIAPRGMLATWEQEFRKWKVKVPFHVLNSKEINWKEDRTIKQLAIMDENLAQSLARNKLDHKFRRKLKLASWRKGSSIIGVSYTLFRKLANQSSMDGNMVRNLLLEMPDLLVLDEGHTPRNKKSLIWKVLEEVRTKKRIILSGTPFQNSFLELSNVLYLIRPKFARHFASKSFKKIGLEDYWTSLTLNNITEKKIDEIRQILDPIVHIHNGDILQKSLPGLRESVVILNPLPHQKEIITAMENTVTMGTLDAEYKISLASIHPFLVTCAKLSEKETSSVDVSLLKSLRPNPCVGVKTKFVLEIVRLCEAMKERVLVFSQYLEPLSLIMDQLSKMFNWIEGEEILLMSGNVLVQNREALMEAFNDMKSNAKVMLASTKACCEGITLIGASRVVLLDVVWNPSVGRQAIGRAYRIGQEKIVYTYNLITEGTKEKDKYDRQAKKDHMSKLLFSKEPHAAGFNLSQEVIFNDKILEAMTSHRELKDMFVKILHSH

SEQ ID NO: 11194 - protein, 223 aa, Brassica napus
  misc_feature (18)..(18): Xaa can be any naturally occurring amino acid
  misc_feature (206)..(206): Xaa can be any naturally occurring amino acid
RPTRPAPPVVSEAQIEEXKMWEEVAFYTNANEVDLQLHSEIEKEISADDSPGAACVKGNHELCLDLEIGLKCIHCCFVLREIRGLDVSEWGERNTSGRRKNDRSEEEENSNFIGNLEFEANSNNNLKKRSESTQGTVWDKIPGVKSQMYPHQQEGFEFIWRNLAGTIMLNELQDFENSEETGGCIMSHAPGTGKTRLTIIFLQSYXLECFPNCKPVIIASASL

SEQ ID NO: 11195 - protein, 167 aa, Blumeria graminis
MGPTTTLYDFMPKDKNGEPVPLEKYKGQVVLIVNTASKCGFTPQFEGLEKLYKSVSSTHPGKFTILGFPCNQFGGHDPGSNDEIQNFCRINYGVTFPMLGKVNVNGDTADPLFEWLKVEKPGIMGMKRVKWNFEKWLVSKDGKPIKRYSSTAGPEGFQSLIIEEIEK

SEQ ID NO: 11196 - protein, 466 aa, marine gamma proteobacterium HTCC2080
MRSRSLILTTLLFAIFTTTLHAQTSGPSSESVISVPESATSNSEAVDSGPEAGGGALPLAELQTFADVFHQIRAGYVEEIDDSQLFEFAVKGMLEGLDPHSAYLTKEDYSDLQTTTEGEFSGLGIEIGRRGSYIEIIAPIDGSPAVAAGLQAGDVILKLDGESVKGMAIDEAVQLMRGPIGTPIDLEIGRPGTSEPLEITVVRDAIKVASVRSRLLAPHYGYLRIAQFGRPTGEEAGAALDRLFKEDELKGLVIDLRNNPGGVLGASVAVSDLFMDGGLVVYTEGRHPSSRERFEATPGDRLSGAPIVVLINGGSASASEIVAGALQDVGRAVIMGTRSFGKGSVQTVLPVSETRAVKLTTARYFTPEGRSIQAEGIVPDIVVERARVTSIEGRQIKESDLKGSLDSSAEANPQDAGSESESLANLRENDNQLYEALTLLRGVNLLIPRKPMEATDQNKTETPLAD

SEQ ID NO: 11197 - protein, 70 aa, Chlamydomonas reinhardtii
MTVSKRVANAKSGKFHKGVHKRGLVDEAKQKKTSKLPVGPLMLGFFIFVVIGSAVLQIIRTATNPRELPA

SEQ ID NO: 11198 - protein, 403 aa, Oryza sativa Indica Group
MYGSPVSKDLNLPVQPPAMSSSGLLRYRSAPSTLLAEFCDDFLPPAAAPRAASPDADNVFSRFLADHQIRDKSPPANGDADGDAAAHFPDDPTMATQHHHQQQMMFQHHPQQMASGEGLYRTVSSTGIDAATAAANAAGGGGGGLLRQSSSPAGFLNHLNMDNGYGSMLRAGMAAAGGGGGVGFRNGANAAAAADSPGGSGGRLKGQLSFSSRQGSLMSQISEMDSEELGGSSPEGAGGGGGGGGRGYLSGYPMSSGWEESSLMSDTNISGVKRQRDSSEPSQNGGGGGGGLAHQFSLPKTSSEMAAIEKFLQFQDAVPCKIRAKRGCATHPRSIAERVRRTRISERIRKLQELVPNMDKQTNTADMLDLAVDYIKDLQKQVKGLNDSRANCTCSAKHQQYSG

SEQ ID NO: 11199 - protein, 181 aa, Arabidopsis thaliana
MASSMLSSAAVVTSPAQATMVAPFTGLKSSASFPVTRKANNDITSITSNGGRVSCMKVWPPIGKKKFETLSYLPDLTDVELAKEVDYLLRNKWIPCVEFELEHGFVYREHGNTPGYYDGRYWTMWKLPLFGCTDSAQVLKEVEECKKEYPGAFIRIIGFDNTRQVQCISFIAYKPPSFTDA

SEQ ID NO: 11200 - protein, 144 aa, Triticum aestivum
  misc_feature (72)..(72): Xaa can be any naturally occurring amino acid
MALAEGNNGAVVFSEEQEALVLKSWAVMKKDSANLGLRFFLKVFEIAPSAKQMFSFLRDSDVPLEKNPKLKXHAMSVFVMTCEAAAQLRKAGKVTVRETTLKRLGATHLKYGVADGHFEVTGFALLETIKEALPADMWSLEMKK

SEQ ID NO: 11201 - protein, 654 aa, Vitis vinifera
MKMRIFRPFSLLLHEMKFAANMNSNPALFNLLSLSSKRLSTLSSSPNPIIVNYLIQTFGFSQTLANSISNRFWWAKSTENPQSVIHFLRDLGFSEAHIRTSVRVGPQILFSDIDKTLKPKVQFFEQLGLVGADLGKFISKNSKVLTISLEKKLVPCIEILKKTLSDDENNGDLIRVLRRCTWVLSRNPELLLSNIAFLESCGIVGSQLSMLLTRQPRLFVIKQSTLKDLVSRAVDMGFSIESRMLVYALYTISCLRDETLRKKFELFRSWGFTEQECIEMFRRTPGLLRASEEKLKLGMEFFMNTMKFEKTLLVHRPTILMLSMEDRVIPRYRVLQILKSKRLLKREPSFINVLSLTDEEFLDKFISRFADDAEEFFSFLASRFHTKNLSLASVCFFPFVSIPNRLSTLYFPSFYPLLPLSLSLTPYKLSTQIPLSPTITLLFVSTSLCAISMTGKRAQNSPVGSPSSDTSSSKEQDRFLPIANVSRIMKKSLPANAKISKEAKETVQECVSEFISFITGEASDKCQREKRKTINGDDLLWAMTMLGFENYVGPLKVYLSKYRETEGEKNNVVARHEDQSAVFNSNQMNKANKSIPIDPDFQGFNGGFYSLGPQMNGDEAAAAMGYGDSLVTGAFNRKVLVRENSRVFFCSYLN

SEQ ID NO: 11202 - protein, 478 aa, Mycobacterium avium subsp. paratuberculosis K-10
MTETTPDDVFKLAKDEKVEFVDVRFCDLPGIMQHFTIPVSFFDESVFEDGLAFDGSSIRGFQSIHESDMLLLPDPATAQIDLFREAKTLNLNFFVHDPFTLEPYSRDPRNIARKAENYLISTGVADTAYFGAEAEFYIFDSVSFDSRTNGSFYEIDAISGWWNTGSPNELDGSPNRGYKVRPKGGYFPVAPVDHYVDLRDQMLSNLIKAGFSLEKGHHEVGTGGQAEINYKFNTLLHAADDMMLYKYIVKNTAWQNGKTVTFMPKPLFGDNGSGMHTHQSLWKDGSPLMYDETGYAGLSDTARHYIGGLLHHAPSLLAFTNPTTNSYKRLVPGFEAPINLVYSQRNRSACVRIPITGTNPKAKRLEFRCPDSSGNPYLAFSAMLMAGLDGIKNKIEPQAPVDKDLYELPPEEAANIPQAPTQLSAVIDRLEEDHEYLTEGGVFTPDLIETWISFKRETEILPVQVRPHPYEFALYYDV

SEQ ID NO: 11203 - protein, 158 aa, Listeria innocua Clip11262
MNVHDFSEKAMNGKEIALSDYKGKVLLIVNTASKCGLTPQLEGLEKMYKKLGGDNFEILGFPCNQFLRQDPGSDEEILEFCQMNYGVTFQMFSKIKVKGKDAAPLYKYLTEQTGGKKVEWNFAKFLIDENGEVVERFPSKMKPEDFEDKVEALVAAVK

SEQ ID NO: 11204 - protein, 199 aa, Triticum aestivum
MPDSDNEDSGNAGGELSSPREQDRFLPIANVSRIMKKALPANAKISKDAKETVQECVSEFISFITGEASDKCQREKRKTINGDDLLWAMTTLGFEDYVDPLKHYLHKFREIEGERAAATSTSTTPDMPRNNNNATGYADAPGGMMMMGQPVYGSPPPPQQQQQHQHQIAMGGRAGFPYHGGGGGGGGSSSSSGFGRKEG

SEQ ID NO: 11205 - protein, 446 aa, Mycobacterium avium subsp. paratuberculosis K-10
MDRQKEFVLRTLEERDIRFVRLWFTDVLGFLKSVAIAPAELEGAFEEGIGFDGSSIEGFSRVSESDTVANPDPSTFQVLPWASPNGHHHSARMFCDITMPDGSPSWADPRHVLRRQLQKANDLGFSCYVHPEIEFFLLKPGPDDGTPPVPVDTAGYFDQAIHDSASNFRRHAIEALEFMGISVEFSHHEGAPGQQEIDLRFADALSMADNVMTFRYVIKEVAIENGARASFMPKPFGQHPGSAMHTHMSLFEGDVNAFHSPDDPLQLSDVGKSFIAGILEHASEISAVTNQWVNSYKRLVGGGEAPTAASWGAANRSALVRVPMYTPHKTSSRRVEVRSPDSACNPYLTFAVLLAAGLRGVEKGYVLGPQAEDNVWDLTPEERIAMGYRELPTSLDSALRAMESSELVAETLGEHVFDFFLRNKRTEWATYRSHVTPYELRTYLSL

SEQ ID NO: 11206 - protein, 297 aa, Glycine max
  misc_feature (128)..(128): Xaa can be any naturally occurring amino acid
SYVGPPPRYADVSWPGEAHTYKIEKILFHGKSEFQELLVFESSRQGKVAILDGHIQLTENDEFAYQEMLTHLALCSIPDPKKVLLIGGGDGGILREISRHSSVEHIDICELDQMVIDVYSEFFPDIAXGYEDPRVHVHISDGVAFINSVPEGTYDVIISDAFPAMGHSADVLADECFLESVAKALRPGGVFSAPADSLWHKNFVVADTIANCKKIFKGSVNYAWTTVPTYARHFLSNYIGVIGFMLCSTEGPPVNFKHPINKLNPEKNGVAKGPTKFYNPEIHAAAFCLPSFVDKVD

SEQ ID NO: 11207 - protein, 297 aa, Debaryomyces hansenii CBS767
MAQELTHPSIKDGWFAEISDTMWPGQAMSLKVEKVLHVEKSKYQDVLVFKSTDYGNVLVLDDCIQCTERDEFSYQEMIAHLALNSHPNPKKALVIGGGDGGVLREILKHESIEEAWLCDIDETVIEVSKKYLPEMSQSYKNPRTKVHIGDGFKFLAEYKNQFDVIITDSSDPEGPAESLFQKPYFRLLKDALTEKGVITTQAENIFLHMEIISRLKKDCKEIFPVAEYGYTMIPTYPSGSIGFMVCSKDPNANVTKPLRFDWDDEFVRKNLKYYNKKIHEACFVLPTWADEKLNKQN

SEQ ID NO: 11208 - protein, 434 aa, Shewanella sp. MR-4
MTSYQILCILCALALVTSVASSRLHKLQETVAITALALGMSLLLLLGGKALGGHVYGYFVAGLEKLDFQALLLNGMLGFLLFAGALQIRLKILRHQKWEILILAFVSTLLSTFIVGGLLYYIAPMLGLPLALSHCLLFGALISPTDPIAVLAILKKMGAPEDIAIQVEGESLFNDGIGLVIFVAISHLAFSTEPLTFSQISLLFIQEALGGVVYGAVLGVLLHHFFRYCEEETQLMLVTLLIPTAGYVIAEVLGVSGPLAMVSAGMIIGNYSVPKYFARQERVKLYTFWSLIESFFNALLFLLLGLLLLLVTFKAPLWWFMLVAIPLVLTARAVSVLLPYIGFRLVKSYNPYAESILIWGGLRGGLALAMAMSLPEGVIIDSQSGAELRELVLVMTYAVVVFSILVQGSSMTGLIRRSNAVTTEANHQIATERT

SEQ ID NO: 11209 - protein, 458 aa, Bdellovibrio bacteriovorus HD100
MQSLKRYWKTYILGGALLLVLFIMAETGFQVRSFAQERYADLQNFSKVLNLIQQYYVEEVNTKKLVYGAIKGMLRELDPHTNFMPPEMFKDFETETSGEFGGLGIEISIQNGILTIISPIEDAPAWEAGIKAGDKVVSIDGTTTKGMSLAEASVMMRGKKGSKIVLRVVRDNEEKPRDITVVRGSVKIKSVKYTDLGDGFAYVRITSFIENTSKDLQKTVENHIKNNKNMAGLLIDMRRNPGGLLDQAIKVSDMFLKDGTIVSTIGRNKNEKEVATASKKGQYTNFPIVILVNEYTASASEIVSGALQDNKRALIVGQRTFGKGSVQSVIKLGDGSGLKLTVARYYTPNGVSIQAEGIHPDIEIEDVDPDAFSKAIVKSVTTREGDIAGHLKGDREKAAEKLDVKEGAEEGALAWWKDVGSKKDEKLSPRDKLFKSDYQAYQAFSYLKAWDTLKALTR

SEQ ID NO: 11210 - protein, 451 aa, Glycine max
  misc_feature (364)..(364): Xaa can be any naturally occurring amino acid
MSVMYSPVLNYSDVEHQLRKNQDMDSSIGHPQQHCHQPNSGLLRYCSAPSSLLASLIDNTIHGCVNEESFTSENHHHQQQQQQQHYLPSTSSEMETMLSKLLPSNNGWSNSEALQEFGGKPVKQEIGESIPQEPPQQNGYSYGGSQLIYQSQQIQGLPNGGSSSASGSAFDGSFGVVHSMASEDSIQSKMGIRNCSNLFRQKSSPAAFFSIENDLAALREVGSFKADDVSNGLVTASTGGLHSSHTFSSRPSSCLKRLPQIAENGNESLEENCDQSRNLVNDNGSSKCYIPSFTNELWESSAFNAPKTENEDEIMFSTSNILESQEADFSFQNLGLTHHLSLPSSSTKMSSIEKFLQIQGSVPXCKIRAKRGFATHPRSIAERVRRTRISERIKKLQDLFPKSEKQTSTADMLDLAVEYIKDLQQKVKILSDCKAKCKCTSNEKHYTRTCA

SEQ ID NO: 11211 - protein, 209 aa, Persea americana
MGRGKIEIKRIENSTNRQVTYSKRRNGLLKKAKEITVLCDADVSLVIFSATGKMSEYCSSSATMIKMLDRYQKASGNRLWDAKHEYLSMEVDRIKKENDSMQIELRHLKGEDLTSLHPKELIHIEEALENGLTGVRDKQEELLSILKKNERILEEENMRLMYMLHHHHLAIDGNVRDVEQGCQQKERDCSSQMQFAFRVQPIQPNLQNK

SEQ ID NO: 11212 - protein, 203 aa, Shewanella sp. MR-7
MISILVSDVIENNEFANLGAPNEKDIMIKLPLVIFASLLSTSAFAATCPSYLDVEVRKLHSDEKINLCELTQGKPVLLVNTASNCGYTPQFKALEALHKEYKDKGLVVIGFPSDDFFQEENDEKDTAKVCYINYGVTFTMLATSPVRGSDANSVFKYLGDKAGSPKWNFYKYVVSGDGNTVQQFNSKVKPDSAELKQAIESVL

SEQ ID NO: 11213 - protein, 524 aa, Burkholderia pseudomallei K96243
MRMKLKNIGLIAAGLATGVFATLQISASAQQAVTTAAAPLPLDQLRLFAEVFGQIKREYVEPVDDKKLLTAAIKGMVSSLDPHSSYLDKTDYQELQEQTKGRFAGLGIEISQEDGLVKVISPIEDTPAFRAGIRPGDLITRINDRPVRGMTLDKAVKQMRGEPGTKVTLTIFRKSDDRTFPVTVTRAVIRVQSVKMKLLDPGYAYIRITSFQERTTPDLAAKLQDIARQQPNLKGLILDLRNNGGGLLQSAVGVAGAFLPPDSVVVSTNGQIPDSKQIYRDNYENYRLPSFDSDPLKNLPAVFKTVPMIVLTNAYSASASEIVAGALQDSHRAVIMGKATFGKGSVQTVRPMTADSALRLTTAYYYTPSGRSIQNKGILPDIPVDQYADGDPDDVLVTREVDYTNHLANTQDPNEKKELEEREQRRMEQLRILEEQNDKKTPEQRQKDRERKPIEFGSADDFMMQQALNKLEGKPVEQSKMIAADSTAKSAAAKAGVASAAKGASGAAAKPASAAKPASAPQPQ

SEQ ID NO: 11214 - protein, 1360 aa, Oryza sativa Japonica Group
MPRRKGKGKGVEDEVEVYEPASPPERVLIILDSSEDDLDLQEIIDVDSGSDRGVVRVKEEPRSGSDSDYNGARGRARARARAPVAATAAKKKKRKRGKEAPSRAQESREVVRVKEEPNSDGNGAGGRARARSPVAAAAKQRKRGGREAPSRAQESRVPVQIKEEPYSGSDSDGNVAGGRAVVPAADAKQGKRGKKTPSRGKGRRVVVRETSTPAAPSNGAPSVGRGKGRGPGRGRQRSKGAVRGRATPVNRVSTGVGSRTRSRLAEQGRAFAQEEEEQVEEREEEEEEEEQGRAFAQVKEEQVEEQEEDEEEGEEEMEMEVEVEVRSDDNDHGNGGIRGEGGGTDDVAEIEEEELGTDEDETSDDSDENFSDEEGDEEELEEEEEEEEEEEDDDDDDEEEEEPGDAPDQPGEAGEESPPRSRIMAMPLMGKRMFEGFSFLQQVDTSTGRDIRARTRSNFKRKKLLDKKLLKRGTFAKPYCIDVSSSGSEEDVPQPEQSAYGGDCADDDGGSDGNEEHRAVKRRKLNRRQSAHSDSEEDTTFVCDVKEGSGSRRVQEGAPRRQVKKEGSNKKKDGSTPQCVRNNGPKVGRQTNGLNGQGGVSFKRNVKIAQRRKRRQATADQEKYGHLLDPMFNEIESNQYEPVPEEQIDRRLPLVFAFGDDDKLEEKSKHDKLQDEDELWKEFDFALESINVCSHNCEEGEKEDEQEIPADKAASCIQGKHELIIDEQIGLRCKHCNFVDLEIRFVLPSMVKSCTERDMRKDHELDLFFDDILTSAGYEGPRDFGGKKTGLVWDLVPGVREDMFPHQQEGFEFMWRKLAGGTSIEQLRNNANTIEGGCVISHAPGTGKTRLAITFVQSYFAFFPECCPVIIAPRGMLATWEQEFRKWKVKVPFHVLNSKEINWKEDRTIKQLAIMDENLAQSLARNKLDHKFRRKLKLASWRKGSSIIGVSYTLFRKLANQSSMDGNMVRNLLLEMPDLLVLDEGHTPRNKKSLIWKVLEEVRTKKRIILSGTPFQNSFLELSNVLYLIRPKFARHFASKSFKKIGLEDYWTSLTLNNITEKKIDEIRQILDPIVHIHNGDILQKSLPGLRESVVILNPLPHQKEIITAMENTVTMGTLDAEYKISLASIHPFLVTCAKLSEKETSSVDVSLLKSLRPNPCVGVKTKFVLEIVRLCEAMKERVLVFSQYLEPLSLIMDQLSKMFNWIEGEEILLMSGNVLVQNREALMEAFNDMKSNAKVMLASTKACCEGITLIGASRVVLLDVVWNPSVGRQAIGRAYRIGQEKIVYTYNLITEGTKEKDKYDRQAKKDHMSKLLFSKEPHAAGFNLSQEVIFNDKILEAMTSHRELKDMFVKILHSH

SEQ ID NO: 11215 - protein, 531 aa, Zea mays
MAQVSRICNGVQNPSLISNLSKSSQRKSPLSVSLKTQQHPRAYPISSSWGLKKSGMTLIGSELRPLKVMSSVSTACMLHGASSRPATARKSSGLSGTVRIPGDKSISHRSFMFGGLASGETRITGLLEGEDVINTGKAMQAMGARIRKEGDTWIIDGVGNGGLLAPEAPLDFGNAATGCRLTMGLVGVYDFDSTFIGDASLTKRPMGRVLNPLREMGVQVKSEDGDRLPVTLRGPKTPTPITYRVPMASAQVKSAVLLAGLNTPGITTVIEPIMTRDHTEKMLQGFGANLTVETDADGVRTIRLEGRGKLTGQVIDVPGDPSSTAFPLVAALLVPGSDVTILNVLMNPTRTGLILTLQEMGADIEVINPRLAGGEDVADLRVRSSTLKGVTVPEDRAPSMIDEYPILAVAAAFAEGATVMNGLEELRVKESDRLSAVANGLKLNGVDCDEGETSLVVRGRPDGKGLGNASGAAVATHLDHRIAMSFLVMGLVSENPVTVDDATMIATSFPEFMDLMAGLGAKIELSDTKAA

SEQ ID NO: 11216 - protein, 158 aa, Rhodopseudomonas palustris CGA009
MASIYDFTAKSLVGKDVSLKQFEGKVLLIVNTASACGFTPQYKGLEALQEKYGPRGFSVLGFPCNQFGAQEPGDEAQIAQFCSTNYGVTFPMFAKIDVNGAGAHPLYKFLKDEKGGLLGSAIKWNFTKFLVDRSGRVVSRHAPTTTPEALSKEIETLL

SEQ ID NO: 11217 - protein, 277 aa, Thermoanaerobacter tengcongensis MB4
MELWFTEHQDENLRFSIKVKETLVVEKTPYQHLAILDSYQFGRVLVLDGILQTTEKDEFVYHEMIVHVPLFTHKNPKDVLIIGGGDGGSVREVLKHSSVERVVLAEIDEAVIRNSKKYLPTISSALDDPRVEIMIGDGIKYVNEHKNEFDVVIVDSTDPIGPAVGLFTSDFYRAVYECLREDGIIVAQTESPFIYGKLINKISKMFKEIYPITKAYIATVPTYPGSLWTFTMGSKKYDPEEVDINSIPRIQTKYYTPEIHKAAFVLPKFVKDIFDEV

SEQ ID NO: 11218 - protein, 167 aa, Saccharomyces cerevisiae
MQEFYSFSPIDENGNPFPFNSLRNKVVLIVNVASHCAFTPQYKELEYLYEKYKSHGLVIVAFPCGQFGNQEFEKDKEINKFCQDKYGVTFPILHKIRCNGQKQDPVYKFLKNSVSGKSGIKMIKWNFEKFVVDRNGKVVKRFSCMTRPLELCPIIEELLNQPPEEQI

SEQ ID NO: 11219 - protein, 287 aa, Synechococcus sp. RS9917
MTHNAAPTPGWVDEHHLGVRYGLEGRVLVEEQSPFQRITVIDSLRYGKGLLLDGCWMTAERQERHYHESLVHPALCSAAQIERVLVIGGGDGGTARECLRHPGVQHLDMVEIDGRVVKLSQQHLPSIGGGCWQDRRFHLTVGDGIAWAANAPTASYDVVLVDGSDPAGPAEGLFNRAFFEQCRRILKPGGVFATQSESPEAFRQVHIDTVTVIREVFGHADPMYGWVPMYPSGWWSWTFAATDSRRYLNPDPCRAAAVAEGCEIWSPRWQRGAFDAIPAAIERALNA

SEQ ID NO: 11220 - protein, 277 aa, Synechococcus sp. MA19
MRTPQATKTAVLVIGGAEDKVHGREILRTFFARAGGSDAHIAIIPSASREPSIIGGRYIRIFEDMGAKKVELLDIREREQCEYRDYQESLEICTGVFLTGGDQLRLCGVLADTPAMDIIRQRVKAGELTLAGTSAGAAVMGHHMIAGGGSGESPNRSLVDMATGLGLIPEVIVDQHFNNRNRMGRLMSAIASHPDRLGIGIDEDTCALFERDGWLQVLGKGSVTIVDPTEVTHTNEPHVGATEPLNLHNLRLHILSHGDRFHLYQRTVLPAIYRVSN

SEQ ID NO: 11221 - protein, 468 aa, marine gamma proteobacterium HTCC2080
MSERTLTLIKDNDIRWVDLRFTDTMGKEQHVSIPATEVGEDFFEEGKMFDGSSISGWKGINESDMILMPDDSSSILDPFTDDATVILRCDIIEPTTMQGYERDPRSVAKRAEAYLTSTGIGDTAFFGPEPEFFVFDDVKWHADMSGAGYSINSEEAAWSSSAHYDDGNTGHRPRVKGGYFPVPPVDSLHDIRAAMCSAMEQMGLDVEVHHHEVGTAGQCEIGIRFNTLVKKADEVQILKYCVHNVAHAYGKTATFMPKPLVGDNGSGMHVHQSVAKDGDNTFAGDGYSGLSETALYYIGGIIKHARALNAFANASTNSYKRLVPGFEAPVMLAYSARNRSASIRIPYEPSPRGKRVEVRFPDPTANPYLAFAAMLMAGLDGIQNKIHPGEAADKDLYDLPAEEAKAIPTVASSLEMALDALDQDRDFLTRGEVFTDDMIDAYIDLKREEIQRLDMTTHPVEFDMYYSV

SEQ ID NO: 11222 - protein, 903 aa, Synechococcus sp. MA19
MRILKIQTLRGPNYWSIRRHKLIVMRLDLENLAETPSNEIPGFYEGLVEALPSLESHYCSPGCRGGFLKRVREGTMMGHIVEHVALELQELAGMHVGFGRTRQTSTPSVYQVVFEYQNEEAGRYAGRAAVRLCQSIVDRGRYHKARAEQDLQDLKDLWRDAALGPSTESIVKEAEKRGIPWMQLGARFLIQLGYGVNQKRIQATMTDQTGILGVELACDKEATKRILANAGIPVPKGTVINFLDDLEEAIEYVGGYPIVIKPLDGNHGRGITINIQNWEEAEAAYDAARQISRSIIVERYYQGRDHRVLVVDASSAVAERVPAHVVGDGRSTIAELIEETNKDPNRGEGHDNILTKIELDRTSYQLLERQGYTLDSILPQGEICYLRATANLSTGGIAVDRTDEIHPENVWLAQGVVKIVGLDIAGIDIVTPDISRPLREVDGVVVEVNAAPGFRMHVAPSQGTPRNVAAAVLDMLFPSEQSSRIPILSIIGTNGKTTTTRLLAHIFKQTGKVVGYTTTDGTYIGDFLVEAGDNTGPQSAQLILQDPTVEVAVLETARGGILRSGLAFHAANVGVVLNVAADHLGIGDIDTIDQLAHLKSVVAEAVFPDGYAILNADDPRVAAMAERTKANVGYFTMNPDSELVRNHIQKGGVAAVYENGFLSILKGDWTHRIEKAENIPLTMGGRAPFMIANALAASLAAFVQNVSIEQIRAGLSTFRASFSQTPGRMNLFNLGSFHALVDYAHNPHSYEALGCFVRSWTNGKRIGVVGGPGDRRDQDFITLGKLAAEIFDYAIVKEDDDTRGRTRGSAADLIIRGIKQVNPKYKYESILDETQAINKALDIAPENSLVVILPESVSRAIQLIKARGVVKEEITQQNSASTTTDSQVGATSSNVVNTVNTIL

SEQ ID NO: 11223 - protein, 159 aa, Oryza sativa
MDRVEEKEGNRFQEPASDRCEDNEDKEQDNSEESSSVDQRKEEEEEEKEGCEEATPAAAAAAAAPSFFAHPCSLLQYIARVCACCLGLSDSFCDPKASSVLVPEPEPAAADPSQEGEEDMKSSYFYMQEATTRVRAARLRPKPPGNPREGSGGNGGHHH

SEQ ID NO: 11224 - protein, 205 aa, Oryza sativa Japonica Group
CLYKTPYISRCYVLLIILIDCLLPGSVKEALQKLRENNVKSFVLDLRNNSGGLFPEGIEIAKIWMDKGVIVYICDSQGVRDIYEADGISTVAASEPLVVLVNKGTASASEILAGALKDNKRAVIYGEPTYGKGKIQSVFALSDGSGLAVTVARYETPAHTDIDKVGVIPDRPLPASFPTDEDGFCSCLRDSNSACNLNAAQLFTR

SEQ ID NO: 11225 - protein, 585 aa, Cryptococcus neoformans var. neoformans JEC21
MRMAMQLSVERRWIVSGTPTRNLQQGGQMELQEMDLIGIHGSYDNAIGTASRRAWSKRDIEDATRLGVMMGGYLAAEPFKSEGRFQQYVTTHLRGKNGPSFGAVQRMKYLLSGILVKHGPKVIDTEARLPPLTILQEVIQFDPLQRVTYNVLAALIASNVYTSGGEDVDYFLHPRNIESFNQVVTNLHLACFWYSARDMEAENCLARTHDWLRNHPHCSEQVRENLQEACQHLQTALETPGWMEWMENGISIPCDGPYLPPLIKQAWSDSFDTQPDMIDVHSLNSLRALNVMGANIQELHMAGWQHRSHKCDWFWEVLTKGVPKHVLETDFGRKAVKAVAKLKNKKHREGKGRTTSAAHAPKAVPRSPSKLTKKRTGREGEIDDRLDEAGMNAISIGRQVPKSIDEGPRPLPLTIVTKTRSAKVNFILHAILDAPKNDKFVIFGNNYELGHLTEALDLLDIASTFVGHTLHVQNRRLALDYFETPGVRVCLMDLKLAARGLNLVSANRVIFLGPVWSLDVQAQAIKRVHRIGQTRPTLVQILVTEGTFEEDIARRSTTSRSADEEQLYSRAMIEVGSLGLADHRY

SEQ ID NO: 11226 - protein, 389 aa, Zea mays
MEVGDARNGSAAAALTKGGADDAARKPLPPCCVKAKARVPETEANCHDTVVSGWFTEPRSRFGKTSKVQYFNNPMWPGEAHSLKVEKILFQGKSPYQEILVFESSTYGNVLVLDGIVQLTDKDECAYQEMVTHLPLCSIPAPKNVLVVGGGDGGVLREIARHDSVETIDICEIDQLVIDVSKEFFPNLSIGFKDPRVRLHVGDAVDFLRNSPEGKYDAIIVDSSDPIGPAQALVEKPFIQTIARALKPGGVLCNLAESMWLHTHLIQDMLAICRQTFKGAVHYAWTSVPTYPSGVIGFLLCAKEGRAVNFLTPANPIEKIEGAAKAGRELRFYNSEIHRAAFVLPTFVRRELEAYTTPISSAENEKPKESVSEPQKIKILSNNAILTAS

SEQ ID NO: 11227 - protein, 478 aa, Corynebacterium diphtheriae NCTC 13129
MAFTSTEDVIKYIKEENVEFLDIRFTDVPGREQRITIPASMFTEEAAEDGFAFDGSSIRGFTTIDESDMNLHPDIATAMVDPFRKAKTLNMKFFVHDPFTREPFSRDPRNVARKAEQYLASTGIADTCFFGAEAEFYVFDKVSYEIEGNRSHYEVDSDNGWWNRGVDQNLDGTHNRGYKTPFKGGYGQCAPYDTLEDLRDEMTLTLRDAGFDIERQHPECGTGSQQEINYRFNTLLHAADDLQTFKYIIKNTAFRNGKTATFMPKPLAGDNGSGMHAHQSLWKDGKPLFHDEVGYAGLSDMARYYIGGILHHAGAVLAFTNPTLNSYHRLVPGFEAPINLVYSQRNRSAAIRIPITGSNPKAKRIEFRAPDPSGNPYFGFAAMMLAGLDGIKNRIEPHAPVDKDLYELPPEEAASIPQAPTSLEASLKALEEDNEFLTDGDVFTDDLIDAYIKLKYDNEIAPVRLRPTPQEFEMYFDC

SEQ ID NO: 11228 - protein, 290 aa, Prochlorococcus marinus str. MIT 9211
MLKHRLLSKIFSTWIDEYQEDARFGLKGKIIIDEESEFQKITLIESKRYGKALLLNNCWMTAEHQEKQYHECLVHPALSSAEKIYKILIIGGGDGGTARECLKYREVQQIDLIEIDRRVVELSQKHLPEIGGNAWKDERLNLQIANGINWVAQSQDNSYDVVIIDGADPEGPSEGLFNKAFFEDCRRILKDGGIFSTQSESAEAFHAIHIDMVKIIREVFDYASPLYGNVPIYPSGWWSWTFASMKKPRYLKPIPNRVNEILQSCEIWSPRWQSGAFNSIPAFLERALNQ

SEQ ID NO: 11229 - protein, 158 aa, Streptococcus intermedius
MTKIYDFSIFDQNNRSISLEIYKGNVLLIVNTATGCGLTPQYKGLQHLYTRYQNQGFEILDFPCNQFMGQAPGTAEEINRFCSLHYQTTFPRFAKVKVNGKEADPLYIWLKEQQAGPLGKRIEWNFTKFLINREGQVVKRFSSKAEPKEIEESLQKLL

SEQ ID NO: 11230 - protein, 439 aa, Thermus thermophilus HB27
MKRRAWFMVGLGVLLALVYAQLPRPQAETFLQNPNGQALLEVYQRIQQDYLEPLSKEKLDKLLEGAIGGMVQALEDPFTSYSPPQRSTLRQEDLRGEFFGIGATLSAANPDGTGARIEGVMKGLPAQRAGLRAGDVILEVDGEDVTKLPLLDIVAKIRGREGTKVTLKVRREGVPAPLVFELVRERVEIISVSTAKVGDVGYVALETFANFKVEDQLKRAIEELKAQGVKKLIFDLRDNGGGLLDQGCAVASAFLKEGPIVYTRTKNLTRVWCEATGQTLWDGPMVVLVNGNSASASEIVAGALQDYGRAKVIGEKTFGKGVGQTPYTLANGGELTLVTFEWLTPKRRSINKEGITPDIVVKDTRFPTPFSLQGAGAPPGAEIAVTLNGKTVKVKADAEGKFSYAEPQRQRPLPEDRGQAVLDLENDAILKRALEELNR

SEQ ID NO: 11231 - protein, 1197 aa, Oryza sativa Japonica Group
MARYPAPTSSRAIGAPIQPTEPHAPLPNTGGEGAPPPARTMPPPSSQAATSTPPAAATPLQRPPAQATAQPSTQRYYVGVQRDKGTGKWAACVVDPSNPTKHRLVGAFPDEHAAALAHDRLDLAFRGGGHRGAGDNFRPAFHAVELEFLRLCAATSSPGSHCGLVAGGDKYDEKYSEFLRKIYHGVMDNSPSYKKFFDVILDFFIARAREIGREALEDGGDMLVERFVAMHKNKAVTPRWRAWYRSDSRKVLQIPLSLRGGGGEIDHSTQKEARMDSDSCKRRKHESGHDSSSRVQSQSSILSRNRILCHQLLEQCDDLKYGSSTNDYKAISMKRLELISILQKLQEVPIQLPYASPLKSSETNRLVQDGRNSSCRNIIDLDSDNDEDYTFANVDNIGANTTVVLVDSDDGDSVASFVDEKSSDSKQNANYIEESVLPEQHAQQQEISMLDNENISSEAQAVKKGKDSMDINDVIYNKSGHEEIGEEEAQAENVQIKGNLKKEIISVASDELACEVMRSQSPTNGNFDQYDNSSPVDELEGLWMDMYLAMACSKTVGSDHNIVPSENSCEQAEDECQHDFLMKDDLGIVCRVCGLIQQRIENIFEYQWKKRKQSYRARPSEHRNSSDADAIDKTSGAILEVVPDALCLHPQHSQHMKPHQVEGFNFLVKNLADENNPGGCILAHAPGSGKTFLIISFVHSFLAKYPAGRPLIILPKGILSTWRTEFLHWQVDDIPLYDFYSSKADKRSEQLKVLNLWEESRSILLLGYQQFACIVSDHTSDTEAIMCQEKLLKVPSLVILDEGHTPRNEETDLLTSLENIRTPRKVVLSGTLFQNHVREVFNILKLVRSKFLKMDKSRAIVNCILSKVDLMGKSARSKNISDKDFFDLVQEHLQKDGNDKMRAVIIQNLRELTADVLHYYQGKLLDELPGIVDFTVFLNMSSKQEHIIKGLDGINKFAKRSRCNAVSLHPCLKNANKADADDGNVTNRKIGSIISGIDINDGVKAKFVHNLLSLSEATGGKVLVFSQYVRSLIFLEKLVSRMKGWKSEVHIFRVTGGSTQDQREQAVHRFNNSPDARVFFGSIKACGEGISLVGASRIVILDVHENPSVMRQAIGRAYRPGQSKMVYCYRLVAADSPEEDDHHTAFKKERVSKLWFEWNELCSSDDFELATVDVSDSEDRFLESSALKQDIKALLKR

SEQ ID NO: 11232 - protein, 174 aa, Glycine max
MSDAPASPSHESGGEQSPRGSLSGAAREQDRYLPIANISRIMKKALPPNGKIAKDAKDTMQECVSEFISFITSEASEKCQKEKRKTINGDDLLWAMATLGFEDYIEPLKVYLARYREAEGDTKGSARSGDGSARPDQVGLAGQNAQLVHQGSLNYIGLQVQPQHLVMPSMQGHE

SEQ ID NO: 11233 - protein, 1157 aa, Debaryomyces hansenii
MRQFFCTSSLLVSLLPYYITLQIAMEEEESPLDQLGVKFVDQDELEHDITKKANEALINKDTELDQKRLDKANNDYNKASSKLRILRNRLSNPRTKISQRKPLKDECDWIEKNELEPLKQDIVDITNRLNENKSQLSESKNQCNQKKSTQSINEKLPGESERDFLIRTGKITAFGNENAFHQDKTNEPDDIKSHVFLRAPGFEDANVTTQNDDDYDYGATENAMPSSYNETNKRKQSEMEGSENESDYSPLEENQNASEEEDIDNDNVVDDDYDIYSAPNEVVTETKNLDAQRNVDDGDEYLYQIRLKNWIKRRSELRKKTEEVTNETNDKEEWFKPHPTIPDAVLNSKFKLPGDIYPSLFDYQKTCVQWLWELYSQKTGGIIGDEMGLGKTIQIISFLAGLHYSGLLEKPVLVVVPATVMNQWVNEFHRWWPPLRCVILHSIGSGMGKNAIHSEEKIEAFLETTDPSSVKNDSFKGINSHMRAKEIIDTVMEKGHVLVTTYVGLRIYSKFILPRQWGYVVLDEGHKIRNPDSDISLTCKQIKTYNRIILSGTPIQNNLIELWSLFDFIFPGRLGTLPVFEQQFSVPINMGGYANASNVQVQTGYKCAVILRDLISPYLLRRLKSDVAQDLPKKNEMVLFVKLTQYQQDLYEKFLSSEDLHAILKGKRNILMGVDILRKICNHPDLVDREILQRRKNYNYGNPAKSGKLQVLKNLLQLWQMQGHRTLLFCQTKQMLDILEKFVTNLPSLNENGEEVRGTFNYLRMDGSTNIGRRQALVDTFNEDKQYHVFLLTTKVGGLGINLTGADRVIIYDPDWNPSTDIQARERAWRLGQKKDITIYRLMTAGSIEEKIYHRQIFKTFLTNKILKDPKQRRFFKVNDLHDLFSLGDQDEVGTETGDLFNGSETKFNGKKDRKSNKLFKPKHKNDDDFYQVANINGVSKLDNFEGDNQEKDGEQDGNKDESRIMEGLFANSGVHSALKHDDIMDSSKQEVSIIEKEANRVAAEAAEALKRSRKLTRKNNIGTPTWTGKFGLAGKFGPKVKRTKLSSNDKPSKLLSSTSILSELKQKKNKSDTVFAKKSANDDKKFDRQEMLDKLIGFLAKQTDHFSTSNNILTDLKLELNDEKDMILVRSMLREIATWDTPRKGWILKQEFLTNS

SEQ ID NO: 11234 - protein, 471 aa, Arabidopsis thaliana
MADTPSSPAGDGGESGGSVREQDRYLPIANISRIMKKALPPNGKIGKDAKDTVQECVSEFISFITSEASDKCQKEKRKTVNGDDLLWAMATLGFEDYLEPLKIYLARYREGDNKGSGKSGDGSNRDAGGGVSGEEMPGKLEISELFIVELIDNYFGFTLNFAARVKIDFVQPMAHKESKWNHRKSLAWDTAFSTNPGVLDPEELFGSLKIDENEIEVEVNHNHTLPSKTDARPSFAWDNAFFTDPGVLDAEELCLVNNGFTSNTQLRKSADTTTTQGSRFSVASIEFDLFHDLRASLRNSPNVKQTVTQETHRKLPDGIKRTKGYKQKVQPLSLIPQPKVSSSSSSSFSLSSISKSLTPSQAIREKKCVASELERNKEKHKNHGFEEQSGSKSNIRSSYSSYAVKDLTSSYSGLRLPLPKMGFFDSQENGEKENREPNALEANRRRRHKSKLETSSTPENRSILGQRKTRK

SEQ ID NO: 11235 - protein, 1219 aa, Chlamydomonas reinhardtii
MKEALSAFEDPDEDEVEDEVDKVLAHRDSDSLPQAPANDAWSGREFLVKWKRYSYIHCSWNSRAALEHLRGFKRVLNYVKKAGRRYFSREEQEMQDVEREMEAQLNQQHMMAPAATIPFEDRVVERVMAEKEATRAGGVGAGLGPDGRELVGPPGERRRELEEAEAEAVVVTKYLVKWEGLPYAECTWETAEDIIRAGGSAQIDSYLQREQRLLEPGRGVEAARKQFRIKGTRALERQPSYLNGGTLRDYQMESLNWMIYSWSENRNIILADEMGLGKTVQCVSFIGTLSEELQIRGPFLVVVPLSTVPNWIREFRRWVPFVNAVVYVGDSRSREVLRAYECDPSPHHKAARPYKFEVLLTTYELILKDAPILSRIKWAYLLELMEWHFGNKLLITGTPLQNSLKELWALLHFLEPSRFPTAEAFEAEYSLETADSVSGLHGVLRPHLLRRVIKDVEKSLPPKNERILRVDMTPLQKQYYKWILTRNFKELNKSSRGGGHVSLLNIIGELKKCCNHPFLFESAEDNYRGSEEDKSAVDRLIVPSGKMVLLDKLLRRLKATGHRVLIFSQMVRVLDIISDYMRLRGFPHQRLDGSTPAAARHAAMEHFNRPDSPDFAFLLSTRAGGLGINLATADTVIIFDSDWNPQNDLQAMSRAHRIGQTETVNIYRFVTSGSVEEDILERAKRKMVLDHLVIQRMDTSGRTILDPSAGKAGASAKQLFGKDELAAILRFGAEDLFKQAPPEDETASAERARTALYEDDLDAILERAEVVDTRQLAAADENAAAAAELLSAFNVATFKNEFGEDDAAFWNKLIPPSERPKEEEPGPPVDGAALRVDEWIVEVDDEGIPLIKEDGSEPDARSLSRRDAAAFVRAVRRYGRPERLADVAAEVGRSLEEAGPGPRLSLWYSLMDGCRLAVQKTTEEQSEDAKVAAARDPAVQHFRLDATSQLSVPKWGKELRALLEPALPDIKRMRKLQDGSITDKALVVGKKLWDLAAKTIGNGKTGEELHALHTRLAQQVDAYGFNAGCFGSRVHVALTTVRLNLPGTDCGSVSTDRDRDYDRERDRGARDRRDRDPRDRDRDRDYRSRDYERDRDRDRERDRDRDRSRDRARSRSYHEDRDRDRGRDRDRDYERRGGRSRSRDARRRSRSTSRSRSRDRRDRERDVARDRDRHGSGVLGKHGITGTAEQPAPRAPGASTPRNPRRGMCVSITFDCDMW

SEQ ID NO: 11236 - protein, 61 aa, Glycine max
ILTVFFCGIVMSHYTWHNVTESSRITTKHAFATLSFVLETFIFLYVGMDALDIEKWRFVSD

SEQ ID NO: 11237 - protein, 334 aa, Arabidopsis thaliana
  misc_feature (26)..(26): Xaa can be any naturally occurring amino acid
  misc_feature (51)..(51): Xaa can be any naturally occurring amino acid
  misc_feature (54)..(54): Xaa can be any naturally occurring amino acid
  misc_feature (109)..(109): Xaa can be any naturally occurring amino acid
  misc_feature (149)..(149): Xaa can be any naturally occurring amino acid
  misc_feature (155)..(155): Xaa can be any naturally occurring amino acid
  misc_feature (242)..(242): Xaa can be any naturally occurring amino acid
  misc_feature (278)..(278): Xaa can be any naturally occurring amino acid
SDAKETSATDLKRPREEDDNGGAATXETENGDQKKEPACFSTVIPGWFSEXSPXWPGEAHSLKVEKVLFQGKSDYQDVIVFQSATYGKVLVLDGVIQLTERDECAYQEXITHLPLCSIPNPKKVLVIGGGDGGVLREVARHASIEQIDXCEIDKXVVDVSKQFFPDVAIGYEDPRVNLVIGDGVAFLKNAAEGSYDAVIVDSSDPIGPAKELFEKPFFQSVARALRPGGVVCTQAESLWLHXDIIEDIVSNCREIFKGSVNYAWTSVPTYPSGVIGFXLCSTEGPDVDFKHPLNPIDESSSKSNGPLKFYNAEIHSAAFCLPSFAKKVIESKAN

SEQ ID NO: 11238 - protein, 126 aa, Debaryomyces hansenii CBS767; identical to SEQ ID NO: 1180

SEQ ID NO: 11239 - protein, 264 aa, Triticum aestivum
  misc_feature (77)..(77): Xaa can be any naturally occurring amino acid
MHPTRWELSHMVDLQAAALVISVVAAEVAVVSTQSPTYTCQISEYALAADIANSQKRPRCPAEIFKNSPLVVLSGFXGLGEPFKSFVTFFRHLVPAIDTDTVKLSTCQRILLLQYDKEMEAIDFRHYSIKLQPVGVSRKIRKLMQNNQVPDLRDLKDVSDYVTKAGYGSESEPDDEAATVSLASDIDKLNRASRKSAVRLQEIGPRMTMRLVKVESGLCSGDILYPQSVGKDVKEGQEEEEIEDAEDMMELEDGTEEDDSGDEE

SEQ ID NO: 11240 - protein, 750 aa, Streptococcus agalactiae A909
MIIDQLLQRSHSHLPILQATFGLERESLRIHQPTQRVAQTPHPKTLGSRNYHPYIQTDYSEPQLELITPIAKDSQEAIRFLKAISDVAGRSINHDEYLWPLSMPPKVREEDIQIAQLEDAFEYDYRKYLEKTYGKLIQSISGIHYNLGLGQELLTSLFELSQADNAIDFQNQLYMKLSQNFLRYRWLLTYLYGASPVAEEDFLNQKLNNPVRSLRNSHLGYVNHKDIRISYTSLKDYVNDLENAVKSGQLIAEKEFYSPVRLRGSKACRNYLEKGITYLEFRTFDLNPFSPIGITQETVDTVHLFLLALLWIDSSSHIDQDIKEANRLNDLIALSHPLEKLPNQAPVSDLVDAMQSVIQHFNLPPHYQDLLESVKRQIQSPELTVAGQLLEMIEGLSLETFGQRQGQIYHDYAWEAPYALKGYETMELSTQLLLFDVIQKGVNFEVLDEQDQFLKLWHNSHIEYVKNGNMTSKDNYIVPLAMANKVVTKKILDEKHFPTPFGDEFTDRKEALNYFSQIQDKPIVVKPKSTNFGLGISIFKTSANLASYEKAIDIAFAEDSAILVEEYIEGTEYRFFVLEGDCIAVLLRVAANVVGDGIHTISQLVKLKNQNPLRGYDHRSPLEVIELGEVEQLMLEQQGYTVNSIPPEGTKIELRRNSNISTGGDSIDVTNTMDPTYKQLAAEMAEAMGAWVCGVDLIIPNATQAYSKDKKNATCIELNFNPLMYMHTYCQEGPGQSITPRILAKLFPEL

SEQ ID NO: 11241 - protein, 160 aa, Myrica gale
MSTVEGREFSEDQEALVVKSWTVMKLNAGELALKFFLKIFEIAPTAQKLFSYLKDSNVPLERNSKLKSHATNVFMMTCESAVQLRKAGKVTVTESSLKRIGDVHFKLQVVDEHYEVTRFALLETIKEAVPEMWSPEMKNAWGEAYDQLVSAIKTEMKPPS

SEQ ID NO: 11242 - protein, 473 aa, Synechococcus sp. WH 8102
MAKTPQDVLRQIKDEGIELIDLKFTDLHGKWQHLTVCTDLLEEDSFTEGLAFDGSSIRGWKSINASDMAMVPDASTAWIDPFYRHKTLSMICSIQEPRSGEAYDRCPRALAQRALNHLSSTGLADTAFFGPEPEFFLFDDVRYNSSEGGAFYSVDTIEASWNTGRLEEGGNLAYKIQLKEGYFPVAPNDTAQDIRSEMLLLMGQLGIPTEKHHHEVAGAGQHELGMKFAELIQAADNVMTYKYVVRNVAKKYGKTATFMPKPVFNDNGSGMHVHQSLWKGGQPLFFGEGTYANLSQTARWYIGGILKHAPAFLAFTNPTTNSYKRLVPGFEAPVNLVYSEGNRSAAVRIPLTGPSPKAKRLEFRSGDALANPYLAFSAMVMAGLDGIKNQIDPGDGEDRDLFELPAEELAKIATVPPSLNGALEALNADRGFLTTGGVFSDDFIDNWIDLKYEEVQQLRQRPHPHEFAMYYDA

SEQ ID NO: 11243 - protein, 275 aa, Bacillus cereus E33L
MELWFTEKQTKHFGITARINRTLHTEQTEFQKLDMVETEEFGNMLILDGMVMTTEKDEFVYHEMVAHVPLFTHPNPENVLVVGGGDGGVIREVLKHPSVKKATLVEIDGKVIEYSKKYLPSIAGALDNERVEVKVGDGFLHIAESENEYDVIMVDSTEPVGPAVNLFTKGFYAGISKALKEDGIFVAQTDNPWFTPELITTVFKDVKEIFPITRLYTANIPTYPSGLWTFTIGSKKHDPLEVSEERFHEIETKYYTKELHNAAFALPKFVGDLIK

SEQ ID NO: 11244 - protein, 213 aa, Platylophus trifoliatus; identical to SEQ ID NO: 7756

SEQ ID NO: 11245 - protein, 567 aa, Gibberella zeae PH-1
MVFTSPDWVPKLPIDPPDSIPIAEFMKNEKYGRCPIAKSRHPFTCGITKRSYSAPQVFERSEFVARALAKRLQWQPNEGTPWDKVLAVFSLNTIDYITPIYGVHRLSGIVTPANAAYSVDELTHQLKASGAKALFTCTPLLETALEASKNVGIPEENIFLFEIPRAEPVSKFTHASIEDLVREGSELDRLDELQWVQGQGARQTAFLCFSSGTSGLPKAVMISHYNVISNVLQHTTYDSVARAKRGVTTQAVTGYLPLSHIYGLIIAAHTSPWRGDQVIILPRFELKDFLQSVQDFKIRQLLVVPPIIIQILRFKDICAKYDLSSVKFVYCGAAPLGEETIRDMSTLYPDWTIAQAYGEAHYRYKLINADTSSAKAKIIDTEGREITERDQPGELLLQAPSIVLGYLNNEKATSETFVYHHDGRWIRTGDEAIFTLAPSGNEHVVIVDRIKELIKVKGHQVAPAELEAHILAHPHVFDCAVIQVPDERAGEVPKAFVVKSSSAESLPDEEVARDIEKHVADHKAAYKQLKGGVEFLDVIPKSPSGKILRRLLRDTEREKRRGQGAKL

SEQ ID NO: 11246 - protein, 436 aa, Oryza sativa
MDSVVRTHIGHMLKMIHFCSMFLITFSDYKIQAILSSQQKRKAPEESDVAESSDCMITSPGFAVSPMLTPVSGKAVKTSKSKTKNNKAGPQTPTSNVGSPLNPPTPVGTCRYDSSLGLLTKKFINLLKQAPDGILDLNNAAETLEVQKRRIYDITNVLEGIGLIEKTLKNRIRWKGLDDSGVELDNGLSALQAEVENLSLKEQALDERISDMREKLRGLTEDENNQRWLYVTEDDIKGLPCFQNETLIAIKAPHGTTLEVPDPDEAGDYLQRRYRIVLRSTMGPIDVYLVSQFDEKFEDLGGGATPSGHANVPKHQPTEVFNTTNAGVGQCSNSVAVDNNIQHSQTIPQDPSASHDFGGMTRIIPSDIDTDADYWLISEGDVSITDMWKTAPDVQWDESLDTDVFLSEDVRTPSSHNQQPSAVGGPQMQVSDMHKP

SEQ ID NO: 11247 - protein, 447 aa, Oceanobacter sp. RED65
MSFIRYAIAFVALCFVLPASADKEANKDSQAVEGTATVSPSRLPLQELRAFAEIFERIRASYVEEVDDKTLLENAIHGMLNGLDPHSSYLNANDFEDLRTNTSGKFGGLGIEVGVQDGLIKVVSPIDDTPAQKAGVQAGDLIIKLDDVPVKGLGLNQAIERMRGEPGTDIILTILREGENQPLEITLTRAEIKITSIKHKRIEDDYGYIRITQFQENTGADLIDAINKLGLESDTPLKGYILDLRNNPGGVLDAAVAVSDVFLEQGTIVYTQGRVENADITYDATVDTQVPVAPVVVLINGGSASASEIVAGALQDHKRALVIGTTSFGKGSVQTVLPLDSEHALKLTTARYYTPKGRSIQAQGIEPDIIVQQGEFTAQKENRFYKEVDLQGHLENDKEDEQQKVQAKKDDSLQRDYQLSQALTILKGLSFAQSQSKDSESDTRDPS

SEQ ID NO: 11248 - protein, 627 aa, Zea mays
MIPKELSHSGMEIKEKSQTQETLKGFLRRAQNEFGLRIKKIRSDNGTEFKNSQIESFLEKEGIKHEFSSPYTPQQNGVVERKNRTLLDMARTMLDEYKTSDRFWAEAVNTACYAINRLYLHRILKKTSYELLTGKKPNVSYFRVFGSKCFILVKRGRKSKFAPKAVEGFLLGYDSNTKAYRVFNKSTVLVEVSCDIEFDETNGSQVEQVDLDELDDEEAPGVALRNMSIGDVCPKESEEPPQTQDQPSSSMQASPPTQDEDQAQDDDGDQEEPPQEEDNDQGGDANDQDNEDDEDPRSPHPRVHQAIQRDHPVNTILRNIHKGPHRIEEALQDSDWVLAMQEELNNFTRNEQLQEGTFISQMKYIQDILTKFGMKDAKPIKTPMGTNGHLDLDTGAAHHPRQVQSSPSPQPSAATRAHHAAAPPLVNGRRHHGGVQGLGMSEVEANAGGGGKEQDRFLPVANIGRIMRRAVLENGKIARDARESIQECVSEFMASDKCVKERRKTINDDDIIWSLGTLGFEEYVEPLKIYLNNYREVPKVHNKPIERPRKGSNKEGKRQPKCALVWRTGLSGEPPNSVRCTRELNSELLTFGNSGSRSAIIHRTVPCSTGLSGVPAEQRLLRANGRL

SEQ ID NO: 11249 - protein, 471 aa, Cupriavidus taiwanensis
MAHSVADVMKLVKENDVKFVDFRFTDTKGKEQHVSVPVSHFDEDKFESGHAFDGSSIAGWKGIEASDMLLMPDSNTAHIDPFYEEPTLVLSCDVIEPSDGKGYDRDPRSIAKRAEAYLKSTGLGDTAFFGPEPEFFIFDGVTWNVDMQGCFVKIHSEEAPWSSGKEFEHGNAGHRPGKKGGYFPVAPIDTFQDMRSEMCLILESLGIPVEVHHHEVAGQGQNEIGTKFSTLVQRADWTQLQKYVIQNVAHTYGKTATFMPKPVVGDNGSGMHVHQSVWKDGQNLFAGNGYAGLSEFALYYIGGIIKHARALNAITNPGTNSYKRLVPGFEAPVKLAYSARNRSASIRIPYVANPKGRRIETRFPDPLMNPYLGFSALLMAGLDGVMNKIHPGEAADKNLYDLPPEEDAKIPTVCSSLDQALEYLDNDREFLTRGGVFSNSMIDAYIELKMEEVTRFRMTTHPVEFEMYYSL

SEQ ID NO: 11250 - protein, 111 aa, Vitis vinifera
KVLVIGGGDGGVLREVARYSSIEQIDICEIDKMVVDVSKQFFPAVAVGYEDPRVKLHVGDGVAFLKAVPAGTYDAVIVDSSDPIGPAQELFEKPFFQTVANALRPGGVVTT

SEQ ID NO: 11251 - protein, 469 aa, Vibrio vulnificus CMCP6
MSVENVLSLIQENEVKFVDLRFTDTKGKEQHISIPSHQIDADFFEDGKMFDGSSVAGWKGINESDMVMMPDASSAVLDPFTEEATLNIRCDILEPATMQGYDRDPRSIAKRAEEYMRSTGLADTVLVGPEPEFFLFDDVKFATDMSGSFFKIDDVEAAWNTGSDYENGNKGHRPGVKGGYFPVAPVDSSQDLRSAMCLVMEEMGLVVEAHHHEVATAGQNEIATRFNTLTTKADEIQIYKYVVHNVAHAFGKTATFMPKPLVGDNGSGMHVHQSLAKDGVNLFAGDKYGGLSEMALYYIGGIIKHARALNALTNPSTNSYKRLVPHYEAPVMLAYSARNRSASIRIPVVPSPKARRIEVRFPDPAANPYLAFAAMLMAGLDGIKNKIHPGEAMDKDLYDLPAEEAAEIPKVAESLKQALEYLDNDREFLTAGGVFSDDFIDSYIELKTKEVERVNVAVHPLEFELYYSV

SEQ ID NO: 11252 - protein, 102 aa, Vitis vinifera
ECAYQEMIAHLPLCSIESPKRVLVVGGGDGGVLREISRHSSVELIDICEIDKMVIDVCKKFFPQLYVGFEDPRVQLHVGDAVEFLRHVPEGKYDAIIVDSSD

SEQ ID NO: 11253 - protein, 79 aa, Zea mays
  misc_feature (36)..(36): Xaa can be any naturally occurring amino acid
MGLFKKLNVGPLELGDYLAIGAIFLATYFVCTLQVXNHDETPLLYSLVFGEGVVNDATSVVLFNAIENLDIDKFDAIVL

SEQ ID NO: 11254 - protein, 306 aa, Triticum aestivum
  misc_feature (258)..(258): Xaa can be any naturally occurring amino acid
MGIPSQPASNAIIYLTLGAFLVVGCYIAFRLRNQSKLDWLASNRTQKGVPLALNFIASALGSGILFTYPQIATIAGVQGLLVYALSSSLPLLVFGALGPIIRRKCPEGFVLTEWTRQRYGAVAGLFLSACTLITMFLYMVAELSALQQIVTLLTGLNGLPVVIVECAVTTIYTSLGGFKVSFLTDNIQGVMVLGLIIMGVIAVGVETNIDRSLIDQSGYLKPSLLGWQLIYILPVAILTNDFFLSGFWLRTFAARTDXDLWIGVSLASFACCYLDLWCSCCCCRPLHCDARGISFFLAGAFLVVAA

SEQ ID NO: 11255 - protein, 205 aa, Ephedra foeminea; identical to SEQ ID NO: 7763

SEQ ID NO: 11256 - protein, 443 aa, Geobacter sulfurreducens PCA
MFKTIKGKRVALLLASLCVVAVLGAGAVQKRCAAEGGNDYESIELFTDVLAIVKKSYVEEVDTKKLIYGAINGMLASLDPHSSFMPPDMYKEMKIDTKGSFGGLGIEITIKDGLLTVISPIEDTPAFKAGIKAGDQILKIEDRFTKDMTIMDAVKRMRGPKGTKVTLTIMREGFDKPKEFTLVRDTIQVKSVRFKSMDQGYGYIRIAQFQEKTDDDLVKALKALKEENGGDLRGLVLDLRNDPGGLLDQAVKVADHFVEDGLIVYTEGREKESRMQFTARKSGTEPNYPMVVLINSGSASASEIVAGALQDHKRAVVMGTQSFGKGSVQTIIPLSDESGLRLTTARYFTPSGRSIQAKGITPDIVVERAEIQSTEKMEGHIREKDLENHFDSDSKDGSDNKQKGTDKGASAASKVDEQLKSDYQVMRALDLLKGWEILKTISK

SEQ ID NO: 11257 - protein, 515 aa, Arabidopsis thaliana
MEVLASSSLSPISFTKPNKINPNFSIQVKLWVKQPPKISKASKFSYARSRSNISRSNAANPGVVFVCNRFLCVIERNDQRKLSGKVMMKSSVNFRQNLSVALVRIVSVLLVSSISVVTTDSPPSWGLTEENLLFLEAWRTIDRAYIDKTFNGQSWFRYRETALRNEPMNTREETYMAIKKMVATLDDPFTRFLEPGKFKSLRSGTQGAVTGVGLSIGYPTASDGPPAGLVVISAAPGGPANRAGILPGDVIQGIDNTTTETLTIYDAAQMLQGPEGSAVELAIRSGPETRLLTLTRERVSVNPVKSRLCELPGSGSNSPKIGYIKLTTFNQNASSAVREAIETLRGNNVNAFVLDLRDNSGGSFPEGIEIAKFWLDKGVIVYICDSRGVRDIYDTDGSNAIATSEPLAVLVNKGTASASEILAGALKDNKRALVYGEPTYGKGKIQSVFELSDGSGLAVTVARYETPAHTDIDKVGVTPDHPLPKSFPKDEEAFCGCLKDPTAACYLNQGLLFSR

SEQ ID NO: 11258 - protein, 378 aa, Taxodium distichum
FSIKGNGIGNGNGHCNGYSNGHGHCINGYSNGISASVSSNGVSHLPYSNGNTVHHSNGNSHTSPSFGDGRRRCFWYEEEIEDDLRWCFALNRIIHTGVSEYQDIALIDTRPFGKALVIDGKMQSTEVDEFIYHESLVHPALVYHSHPKSAFIMGGGEGSTAREILRHKCVKKVVMCDIDKEVVDFCKKYLVVNREAFSNSRLELVINDARTELQSRQERFDVIIGDLADPVEGGPCYQLYTKSFYELVIKPKLNHQGIFVTQAGPAGVLTHTQVFSSIYNTLRQVFKHVMPYSAHVPSFADTWGWVMASDHPLTLKAEEIDDRIKQRIKGELQFLDGQTFLVAATLNKSVRKSLSKETHVYTEETARFIHGHGKASYQ

SEQ ID NO: 11259 - protein, 446 aa, Zea mays
MDRQKEFVLRTLEERDIRFVRLWFTDVLGYLKSVAIAPAELEGAFAEGIGFDGSSIEGFSRVSEADTIAKPDPSTFQVLPWTTSQGKHHSARMFCDIAMPDGTPSWADSRHVLRRQLNKAADQGFTCYVHPEIEFFLMKDAPTDGTPPTPADGGGYFDQVVHGSAPNFRRHAIDALESMGISVEFSHHEGAPGQQEIDLRYADALSMADNVMTFRYIVKEVAIGEGVWATFMPKPLSDHAGSAMHTHMSLFEGDTNAFHNPDDPMQLSDTGKQFIAGILQHAPEISAVTNQWVNSYKRLIHGGEAPTAATWGGANRSALIRLPLYTPNKASSRRIEVRSPDSACNPYLTFAVLLAAGLKGIAEKYELPDEAEDDVWALTSAERRTMGYTELPGSLAEALKAMESSELVAEALGEHVFDYFLRNKWTEWNDYRSRVTPFELGRYLSL

SEQ ID NO: 11260 - protein, 580 aa, Solanum peruvianum
ELLVGTPAKRQAVTNPTNTLSGTKRLIGRRFDDPQTQKEMKMVPYKIVKGSNGDAWVEANGQQYSPSQIGAFILTKMKETAEAYLGKSINKAVITVPAYFNDAQRQATKDAGRIAGLDVQRIINEPTAAALSYGMNSKEGLVAVFDLGGGTFDVSILEISNGVFEVKATNGDTFLGGEDFDNALLEFLVSEFKRTEGIDLSKDKLALQRLREAAEKAKIELSSTSQTDINLPFITADASGAKHLNITLTRSKFETLVNNLIERTRNPCKNCLKDAGVSLKDVDEVLLVGGMTRVPKVQEIVSEIFGKSPSKGVNPDEAVAMGAALQGGILRGDVKELLLLDVTPLSLGIETLGGIFTRLINRNTTIPTKKSQVFSTAADNQTQVGIKVLQGEREMASDNKLLGEFELVGIPPAPRGMPQIEVTFDIDANGMVTVSAKDKATSKEQQITIRSSGGLSEDEIDKMVREAEMHAQKDQERKALIDIRNSADTTIYSIEKSLSEYKDKVPKEVVTEIETAISDLRAAMGTENIDDIKPKLDAANKAVSKIGEHMAGGSSGGASGGGGAQGGDQPPEAEYEEVKK

SEQ ID NO: 11261 - protein, 176 aa, Arabidopsis thaliana
MAESQTGGGGGGSHESGGDQSPRSLNVREQDRFLPIANISRIMKRGLPLNGKIAKDAKETMQECVSEFISFVTSEASDKCQREKRKTINGDDLLWAMATLGFEDYIDPLKVYLMRYREMEGDTKGSGKGGESSAKRDGQPSQVSQFSQVPQQGSFSQGPYGNSQGSNMMVQMPGTE

SEQ ID NO: 11262 - protein, 439 aa, Alcanivorax sp. DG881
MPTTILPTLRSVALTGLLALSPLTALHAQDPALDEQARQQGVPVDELRAFAEVMERIRAAYIEDVDDRELLEAAIRGMLHDLDPHSNYLTPDQFDDLQVTTTGEFGGLGIEVTMEDGFVKVVTPVDDSPASNAGILAGDLILKIDDTFVKGLTLGEAVELMRGEIGTKIDLMVLSEGDEKPRQVSLERDRIQTHSVKSKMLEPGLGYLRISQFQNNTGDDARKALDKLNKDSALNGLILDLRNNPGGVLNGAVEVTDLFLDAGLVVYTQGRDKASRNDFDASAGDALNGKPLVVLVNGGSASASEIVAGALQDQERAIVVGNRTFGKGSVQTVLPLSKDRALKLTTARYYTPKGRSIQAEGIEPDIAVDVVTKIEVREDMHLREADLPRHLDNENGDSEKEKKRSSLAEDDYPLAQALSILKGVVLTQRPAHASQPDQP

SEQ ID NO: 11263 - protein, 469 aa, Bartonella quintana str. Toulouse
MITASDILKKITDNDIRFVDLRFTDPRGKLHHVTIDNAEISEDTFNDGVLFDGSSISGWKTINESDMVLMPDPETAHIDPFFAQSTLVIFCDVLDPVSGEFYRRDPRSIAKRAEVYMKSLGIGDTINVGPEAEFFIFDDVRYKTDPYNTGFKLDSGEFPSNDDTEYETGNFGHRPRIKGGYLPVPPVDSCQDIRSEMLTALKDMGVRVEKHHHEVAAGQHELGIRFDTLVREADKIQIFKYVVHQIAKSYGKTATFMPKPVFGDNGSGMHVHMSIWKDGKPIFAGNEYAGLSETCLFFIGGIIKHAKAINAFTNPSTNSYKRLVPGYEAPVLLAYSARNRSASCRIPMGFSPNSKRVEVRFPDPTANPYFAFAALLMAGLDGIKNKIHPGHAMDKDLYDLPPKELKEIPTVSGSLREALEELDKDRRFLKAGDVFDDDQINSFIQVKMQEVLRYETTPHPIEFDMYYSV

SEQ ID NO: 11264 - protein, 1088 aa, Legionella pneumophila subsp. pneumophila str. Philadelphia 1
MLNEAISKMPEAFEAKILLRGEEYFQKGQVLNIRLSDGLLKGRVKGSASQIYDIHMDLKSWPAKPSRCSCAYQYNCKHAAACLFALRDREKINLQSLPSNKLDRKLDVWLKNLRAQEASEIKREEATHHLTYLIDLKLRGYEHKVSIKLALAKLLKRGGYGKKIIFNTLANSKKQHFMGDDNDIVAQLLFKCNVSGWFDNLLIRNTELLDKIIATGRAFFIENEDTPIKKGETLTGECQWILSWNGNQILKLRHDNQNIEPLLLDESWYFDIKNVVMGHLNSPYPIKQLRHLLDAPPIPLEQAELLAKKMSKNCPEFPMPNVFNQKETKQLKPIPVLILDAVTEQEEHRWIDDGEENNSLYIAKVFFDYEGLLVPFAEECEKVVSLKGDVLVEYQRDKEFEDLKIQELRNSIDLRPYHQWEKYHWNLPDHSFFILKDVQIVSDLESLYQQSLPYLKDHGWRIEFASPFYQEIVSADEVEWYSDIQESTTDFFSYQLGILVEGKPVSIVPLVADLIQRYKGNDLDNLPDEQLVKLPLLDGRLLQLPMGRIKPLVRLLLQFGLRQIDQNLQLQINKYQLVLMQEVELAIAATKSRWQGAESLREELRKLVRLNDLPEIKIPSGLQAHLRDYQHYGLNWLQFLRVSRFNGVLADDMGLGKTVQTLAHLQYEKEQSRLHKASLIIAPTSLVGNWFAEAKRFTPEIRVLIYHGSDRHQDNFDDYDLIISTYGLIHRDKEKFVGYPFYYLILDEAQFIKNARTKTTQIIQQLKASHRLCLTGTPLENNLGELWSLFHFLMPGLLGDAKQFRLWFRTPIEKYADMGRRDLLAKRVQPFLLRRTKNQVANELPPKTEITRTIELVGAQRDLYEAIRMSMEKKVRDAIARQGLGKSHILLLDALLKLRQVCCDPRLLSMSEAEIAHGTSCKLDALMELLDNLVEEGRRVLVFSQFTSMLKLIEELLIVRQYDYLKLTGQTQNRQALVDQFQQGDTPIFLISLKAGGTGLNLTRADTVIHYDPWWNPSVEDQATDRTHRIGQESPVFVYKLITSGTVEEAILGMQEKKRQLVEGILSTDASRSMVLSEEDLNQFFMPL

SEQ ID NO: 11265 - protein, 862 aa, Arabidopsis thaliana
MAQFLRRFSSSPMANEDEFQSPVEPSQQQSQDCVSESYLIGFVIANIVGLKYYSGRINGREMVGLVREPLNVYDNNAIRVLNTRSEQVGHIERTVAAVLAPMIDSHTIVVEGIVPNTRSNSNRYRIPCQIHVFAKLEASSTVKSTISRGGLVLISESDTSFGLSEAVVVKEQMGNGDKRSVDKIFKLVDENVKLMGKLVAAEPPREVIKSELFAHQKEGLGWLLHREKSGELPPFWEEKDGEFLNTLTNYRSDKRPDPLRGGVFADDMGLGKTLTLLSLIAFDRYGNASTSTPTEEPLDGEGDKIEKKGKKRGRGKSSESVTRKKLKTDDVVGMNVSQKTTLIVCPPSVISAWITQLEEHTVPGILKVYMYHGGERTDDVNELMKYDIVLTTYGTLAVEESWEDSPVKKMEWLRIILDEAHTIKNANAQQSRVVCKLKASRRWAVTGTPIQNGSFDLYSLMAFLRFEPFSIKSYWQSLIQRPLGQGNKKGLSRLQVLMATISLRRTKEKSLIGLPPKTVETCYVELSPEERQLYDHMEGEAKGVVQNLINNGSLMRNYSTVLSIILRLRQLCDDMSLCPPELRSFTTSTSVEDVTDKPELLQKLVAALQDGEDFDCPICISPPTNIIITRCAHIFCRACILQTLQRSKPLCPLCRGSLTQSDLYNAPPPPPDSSNTDGEDAKSSTKSSKVSALLSLLMASRQENPNTKSVVFSQFRKMLLLLETPLKAAGFTILRLDGAMTVKKRTQVIGEFGNPELTGPVVLLASLKASGTGINLTAASRVYLFDPWWNPAVEEQAMDRIHRIGQKQEVKMIRMIARNSIEERVLELQQKKKNLANEAFKRRQKKDEREVNVEDVVALMSL

SEQ ID NO: 11266 - protein, 736 aa, Pinus sylvestris; identical to SEQ ID NO: 7781

SEQ ID NO: 11267 - protein, 2000 aa, Chlamydomonas reinhardtii
MLNSKVASPLKGRPLAGRGKENAKENKKSRPERDENTDVVEVGSDDENDFEAAPRPDQPRAGPAATHKAATSHHDDEEEDAIEDSDVGGNNAFLSFARPGKKPAPVAAPPKAAGGRPSRAAAAAASRRTARALKADNADSDELPTDGGEEQEAAPVQQKDARPARQQKQPVAQQRRPARAAAEKANKRLRRDSMEVDEASEDEDEEEEAADEESEEAAEGAFSEAEEEASGSSEDEEEEDGDEEEMEVDEEVKATRTTRRRTGAATAAKAATSARPSRACVARAAARATSRKASLGSDDYDEEEEEGGVAAAKKPAEGGDVVVIDGSSEDGEKPAARLAAPKRSRLRGGSANGAGADEGAEKEEAALADSDAELQDAGGDGDGDQELEDAEESDVSGDDEEQDVGCARKKAKTGAAKAKPAARAAAGKAKQPAAAPSAAATAAAGERSKAREAAAKGKPKEAVERILSYDPATDTYLVKLEGVSYRDTCRVSHSFLEAKRASMLRVYLSRGRPNTEVDADWTQVERVIAERSVARGRGAPRGRQLLVKWRGLEYSEATWEDEQELQGSEADKAAIERYEHFKAPVKRQSAGADGPSLRQLRQKDYQLPEFCSGRKLRDYQEVSVRWMVNNFCQRRNCILGDEMGLGKTAQSTSCLQTLRKVGGVPGPFLIVAPLTTLGHWQREVQTWTDMNVVLFAGSAADRAVILEHEFYHTGKAAAAAALLGGGGGSGRGGKEVKFHVLLTSYETLRQEKSLFKSIPWAAGVFDEAHKLKGLTSSTRATVEELDIRWLLLLTGTPIQNNMTELYSILSLLDPEGYPSLDDFNTRFGGAGPGQPPSVGQIKKLQEALAPMLLRRMKEDVEELPQKEEVVIWVELTQQQRAYYRGLYEGCIGALLGGGSSKNMPQMRNLAMELRKLCCHPVLCDGLEDDLKLKLTQQRLAAEAAAAAEGHAPDTEFKCPETEVLVRGSGKMTLLHKLLPKLRAEGKRVLIFSQFVMMLNVLEDYCTLMGYPVERIDGSIKGRERQQAIDRFSAADADQDKAFVFLLSTRAGGQGITLTAADTCIIYDSDWNPQNDLQAMARCHRIGQTKEVTVYRLISADTYEMALFSSASRKYGLDEAVLGFAAGTDPEADSARIADLLRNGAHGLLGDAEAGAKKGEAFAGEDINQILEGRTERRQIGSRAGNTFSVATFALDDAPGGGGAGDGLPPRRRGRGAAAAEDEAEKEYWRQLLPDAVANHENKATEAPVVLGPRKRTKVCYNVDAALKKRYANDSSDSDSDFEKEQSKDASGSGGEGGSGSDGGAKDEAAAAAVGKKRRRSAKRAAAEGGEGGGVEGAEGGEGAAAEGAGGETGKGKGRGRRPGAHWSKVEVKMLEDLVNSIGGDRWDVVVEAMQPTKRSPAEVEEAARALWALYGTAVEIARQRLNARIVAMRETSAPEPGAENAPAGAAAAQGAKPEGAGAEGAAAGGAGAPAGTDGFDKWELQLLEELNKLPESLRGVLAVPATVLRFRKEGTFFMNHMKDMMEVAAWVLPELAKRQEAAAAAAAAAAAGAAKDKEEGGAGGSSPSGSGPSPPPHLVPHIPVTEKSGLPGWWGRAEDDALLIAVAQVGYMRGRPSRTVAQALKAGHLATRLADLMPLAEAPAAEEDAEGGGKAKDTAKAAGADGSDDDVVMDDFKALQRAMAQRLSKVIDKALMNHRWEVNRAKMAAEGRSLPQSRPSAPPLPRPQAQLNLTKVTPPQPQQRPAAATPAAAAPAAAAAPAAVKPAPAAAIAPASARRSLPPSPVDRPEQRSLPLKAAGASKPNSAAGASTAPAAKGAAAASTADATALAAAHVAAVAAPAAVDAGDTKKDAPPAAAGDATAKASKAAAGGAAAGTGAAAAAGKKKQMTLPFARLSSGGAGGASVSKLKKPAATTTTTAAAAAAAATTAAAAAVTSTAAAAAAPAEPVPAAAPKAAAVKPLGKATLGGSSTPTRNIRSAAAPVPEPGSAERPIELDDSE

SEQ ID NO: 11268 - protein, 417 aa, Arabidopsis thaliana
MALNVSKVVPNSPILVKSVNASRSRRVLLAYVHHPLAANKGSSIEELKQGLCCTKTVTFVSSRRCSTLCFVGKPQDTETNSQVVQKEGEKQVMPRRKSSNSSQLLVEYVSNDAKFANERARNDFVLLSRGIMRLDARARQDVAILGSGFLKLDARAREDTEKIDRDVKRKAERLHHIATIFKNIAESKLKNAADKHWSDGALEADLRRADFRAKQRAMEDALMALEFIKNIHDMMVNKMVDSLVTSETGTTDRISLEKNGIALGFFPGEVSSDRISAIEEAYKSMASALSEADGIDYTDPEELELLVTTLIDLDAMDGKSSASLLAECSSSPDVNTRKALANALAAAPSMWTLGNAGMGALQRLAEDSNPAIAAAASRAINALKKQWEVEEGDSLRFMMNFERPNDDDDVDSDLDEI

SEQ ID NO: 11269 - protein, 238 aa, Populus trichocarpa
MLTSRSRILSQKYLNFASLSASFLLSKQSSFNSKQTLLPSLHNSPVSLYSQSIKAGVSRRLLGSVRFNHSMASQSSPQSAHDFTVKDAKGNDVDLSIYKGKVLLIVNVASQCGLTDSNYTELTQLYAKYKDQGLEILAFPCNQFGSQEPGSSEEIVEFACTRFKAEYPIFDKVEVNGNNAAPIYKYLKSSKGGLFGDNIKWNFSKFLVDKEGKVVDRYAPTTSPLSIEKEVKKLLGIA

SEQ ID NO: 11270 - protein, 162 aa, Populus trichocarpa
MGSEDLDNKIQDFQCPSSPLSLSLPHVNYSCGSCGYQLNLNSCNRNTPDIGVNYKKSIKKGSISFFSIDETRFTQIEELRCTPYFNSMRSWGLFQRRTKLLCYKCGNHLGIAYKENNTSSSPLRLGKCRSDLISWDGISDARIYVIKIRSLQPASTEDYSLS

SEQ ID NO: 11271 - protein, 638 aa, Vibrio campbellii AND4
MGKIIGIDLGTTNSCVAVLDGDKPRVIENAEGERTTASVVAYTDGETLVGQPAKRQAVTNPTNTLFAIKRLIGRRFEDEEVQRDIEIMPYKIVKADNGDAWVEAQGQKMAAPQVSAEILKKMKKTAEDFLGEEVTGAVVTVPAYFNDAQRQATKDAGRIAGLDVKRIINEPTAAALAYGLDKQGGDRTIAVYDLGGGTFDISIIEIDEVEGEKTFEVLATNGDTHLGGEDFDNRMINYLVEEFKKEQGIDLKTDPLAMQRVKEAAEKAKIELSSTSQTDVNLPYVTADATGPKHMNVKVTRAKLESLVEDLVQRSLEPLKVALADADLSVGDITDVILVGGQTRMPMVQEKVAEFFGKEARRDVNPDEAVAMGAAVQGGVLAGDVKDVLLLDVTPLSFGIETMGGVMTKLIEKNTTIPTKADQVFSTAEDNQSAVTIHVLQGERKQATYNKSLGQFNLEGIQPAPRGMPQIEVTFDLDADGILNVSAKDKATGKEQKITIQASGGLSDEEIEKMVQEAEANKEADKKFEELVTARNQADQMIHGTRKQVEEAGEALPADEKEKIEAAISELEEARKGDDKEAIDAKVQALMAAAQKLMEIAQQQAQAQQAQGADADAQQAQDDDVVDAEFEEVKDDKK

SEQ ID NO: 11272 - protein, 446 aa, Nocardia farcinica IFM 10152
MDRQKEFVLRTLEERDIRFVRLWFTDVLGYLKSVAIAPAELEGAFEEGIGFDGSAIEGFARVSEADMVARPDPSTFQVLPWATSKGHQHSARMFCDITMPDGSPSWADPRHVLRRQLNKAGDVGFSCYVHPEIEFFLLENGPQDGSPPRPADSGGFFDQAVHDAAPNFRRHAIDALESMGISVEFSHHEGAPGQQEIDLRYADALSMADNVMTFRYLIKEVAIDEGVRATFMPKPFAEWPGSAMHTHMSLFEGETNAFADPDDPDNLSATARAFIAGILEHASEISAITNQWVNSYKRLIHGGEAPTAASWGRSNRSALVRVPMYTPNKASSRRVEIRSPDSACNPYLTFAVLLAAGMRGIEKGYTLPPEAEDDVWSLTSAERRAMGFRELPGTLDEALQAMERSELVAETLGEHVFDFFLRNKRREWADYRSQVTPFELREYLGL

SEQ ID NO: 11273 - protein, 122 aa, Dickeya dadantii
LLDAINQRGSYPVRIVGAQQQVETVSQVSAVHSGSPQVVELIAGVDLVTTAVGPQILAKIAGAIAQGLVERHANGNTSPLNIIACENMVRGTSQLKQHVLTQLPEDTQAWVAQHVGFVDSAV

SEQ ID NO: 11274 - protein, 98 aa, Triticum aestivum
  misc_feature (24)..(24): Xaa can be any naturally occurring amino acid
VPTYPSGVIGFLLCAKDGPPVDFXTPVNPIEKIEGATKDGREMRFYNSEIHRAAFILPTFVKRELEAYNTSTEKEKPEKPAAKPVKMKVMRDSAITAS

SEQ ID NO: 11275 - protein, 269 aa, Archaeoglobus fulgidus DSM 4304
MVWFFEYYDGCGLAIKVKKKLYEAEGVQKVEIYETESMGKMLVIDGKIQLTELDEPFYHEMLVHVPMLSHENPRKVAVIGGGDGGALREVLKHNVERAVLVDIDRNVIDLSRKFLKIDHGAFEDERVEIAIMDGKEFLRDCEIFDVIIVDSTDPVGVSDTLFDREFFELARQKCDVISLQSQSPLIQKEYFRTLLVNSAPFERRDVYLSCVPTYPLALWSFIIGGEYDFSNLEERFERIKGKTVHYNPDVHRAAFALPEWLKKEVEACI

SEQ ID NO: 11276 - protein, 388 aa, Nicotiana attenuata
MEVISTNTNGSTIFKNGAIPMNGYQNGTSKHQNGHQNGTSEHRNGHQNGISEHQNGHKNGTSEHQNGHQNGTSEQQNGTISHDNGNELQLLGSSNSIKPGWFSEFSALWPGEAFSLKVEKLLFQGKSDYQDVMLFESATYGKVLTLDGAIQHTENGGFPYTEMIVHLPLGSIPNPKKVLIIGGGIGFTLFEMLRYPSIEKIDIVEIDDVVVDVSRKFFPYLAANFNDPRVTLVLGDGAAFVKAAQAGYYDAIIVDSSDPIGPAKDLFERPFFEAVAKALRPGGVVCTQAESIWLHMHIIKQIIANCRQVFKGSVNYAWTTVPTYPTGVIGYMLCSTEGPEVDFKNPINPIDKETTQVKSKLAPLKFYNFDIHKAAFILPSFARSMIES

SEQ ID NO: 11277 - protein, 291 aa, Pyrobaculum aerophilum str. IM2
MSKVPGPIVLMEPLSGKTSLIIKINAIHVSKRSKYQGILIVDTDDYGRTLVLDDYIQSSYYDEIYYHESLVHPAVTTHPRPSDVLILGGGEGATLREVLKHNTVKRAVMVDIDGDVVELSKKYLPQMHQGAFDDPRSEVRIEDGFVYVENALKRGEKFDVVIMDLTDPYSSDIAKQLYTPEFFGKVKRLLREDGIVVTQAGNSFYFPEAYDYVLQGVKGNFPIIAEYSVWIPSFGYAVNFVLGSLKHDPHSLSAEEVDKRLSERGVRAEFYSGKTHIALMNMPVIKKILRV

SEQ ID NO: 11278 - protein, 404 aa, Glycine max
  misc_feature (218)..(218): Xaa can be any naturally occurring amino acid
MALAANKVSSSPIVTKRTALCRSHEKHYFSSSTRINRIQLSRHRLEHGHLNYRCLHTQRSTLFNDWFWFFNGKPVGLISKKSSISCKSTGANNTEEKESITTYDDRAHTKDEKNDHTLVVHGLADACRFVCNDAKFLSRGIMRLDARARQDVAFLGTEFLKLDARAREDTEKIDRDVKEKASRLSHIATILKDKAQSRLKNAADEHWSDGALEADLRXADLRAKQRAMEDPLMAWSPLRRDKGSLSENNVRGRIMLEKNGKTTNSFPGDVTTERIAALQEAYWSMASALSEADGIDYTDPEELELLVRTLIDLDAMDGKQSVSLLAECSSSPDVSTRRALANALAAAPSMWTLGNAGMGALQVDDYNFMQEVLWTSNIASFYPTQRRKKKCVLSNRDSFPILVG

SEQ ID NO: 11279 - protein, 258 aa, Oryza sativa; identical to SEQ ID NO: 10813

SEQ ID NO: 11280 - protein, 529 aa, Arabidopsis thaliana
MSIGLTEFVTNKLAAEHPQVIPISVFIAILCLCLVIGHLLEENRWVNESITAILVGAASGTVILLISKGKSSHILVFDEELFFIYLLPPIIFNAGFQVKKKKFFHNFLTIMSFGVIGVFISTVIISFGTWWLFPKLGFKGLSARDYLAIGTIFSSTDTVCTLQILHQDETPLLYSLVFGEGVVNDATSVVLFNAVQKIQFESLTGWTALQVFGNFLYLFSTSTLLGIGVGLITSFVLKTLYFGRHSTTRELAIMVLMAYLSYMLAELFSLSGILTVFFCGVLMSHYASYNVTESSRITSRHVFAMLSFIAETFIFLYVGTDALDFTKWKTSSLSFGGTLGVSGVITALVLLGRAAFVFPLSVLTNFMNRHTERNESITFKHQVIIWWAGLMRGAVSIALAFKQFTYSGVTLDPVNAAMVTNTTIVVLFTTLVFGFLTKPLVNYLLPQDASHNTGNRGKRTEPGSPKEDATLPLLSFDESASTNFNRAKDSISLLMEQPVYTIHRYWRKFDDTYMRPIFGGPRRENQPEC

SEQ ID NO: 11281 - protein, 446 aa, Corynebacterium diphtheriae NCTC 13129
MNSQQEFVLQEIEERDVRFVRLWFTDILGFLKSVAVAPSELESAFEEGIGFDGSAIEGFSRISEADTIALPDPSTFKMLPSLNSDPTMRSARMFCDILNPDGQASNSDPRQVLHKQVQLAADEGFHCVVSPEIEFFLVQNLRTNGLPPVPTDNGGYFDQASQNDAPMFRREAMLALDRMGIPVEFSHHETAPGQQEIDLRHADVLTMADSIITFKHLMKQVAIDNNIGATFMPKPFRDHAGSAMHTHMSLFEGDINAFHDPDDEYGLSVTAKRFIAGIIHHANEISAVTNQWTNSYKRILFGNEAPTAATWGASNRSALIRVPTYRLAKAESRRVEVRSPDSACNPYLAFSVLLGAGLKGIREGYEIPDAAEEDISSLTRRERLAMGYKDLPTSLDQALREMERSELVADILGEHVFEYFLRNKWREWHDYQQQITPWELRNNLDN

SEQ ID NO: 11282 - protein, 121 aa, Glycine max
MASSMLSSAAVGTSPAQATMVAPFTGLKTSAAFPATRKANNDITSIASNGGRVSCMKVCPPDGKKKFETLSYLPDLTEVELGKEVDYLLRNKCTPCAEFQLEHEFVYRDHRSKPGYYDARY

SEQ ID NO: 11283 - protein, 670 aa, Yarrowia lipolytica CLIB122
MKFSMPSWGVVFYALLVCLLPFLSKAGVQADDVDSYGTVIGIDLGTTYSCVGVMKGGRVEILANDQGSRITPSYVAFTEDERLVGDAAKNQAANNPFNTIFDIKRLIGLKYKDESVQRDIKHFPYKVKNKDGKPVVVVETKGEKKTYTPEEISAMILTKMKDIAQDYLGKKVTHAVVTVPAYFNDAQRQATKDAGIIAGLNVLRIVNEPTAAAIAYGLDHTDDEKQIVVYDLGGGTFDVSLLSIESGVFEVLATAGDTHLGGEDFDYRVIKHFVKQYNKKHDVDITKNAKTIGKLKREVEKAKRTLSSQMSTRIEIESFFDGEDFSETLTRAKFEELNIDLFKRTLKPVEQVLKDSGVKKEDVHDIVLVGGSTRIPKVQELLEKFFDGKKASKGINPDEAVAYGAAVQAGVLSGEDGVEDIVLLDVNPLTLGIETTGGVMTKLINRNTNIPTKKSQIFSTAVDNQSTVLIQVFEGERTMSKDNNLLGKFELKGIPPAPRGVPQIEVTFELDANGILRVTAHDKGTGKSETITITNDKGRLSKDEIERMVEEAERFAEEDALIRETIEAKNSLENYAHSLRNQVADKSGLGGKISADDKEALNDAVTETLEWLEANSVSATKEDFEEKKEALSAIAYPITSKIYEGGEGGDESNDGGFYADDDEAPFHDEL

SEQ ID NO: 11284 - protein, 622 aa, Ruminococcus flavefaciens
MSKIIGIDLGTTNSCVAVMEGGNAVVIPNSEGARTTPSVVAFTNNGERLVGQVAKRQAITNHDRTVSSIKRHMGSDYKVAIDGKNYTPQEISAMILQKLKADAEAYLGETVTEAVITVPAYFTDSQRQATKDAGQIAGLTVKRIINEPTAAALSYGIDKEEEQTVMVYDLGGGTFDVSIIEMGEDVQQVLATAGNNRLGGDDFDQRIIDWIVDEFKKSEGIDLSQDKMAAQRLKDAAEKSKIELSSTTTSNINIPFITVDATGTPKHLDLTLTQAKFNELTADLVEATMGPVRQALSDSGLQISEINKVLMVGGSSRIPAVQEAVKKLIGKDPFKGINPDECVALGAAYQGGVLGGDVKNGLLLLDVTPLSLGIETAGGVCTRMIERNTTIPTKKSQVFSTYADNQPAVDINVLQGEREFARDNKQLGTFRLDGIAPAPRGIPQIEVTFDIDQNGIVHVSAKDLGTGKEQNITITSSTNMSKEDIDKAVKEAEQYAAEDKKRREEVDNKDEAENLVFQCEKALADFGDKVSADEKANIESKCASLKSAIEANNADEIKKLKEDLQKAFYDLSAKVYQQANPNGGAEGIDPSQFANMGGAGAADTGSSSSNDDGVVDADFTEV

SEQ ID NO: 11285 - protein, 159 aa, Prochlorococcus marinus str. MIT 9211
MKVSVTETSVQTSTGTIKKLGEYSGKVLLIVNVASYCGNTPQYSGLQELQNKFKDKGFAVLGFPCNDFGNQEPGTLDEIKEFCSVKFGADFEIFNKVHAKGFTTEPYTTLNKADPAGDVSWNFEKFLIGKDGSVVGRYEPSVQPLSEALISAIQLALDS

SEQ ID NO: 11286 - protein, 396 aa, Arabidopsis thaliana
MAATSNSGEDPTLSYHHRSPFRFELLQSISSSDPRYSSLTPSSTNRPFSVSQSLPNSQLSPLISPHWDDSYSQITQKVQKSRKNHRIQLGSIANMSGGESIDIAKVIVKQESSPQNVKRVYNKSKGGTKLLKAGKRMANGEVQNGGLNGASINCRYDSSLGLLTKKFVKLIQEAEDGTLDLNYCAVVLEVQKRRIYDITNVLEGIGLIEKTTKNHIRWKGADNLGQKDLGDQISRLKSEVESMQSEESRLDDLIRERQEALRSLEEDDYCRRYMFMTEEDITSLPRFQNQTLLAIKAPTASYIEVPDPDEMSFPQQYRMVIRSRMGPIDVYLLSKYKGDSAETSDKLGNESDQKAPVGVDTPSLKIVTSDTDLKADYWFESDAEVSLTDLWSNFNS

SEQ ID NO: 11287 - protein, 1193 aa, Arabidopsis thaliana
MGTEVSTSPTSLIDQTVVPGDVVLDLSNMTNQTIKLGSGLRQDNEVISVMRAGKLRYSKPNKYWVESSHKRYVPRPEDHVLGIVVDCKGENYWIDIKGPQLALLPVLAFEGANRRNYPKIQYFIGLFMSIIGTFTSSGVELINSISSGFAVLSDNIVITTLLYTRVVKTNTGMNPELSCVDESGKAAGFGPLKDGFMFETSTGLSRMLLSSPTCPVLEALGKKLSFETAFGLNGRCWVHAAAPRIVIIVANALMNSETLSGTQQRIMGCSTVVLSDSAVKKFSDNVVYRLYTKGLVVEESLSDTKISCIEVESMALIRGLRESFDLGIRQVVVYCDDQLLYQYIVGRGKIKKKVVHLVDEFQLLLEEMTYTDADLIALNDVNFAFKLAREAIVSRDDVKAEICSICFEETEGERMFFTTEKCVHRHCFPCVKQYVEVKLLSGTVPTCLDDGCKFKLTLESCSKVLTLELIEMWKQKMKEDSIPAAERIYCPYPNCSMLMSKTELSSESDLSNDRSCVKCCGLFCIDCKVPSHSDLSCAEYKKLHHDPLVDELKLKSLAKDKKWRQCKMCRHMIELSHACNHMTCRCGYQFCYQCEVEWKNDQKTCSSGCLLTGHGYYDDYDYNEPEYDFEVDTCNYYSDEEGRRWPSYEEYIDQQMANPKMMMWNTEQFFSEEENADGNDDNWDDYNNYGGLTANEQLLVVVAGFSRQRQANEQGLNSIITGDIPNSKGEGSSPAAKFMDNVVYRLCFKGLVNYEAVADDVEKAVKAGFGVAICDEKDNLLHEIKESLRDIEISRRGVEIMALVRGLSESFDLGMRNVVIYCDDDWIYQSIIGRGKSKKKIDHLVEEVQGILEKMACIDAVLVARNDVKFAFRLAREAIGRNSVDVNAEQGETCGIFFEETDVEHMFVTEKCLHRHCFPCVKQHVKVKLRSGTEPTCLEYGCKFKLTLERCSKVLTLKLIEMWKQKMKEDSIPAAERIYCPYPNCSMLMSKTELSSEADLSNVRTCVKCCGLFCIDCKVPSHTDLSYDDYKKLHPDPLVDDLKLKSLANDKMWRQCVKCRHMIELSHGCNHMTCRCGYEFCYECGIEWQKRDKVIMMMKIAMMTTQNMIVKRICASAIMMKMVVVGMILKIFYDAPRDDQDVVYKYPSPEQFFSEERNADGDDYIWDDYNNYGGLTGDKGGFDEGFFRDYYSL

SEQ ID NO: 11288 - protein, 371 aa, Nicotiana attenuata
MEVISTNTNGSTIFKNGAIPMNGHQNGTSKHQNGTSEHPNGHQNGTSEHQNGHQNGTSEQQNGTISHDNGNKLVGNSNCIKPGWFSEFSALWPGEAFSLKVEKLLFQGKSDYQDVMLFESATYGKVLTLDGAIQHTENGGFPYTEMIVHLPLGSIPNPKKVLIIGGGIGFTLFEMLRYPSIEKIDIVEIDDVVVDVSRKFFPYLAANFNDPRVTLVLGDGAAFVKAAQAEYYDAIIVDSSDPIGPAKDLFERPFFEAVAKALRPGGVVCTQAESIWLHMHIIKQIIANCRQVFKGSVNYAWTTVPTYPTGVIGYMLCSTEGPEVDFKNPVNPIDKETTQVKPKLAPLKFYNSDIHKAAFILPSFARSMIES

SEQ ID NO: 11289 - protein, 264 aa, Zea mays
MDSSFLPAGADNGSAGGANNGGGAAQQAPPIREQDRLMPIANVIRIMRRVLPAHAKISDDAKETIQECVSEYISFITGEANERCQREQRKTITVEDVLWTMSRLGFDDYVEPLSVYLHRYREFEGEARGVGLAPAPPRGDHHHHHHSVPPSMLNKSRGPGSGAVMLPHHHHHDMHASMYGGAVPPPPHHGFLMPHPQGGHYLPYPYEPTSYGGEHALASGYYGGAAYAPGNNGGSGDGSGGSASHAPPGGSGGGFDHPHTFAYK

SEQ ID NO: 11290 - protein, 180 aa, Solibacter usitatus Ellin6076
MMKMMLLGMAMGAMAFGASSVYDFTLNSIDGAPTPLSTFKGKVVLLVNVASKCGFTPQYAGLEKLYEKYKDQGLVLVGVPANNFGAQEPGSNEEIKTFCSRNYNVTFPMMSKVSVKGADKTPLYQYLTDASANPKTAGEIKWNFTKFLIDKKGNVINRFESAVTPESADMLKAIEAALAQ

SEQ ID NO: 11291 - protein, 478 aa, Nocardia farcinica IFM 10152
MTFSTADEVIQYIKEQDIEYIDIRFSDLPGVQQHFSIPAKAFTADLAEEGLAFDGSSVRGFQSIDESDMLLLPDYSTARIDPFRAAKTLNMNFFVHDPFTREAYSRDPRNIARKAEEYLRSTGIADTAFFGPEAEFYIFDSIRYESNMNGAFYEIESISGSWNTGAEFNPDGTLNRGYKVRNKGGYFPVAPYDHYVDLRDKISTKLQDAGFELERGHHEVGTAGQAEINYRFNTLLHAADDLQLFKYIVKNTAWQEGKTVTFMPKPLFGDNGSGMHVHQSLWKDGKPLFHDEAGYGGLSDLARHYIGGILHHAPSLLAFTNPTVNSYHRLVPGYEAPINLVYSQRNRSAAVRIPVTGNNPKAKRIEFRAPDSSGNPYLAFAAMLMAGLDGIKKKIEPLAPVDKDLYELPPEEAKNIPQAPTSLASVIDRLEQDHEYLTEGNVFTEDLIETWIQLKRDNEIAPVNLRPHPYEFELYFDV

SEQ ID NO: 11292 - protein, 155 aa, Olea europaea
LSGIVSILFTGIVMKHYSYSNLSDSSQKFVSAFFHLISSLAETFVFIYMGFDIAMEQHSWSHVGFIFFSILFIGIARAANVFSCGYLVNMFRPVHRQIPPKHQKALWYSGLRGAMAFALALQSVHDLPEGHGQTIFTATTAIVVLTVLLIGGSTG

SEQ ID NO: 11293 - protein, 446 aa, Thermus thermophilus HB27
MGYTKAEILKALKGENVKFLRLQITDILGVVKNVEVPESQFEKALDGEIMFDGSSIEGFTRIEESDMLLRPDYNTFVILPDLVEDPKRGRVARLICDVYYPDGRPFEGDPRYVLKRQIERLKKLGFDNLYAGPEPEFFLFLRTPEGLPTTETHDRAGYFDLAPIDKGEEARRDMVNALVAMGFEIEAAHHEVAPGQHEIDFKYADALTTADNIATFKWVVKRIALNHGLHATFLPKPIRGINGSGMHTHLSLFKDGENAFYDPNAEYQLSQTALHFIAGLLEHAAGMVAVTNPLVNSYKRLTPGYEAPTNIAWSASNRSAMIRIPARRGVGTRAELRMPDPSCNPYLALAVMAAAGADGIERKLLPPPPIQRNIYQMTVRERRKHKIRELPGTLREALEALRKDPVIREALGEHVYTHFLQAKQMEWDDYRVTVHQWELDRYLATY

SEQ ID NO: 11294 - protein, 122 aa, Pectobacterium carotovorum subsp. carotovorum
LLDALYSRTSYTVRIVGDNTQVDTVSNVSAVHSGSQDAVALIAVADLVTTAVGPQILEKIAGTIAQGLVKRHNDGNTRPLNIIACENMVRGTSQLKQHVLKLLPEGHQEWVVEHAGFVDSAV

SEQ ID NO: 11295 - protein, 116 aa, Pectobacterium carotovorum subsp. carotovorum
LLDALNSRTSYTVRIVGDNTQVDTVSNVSAVHSGSQDAVALIAVADLVTTAVGPQILEKIAGTIAQGLVKRHEDGNTRPLNIIACENMVRGTSQLKQHVLKLLPEGHQEWVVEHVG

SEQ ID NO: 11296 - protein, 1163 aa, Cryptococcus neoformans var. neoformans B-3501A
MAQYDSIQLGSVTLPVPADSTLPLSSWTPLTSAIVDSFTSSLPSSRLTIGLISKALNDPGLGFQAEICNKGISSKIRCRVTPSDAQGSIWKRLPWKGRDTVVKGLLKTLERVWDYDDKSEGVLMSLTGEDNQSMQDIYASVPSPEDPLFGEATNPLDQELHDSLSNYENPHGILTRLYLYQIMLQMETNPHKLVDPLFTPFREAGNNRIYYINLSTWDIQRHPGWFDLPRGGILCEQMGTGKTLMCLALITATQHQPTLPPNNSIEISPVFTTVAERSYPFPSHRDLRALTAFPYSQTALAFPSLVELCCNILSIHNPSAKRTSYLPPQIRSLFDRKTFYCMLPSDEDCLRTVRKRRVPNKVKKLYLAKGTLVVVPHILVAQWKLEIEKHTEEGALRLLEVGSDELPSVDELLDYDIILIDVARVFMGRFGTKIFALIPGSGFAYEETSFREQHNFAPSVLLQARWKRMILDEGHVAYSKVSNAMRMAMQLSVERRWIVSGTPTRNLQQGGQMELQEMDLIGIHGSYDNAIGTASRRAWSKRDIEDATRLGVMMGGYLAAEPFKSEGRFQQYVTTHLRGKNGPSFGAVQRMKYLLSGILVKHGPKVIDTEARLPPLTILQEVIQFDPLQRVTYNVLAALIASNVYTSGGEDVDYFLHPRNIESFNQVVTNLHLACFWYSARDMEAENCLARTHDWLRNHPHCSEQVRENLQEACQHLQTALETPGWMEWMENGISIPCDGPYLPPLIKQAWSDSFDTQPDMIDVHSLNSLRALNVMGANIQELHMAGWQHRSHKCDWFWEVLTKGVPKHVLETDFGRKAVKAVAKLKNKKHREGKGRTTSAAHAPKAVPRSPSKLTKKRTGREGEIDDRLDEAGMNAISIGRQVPKSIDEGPRPLPLTIVTKTRSAKVNFILHAILDAPKNDKFVIFGNNYELGHLTEALDLLDIASTFVGHTLHVQNRRLALDYFETPGVRVCLMDLKLAARGLNLVSANRVIFLGPVWSLDVQAQAIKRVHRIGQTRPTLVQILVTEGTFEEDIARRSTTSRSADEEQLYSRAMIENPRFVYAEKKQTSAFTVRFIPKGQILNPSENPRETTQTGAANLNWQKVGDNANATAISTSPTTVFGSYGASDQSTLDFPRSVLKKREGGGLEGTVARKKARVTFA

SEQ ID NO: 11297 - protein, 500 aa, Sulfolobus solfataricus
  misc_feature (49)..(49): Xaa can be any naturally occurring amino acid
  misc_feature (52)..(52): Xaa can be any naturally occurring amino acid
  misc_feature (65)..(65): Xaa can be any naturally occurring amino acid
  misc_feature (199)..(199): Xaa can be any naturally occurring amino acid
  misc_feature (227)..(227): Xaa can be any naturally occurring amino acid
  misc_feature (273)..(273): Xaa can be any naturally occurring amino acid
  misc_feature (296)..(296): Xaa can be any naturally occurring amino acid
  misc_feature (327)..(327): Xaa can be any naturally occurring amino acid
  misc_feature (331)..(331): Xaa can be any naturally occurring amino acid
  misc_feature (353)..(353): Xaa can be any naturally occurring amino acid
MGSSHHHHHHSSGLVPRGSHMASKSFQLLEPYNIKANLRPYQIKGFSWXRFXNKLGFGICLADDXGLGKTLQTIAVFSDAKKENELTPSLVICPLSVLKNWEEELSKFAPHLRFAVFHEDRSKIKLEDYDIILTTYAVLLRDTRLKEVEWKYIVIDEAQNIKNPQTKIFKAVKELKSKYRIALTGTPIENKVDDLWSIXTFLNPGLLGSYSEFKSKFATPIKKGDNXAKEELKAIISPFILRRTKYDKAIINDLPDKIETNVYCNLTPEQAAXYKAEVENLFNNIDSVTGIKRKGXILSTLLKLKQIVDHPALLKGGEQSVRRSGKXIRTXEIIEEALDEGDKIAIFTQFVDXGKIIRNIIEKELNTEVPFLYGELSKKERDDIISKFQNNPSVKFIVLSVKAGGFGINLTSANRVIHFDRWWNPAVEDQATDRVYRIGQTRNVIVHKLISVGTLEEKIDQLLAFKRSLFKDIISSGDSWITELSTEELRKVIELSVGGY

SEQ ID NO: 11298 - protein, 668 aa, Corylus avellana
MAGSWRARGSLVVLAILLFGCLFAISIAKEEATKLGTVIGIDLGTTYSCVGVYKNGHVEIIANDQGNRITPSWVGFTDGERLIGEAAKNQAAVNPERTIFDVKRLIGRKFEDKEVQKDMKLVPYKIVNKDGKPYIQVKIKDGETKVFSPEEISAMILIKMKETAEAFLGKKIKDAVVTVPAYFNDAQRQATKDAGIIAGLNVARIINEPTAAAIAYGLDKKGGEKNILVFDLGGGTFDVSILTIDNGVFEVLSTNGDTHLGGEDFDMRIMEYFIKLIKKKHGKDISKDNRAIGKLRREAERAKRALSSQHQVRVEIESLFDGVDFSEPLTRARFEELNNDFVQKDHGTREEAMEDAGLAKNQIDEIVLVGGSTRIPKVQQLLKDYFDGKEPNKGVNPDEAVAYGAAVQGSILSGEGGEETKDILLLDVAPLTLGIETVGGVMTKLIPRNTVIPTKKSQVFTTYQDQQTTVSIQVFEGERSLTKDCRNLGKFDLTGVPPAPRGTPQIEVTFEVDANGILNVKAEDKGTGKSEKITITNDKGRLSQEEIDRMVQEAEEFAEEDKKVKERIDARNTLETYVYNMKNQVNDKDKLADKLESDEKDKIESAVKDALEWLDDNQSAEKEDYDEKLKEVEAVCNPIITAVYQRSGGAPGGGSGEEDEDSESHDEL

SEQ ID NO: 11299 - protein, 130 aa, Triticum aestivum
MEKPPIPSIISTVTYCCGACGYDLRLSSLARDTAGGAGARRRCVGAAEVVFDAIDDARFGHLEEFRWLDVRACLPFSRRTRLLCRKCGARLGYGYDDTAAADRPPRYHIKIRALQPAPDPASDHAAPSDP

SEQ ID NO: 11300 - protein, 417 aa, Coxiella burnetii RSA 493
MDIYTLGSIVLTFAVLIAYVNHRFIRMQSTIAIMSASLLLSAIFIIFHHFHIANIGQLTENVIENIDFPDLLLKGLLNFLLFAGALTIDFNMLKAQKWEIGMLASLSTIVSTVLIAFILYYFLQFLHLDLPFLYCLLFGALISPTDPIAVLATFKQLGAPERLTACVAGESLFNDGVGIVLFITFYALTVNHIPATIEKISLLFLRQAVGGIIYGLLLGFITTQLLKSVKDYSLSILLTLAAVTGGYQLALALGISGPLAMVITGIMVGAYIRRDQDETHKKKTKALETFWEVIDEVLNAILFLLIGFELLAIKASTLQIVAILLTIPLVLLVRLITVSIPIKFIQLKRNHNPYIISILTWGGLRGGLAVALALSLPFNEYRNFILGMTYGVVIFSIIVQGLTIKPLTRLARRSHEG

SEQ ID NO: 11301 - protein, 152 aa, Vitis vinifera
METGGFHGYRKLSKTTSGMKLTEPNEKQPESNQMSNNSAMEDTECTVREQDRFMPIANVIRIMRKILPPHAKISDDAKETIQECVSEYISFITGEANERCQREQRKTITAEDVLWAMSKLGFDDYMEPLTMYLHRYRELEGDRATIRSEPVV

SEQ ID NO: 11302 - protein, 485 aa, Gluconobacter oxydans 621H
MKFRSGLLLGTAFLAGLAVGPGALRLAGSGDFPGAALAREISHDNSAETVRLLTLLGTVMDVVKAEYVHPVSDKDLINNALDGMVGNLDPHSSYMTAAQFHDMQTEISGKFGGLGLQVQGESGHVRVVSPIDGTPAARAGIQPGDFITMVDHKSIDDLTLDQAVRKMRGDPGTKISLTIVRPKTGKTLTFDMTREIVHVQIVKSALYGSTGYIRLTEFDDDLESAMHAAFDKLKAQATKASGGKLTGIILDLRSNPGGKLDQAIAVSDDFIKDGEIVSIRGRHAENNQRWDAKGTDITNGLPIVVLTNGGSASASEIVAGALKDHHRAIILGEKTFGKGSVQTLIPIGDQGAVRLTTARYYTPSGRSIQGLGITPDIPVAETKDDDAYGYREADLSHILTNIGGNRTNETPRTDIPPIAKSIPKMPDASWPAFDATKPATDFQLQQAIKVINAMAGLSNPAPATAPATEVKAAAPTAPKPPEAHH

SEQ ID NO: 11303 - protein, 581 aa, Pseudomonas fluorescens PfO-1
MKPHATAYSQRLLRGQTPSYERLQARLAEDGSEPAAEPIAVHCGWGRLLIGHTFPDPASLAQELLNEQPGERDIALYVAAPQQILGLEPTQLFLDPSDTLRLWFSDYRQATRVFRGFRIRRAQSDADWQGINQLYQARGMLPIDATLLTPHHQGGPVYWLAEDDDSGAVIGSVMGLNHQKAYNDPENGSSLWCLAVDPQCSRPGVGEVLVRHLIEHFMSRGLSYLDLSVLHDNRQAKNLYAKLGFRNLPTFAIKRKNCINQPLFLGPGPEAQFNPYARIIVEEAHRRGIDVQVDDADAGLFTLSHGGRRVRCRESLSDLTSAISMNLCQDKSLTHKVLKAAGLNVPSQQLAGNADDNLAFLDEHQRVVVKPLDGEQGQGVAVDLQTIEDVQQAIEAARQFDARVLLESFHEGFDLRILVIGFEVVAAAIRRPAEVVGDGHHSIGALIEAQSRRRQAATSGESKIPLDHETQRTLHAAGYDYSSILPAGEHLFVRRTANLHTGGTLEDVTAILHPTLAEAAVRAARALEIPMVGLDLMVPAADQPAYVFIEANERAGLANHEPQPTAERFVDLLFPHSQPAV

SEQ ID NO: 11304 - protein, 383 aa, Glycine max
MDSNSRYQVQQQHQHNSGLLRFRSAPPANLKQQGEAANNNGSAWEGSEPLLRFLNSGDTHDTTSSPTLREFVDNKVSNNSKPAKESSSPLSRMNSQQGYSTSMLPSRSTVTSAMMLGSMGKNQSAKSFDSNLLRQSSFPAGHFSNNISFQNGYDTMKGVGNYSGVNGNDGELSLSMNRMKNQISFSSISPSSSLGVLSPTSKIGTEGIRVTSTEDGRQGGSNGDARYFGPGFSYASWNEPSHHKRQRSSNDELLSDSQDGELGNQVQTLSHHLSLPRTSSDMFAMDSLLQFSDSVPCKIRAKRGFATHPRSIAERVRRSRISERIRKLQELVPNMDKQTSTAEMLDLAVDYIKDLQKEFKTLNDKRAKCKCINMQKSEADQVA

SEQ ID NO: 11305 - protein, 183 aa, Corchorus olitorius
MASAMMSSATVVNRASPAQATLVAPFTGLKSASAFPTTRKNNRDITSIASNGGRVQCMQVWPPLGKKKFETLSYLPDLTPVQLAKEVDYLLRSGWIPCLEFELEHGFVYREHHHSPGYYDGRYWTMWKLPMFGCTDSSQVLKELEEAKKAYPDAFIRIIGFDNRRQVQCISFIAYKPPSFKSG

SEQ ID NO: 11306 - protein, 392 aa, Barnebya dispar; identical to SEQ ID NO: 7830

SEQ ID NO: 11307 - protein, 399 aa, Clostridium tetani E88
MNKKKWIGWTIAIVLLTNTLTYIGSNIIPLAMPNGNVVVRKEDYNNLVQFNKLFQIKDLIHERYDGEINEKDLEEGAIKGLANSLKDPYTVFMTKKEYDDFNTQTEGNYSGVGIQLQAKDNKIVIVDIFEESPARKAGILPKDEIEKVNDIPVDGSQLEKAVSLMKGVEGSEVKLTLFRKDKGNFDVNLKRSKINLKTVAGQMLDEDVALVQVTMFDENTAKNFKSELDKLKSQGMKGLVLDLRGNPGGVLDECVDMVSNFVPKGKTIVSTMDKYKSERKYKSKGGNYVGLPLVVLTNEGSASASEIFAGAIRDYKIGTLVGEKTFGKGLVQTLYETGEGTALKITISKYYTPNGENINKIGIKPDVEVKYPEELLKKPYNRNEDPQFKKALEVVKEKI

SEQ ID NO: 11308 - protein, 392 aa, Blepharandra heteropetala; identical to SEQ ID NO: 7833

SEQ ID NO: 11309 - protein, 392 aa, Blepharandra heteropetala; identical to SEQ ID NO: 7836

SEQ ID NO: 11310 - protein, 432 aa, Oryza sativa Japonica Group
MRYLKGTMELGLHYSGYPAVLEEYSGSNWISDVDEIKATSGYVFTLGGGAVSWRSCKQTILMRSIMEAELTALDTATVEAEWLRDLLMDLPIVEKPVPAILMNCDNQTIIVKMNSSKDNMKSSRHVKRRLKFVRKLRNSGVITLDYIQTARNLANPFTKGLSRNVIDNASKEMGLRPIHEIEAYEKFKRSAVGTALYIHPCLSEISEGDAADRASNLTDATVDSLIESIIIKDGVKAKFFFNIMSLANSAGEKLLAFSQYILPMKFLERLLVKRLGWHVGKEIFMISGDTSADDREVAMDQFNNSADAKVLFGSIKACGEGISLVGASRVIILDVHLNPSVTRQAIGRAFRPGQQKKVFVYRLVAADSPEVKFHETAFKKEVIPKLWFEWSELCTTEDFKLNQVDIDDSEDELLEANAIRQDIKALYRRMLQ

SEQ ID NO: 11311 - protein, 323 aa, Solibacter usitatus Ellin6076
MHRQLICLLTVAACAQAPPKTYEYYLTGNAADVKPATRPGFVLMGGGKDVDAAFRWMLAKAGGGDVVVLRASGSDGYNKYIHEMGADSVESIVVKTAEAARDAFVLEKIRHAEALWIAGGDQWNYVRVWGASPMREEIHALIDRGVPVGGTSAGLAVLGQFVFTAEKDSVTSAQALANPYDERVKIGEDFVKIPALRGVITDTHFVKRDRLGRLLTFLARIVEDGKAAEARAIAVDERTAALVEPDGSVTIEGEGPAYFLRLAGKAEVCKPGRPLTIAKISVYRVKAGDSFDLKKWTGRGGAAYELSVREGVIASTQSGGGMY

SEQ ID NO: 11312 - protein, 392 aa, Blepharandra heteropetala; identical to SEQ ID NO: 7838

SEQ ID NO: 11313 - protein, 707 aa, Robiginitalea biformata HTCC2501
MKRNFLLAFLVPLIAVASCSFTSKSFESDDKDKLLLDLITYVLEKGHYEPKDINDDFSVSVYEDFIDVLDPTKRYFLESDIAEFEQYKFQIDDQIKNTDISFFNLVYQRLMERMQDARNMYGELLDEPFDFTADESIEIDYDKQEYAASEAEMRERWRKQLKYAAIGTYDSKISLSAEAGDGEGAISPEEAEKEARESTRQTLDEYFDFVEDLERKDWFVQYLNTIVDEFDPHTYYFAPEDKERFDVSMSGKFEGIGARLQQKPEGAKIVEIISGGPVWRDQRLEVGDEILKVGQKDEPPVNIVGMRLDDAIKLIKGPKGTEVVLTVRKVDGTVEEVTLVRDVVELEESFAKSSTVIKDNRKYGLINLPKFYVDFEDYNERNAATDVAREIERLKEEGVEGLVLDLRDNGGGSLKTVVEMAGLFIKDGPIVQVRSSARDKEIYEDRDERIQWDGPLVILVNELSASASEILAAAMQDYKRAVVIGSKQTFGKGTVQNVIPLENIVRSNEHGDLGAIKLTTQKFYRINGGSTQLEGVKSDVVVPDRYSYIDLGERDQQNPLKWDKISPANYEPWEGYIDYEETIARSAARMAAHPQIALIEENARWLKEQQEETVVPLSIADYRKREEKNKERSQYFRNNMKYDSKLTFSSLKYEQELFTQDSVLREKRDRWHQNLARDVYVEEAINVLEDLKLNHFKKDKLASRLDD

SEQ ID NO: 11314 - protein, 392 aa, Caucanthus auriculatus; identical to SEQ ID NO: 7841

SEQ ID NO: 11315 - protein, 572 aa, Aspergillus fumigatus
MPFHSRYHVDIPNIHLASLLLKSPTHPLSSTHRCFSEAARPNTHYFTTHDFRLWSQRFAAGLRKAGLQPGDRVLLFSGNDLFFPVVFMGIIMAGGIFTGANPTFVARELAFQLQDSGASFLLCADVSLDVGIEAAQIAGLSRDRVFVFNNAIFDGQGEGRKGCRYWGQLVASVEEGREFVWDELSTPEEADRTLALNYSSGTTGRPKGVEITHKNYVANMLQYNYMFYLNPDWKERSARARWLCFLPMYHAMAQNIFIAAALSREVPVYIMPKFDFIKMLEYVEKFRISDLILVPPVVVALAKHPAVKSGKYVLSSVETIGSGAAPLGREVCEEVEALWPPGRINVKQGWGMTEYGFLDFDCEETTCSILGWNPTEKSYSASVGELNANCEAKIMADDGVTEYGHNQRGELWVRAPNIMKGYWKNPQATEETKTADGWLKTGDIAYVDDNGRFHVVDRKKVKGNQVAPAELEALLLEHPAVADVAVIGVQVYLNRNDDERPRAYIVLKPGHNAAANDIVAFMDGKVSAIKRITGGVVFVDAIPKNPSGKILRKVLRERAKEETQKNGVTAKL

SEQ ID NO: 11316 - protein, 51 aa, Vitis vinifera
MKKNAGELGLKLFLKIFEIVSSAKKLFSFLKDSKVSLEKNPKLKSHAMTFF

SEQ ID NO: 11317 - protein, 160 aa, Thauera sp. MZ1T
MSSPLYDLEVDRLAGGTTTLGEYAGKLLLIVNTASQCGLTPHYAGLEKLYQTYKDRGLVVLGFPCNQFGAQEPGSAEEIGAFCTRNYGVSFPMFAKIEVNGDGAHPLYKYLKQHAKGILGTEAIKWNFTKFLVSRDSERIERYAPTTTPEELVKEIEGML

SEQ ID NO: 11318 - protein, 158 aa, Schizosaccharomyces pombe
MSHFYDLAPKDKDGNPFPFSNLKGKVVLVVNTASKCGFTPQYKGLEALYQKYKDRGFIILGFPCNQFGNQEPGSDEEIAQFCQKNYGVTFPVLAKINVNGDNVDPVYQFLKSQKKQLGLERIKWNFEKFLVNRQGQVIERYSSISKPEHLENDIESVL

SEQ ID NO: 11319 - protein, 433 aa, Prochlorococcus marinus str. MIT 9515
MFLLATTFSGILVSDYAKATILINNYKEVIDHVWQIVYRDFLDSSGKFERSNWINIRKNFLDKKYSDSNEAYDAIRSMLLKLDDPYTRFLDPKEFNQMRIDTSGELTGVGIQIVKDKESDDLIIISPIEGTPAYEAGIKARDKILSIDNISTKGMNIEDAVKLIRGQRGTKVKLEIFRNGDSFYKSLFRKRIEIKSVTSKINDTKDGFLIGYVRIKQFNANASKEMKETIKDLEMKKVSGYVLDLRSNPGGLLESSIEISRQFIDKGIIVSTLSKGGLREIKKGNGNALTQKPLMVLVNEGSASASEIVSGAIRDNNRGKLVGMKTFGKGLVQSMRTLVDGSGLTVTVAKYLTPNGTDINKFGIVPDIEVKMNSNPILLKEVGTRRDRQYRVAEKELIKLIKKSDLVRNFEPNSSNLSEVFGEKYHNLVYKFY

SEQ ID NO: 11320 - protein, 223 aa, Arabidopsis thaliana
MGKKCDLCNGVARMYCESDQASLCWDCDGKVHGANFLVAKHTRCLLCSACQSLTPWKATGLRLGPTFSVCESCVALKNAGGGRGNRVLSENRGQEEVNSFESEEDRIREDHGDGDDAESYDDDEEEDEDEEYSDDEDEDDDEDGDDEEAENQVVPWSAAAQVPPVMSSSSSDGGSGGSVTKRTRARENSDLLCSDDEIGSSSAQGSNYSRPLKRSAFKSTVVV

SEQ ID NO: 11321 - protein, 1032 aa, Streptococcus pyogenes str. Manfredo
MMARLIPGRVRNEGIKLYEQGLVSFQDDNKGILQIEVETYQVQYGADDEDITCQCDTFHMKHYCKHIAAVEYFLKNDQKGKLFLKQLTNQTKIKETTKKMTSFGSLFLDSLAMNEDDSVKYRLSALGSRSPFSSDYWWSLKINRLPDDRSYVIRDIKGFLQLIKKEGFYQIGKNYFEQLSWLQFDPSSQDLIEFLWRLASDTDKGDNENIFPNHARHLRLPSGFFEEGIHYLTSLYDFTFEGPSQTYHHLFVRSLEAEAGLYEFKVEVHRKSIELQIAEKNVQYLFDNDYLLYQDTFYHLTLKQRKMVQAIRSLPIEADLAKHIHFDLDDHAKLAASLSDFKQIGLVEAPKSFAIRDFEVTFQFDLLNRDEISCQLMFDYGNYQVSDKASLEALPFASHLKKEEKINRSLLAFGFSPQFYSKKRLTSAKELYTFFEETVPCFERLGNVALSTAIQALQVKEMPKIAIKRNQGLLDISFDFSTIIENDIDQAVTALFQNNPYFVSQTGQLVVFDDETQKVSKSLQELRARQLKNGHLQLDGIRALQVSKLFEGMTSVHFSKELEELAYHLQHPETFSIKPLPVKAQMRDYQRNGVQWLSMLNHYGFGGILADDMGLGKTLQTLAFLASHLKLDSKVLILSPSSLIYNWFDECQKFTPQLDVVVSYGLKQTRDQIIEEGHQITITSYSSFRQDFETYQAFHYDYLILDEAQVIKNAQTKISHCLRAFNTANCFALSGTPIENKMLEIWSIFQIVLPGLLPTKKEFLKLTAEQVSRYIKPFVMRRKKEDVLPELPDLIETNYSNEMTDEQKAIYLAQLRQMQDQIRNSSDVDISRQKIEILSGITRLRQICDTPSLFMDYQGESGKLDSLRILLTQIKENGHRALIFSQFRGMLDLAKQEMTALGLTSYQMTGSTPANERQEMTRAFNNGSKDAFLISLKAGGVGINLTGADTVILIDLWWNPAVEMQAISRAYRIGQKENVEVYRLITRGTIEEKILELQESKRNLVTTVLDGNESRASMSIEEIKEILGLNTH

SEQ ID NO: 11322 - protein, 192 aa, Neisseria gonorrhoeae
MSIKNAVKLIEKSKARFVDLRFTDTKGKQHHFTVPARIVLEGPEEWFENGQAFDGSSIGGWKGIQASDMQLRPDASTAFVDPFYDDVTVVITCDVIDPADGQGYDRDPRSIARRAEAYLKSSGIGDTAYFGPEPEFFVFDGVEFETDMHKIRYEITSESGAWASGLHMDGQNTGHRPAVKGGYAPVAPIDCG

SEQ ID NO: 11323 - protein, 468 aa, marine gamma proteobacterium HTCC2143
MSENTLNMIKENDVKWVDLRFTDTKGKEQHVTIPVKEIDEGFFEDGKMFDGSSISGWKGINESDMILMPDDSTAVIDPFTDDTTMNLRCDIVEPTTMQGYSRDPRSIAERAEGYMRSTGIADSCLFGPEPEFFVFDDVKWHADMSGAGYEINSEEAAWSSNHSYDDGNTGHRPGVKGGYFPVPPVDSLHDLRGAMCNAMEAMGLDIEVHHHEVGTAGQCEIGVGPNTAVKKADEIQIFKYCVHNVAHAYGKTATFMPKPLVGDNGSGMHVHQSLSKDGTNIMAGDVYGGLSETALYYIGGIIKHARALNAFANASTNSYKRLVPGFEAPVMLAYSARNRSASIRIPFVPNPKARRIEVRFGDPTANPYLMFASMLMAGLDGIQNKIHPGDAADKDLYDLPAEEAAEIPTVASSLEQALAALDADRAFLTAGGVMDDDMIDAYIALKSEEVEKLNMTTHPVEFDMYYSV

SEQ ID NO: 11324 - protein, 442 aa, Desulfotalea psychrophila LSv54
MTREEIMKIVEEENIQYFRLQFVDILGHMKNVAVPKSQIGKALDGQMMFDGSSIDGFVRINESDMYLKPDYNTFCVLPWRNKNGRGVARIICDVHKADETPFEGCPRVNLKRVLAEAKELGYTMNVGTEAEFFLFEQDEKGRATTITNDVANYFSLDPEDSGNDCRREIIETLEKMGFEIEASHHEVAEGQHEISFKYADALATADNTVTFKWVVKSIARQYGLHATFMPKPIFGVNGSGMHTNQSLFNIDGTNAFFDESDPLQLSPVAYSYIAGSLKHALVCTAVNNPLVNSYKRLVPGYEAPVYAAWSASNRSALVRIPASRGLSTRTEMRSPDPSCNPYLALAMQLNAGLDGVRNNATPPAAVDQDIFSMSNAEMDEVGIKVLPGSLKEAVDELKGSPLAKETLGAHIFEKFIEAKEKEWESYRIAVTNWEIEEYLNVY

SEQ ID NO: 11325 - protein, 451 aa, Oryza sativa
MAICSTDNELVELLWHNGGVVAQPQAAQARVVSSSGRGQSASVLTGDDTETAAWFPDTLDDALEKDLYTQLWRSVTGDAFPAAAAAGPSSHHAPPPDLPPPAARPPMRSGIGSSWTGDICSAFCGSNHIPETAAQRCRDAGAALPPERPRRSSTHDGAGTSSSGGSGSNFGASGLPSESASAHKRKGREDSDSRSEDAECEATEETKSSSRRYGSKRRTRAAEVHNLSERRRRDRINEKMRALQELIPHCNKTDKASILDEAIEYLKSLQMQVQIMWMTTGMAPMMFPGAHQFMPPMAVGMNSACMPAAQGLSHMSRLPYMNHSMPNHIPLNSSPAMNPMNVANQMQNIQLREASNPFLHPDGWQTVPPQDKEFNVGFAQRVVFLEIAENIDMMNRLHPYCCYQQQEQQLGEPEDYVWEPYHHCKLPSSQQKPEGGDLEFMSKLVASIISC

SEQ ID NO: 11326 - protein, 653 aa, Chlamydomonas reinhardtii
MRPRSAGDTALPEGLGWFILIGLGAVFALVPTFLLWADRKFGGTQADSENFATAGRSIKAGLTACDIVAKWTWAATLLQSANVAWSFGVSGPFWYAAGATVQVLLFAILAVEIKRKAPTIHTFLEIIRCRWGTTAHVIFVFYGFLTNIIVTAMLILGGAAVMEALTGVSVYASSFLIPAGVVIYTAVGGLKGTVVAEWLNVCVIYIALLIFMFQVYATNKDLGSIKVVYERLTAVAEKHPVADNMGGSYMTMFSKSGIIFGIINIIGNFGTVFVDQSYWQGAIAAKPSATYKGYLLGGMCWFAIPFTFATTMGLGARALDLPLTKAEANKGLVPPALAVALMGQGGAFLVTFQLFMAVTATACAEQMAVATIVAYDIYKPYINKNANGKQMIILQRVMVVVYAIISGVISVILLKLQVSLGWVYLFMGIVIGSAVFPIAASLTWAKCSATAAIVSAVVTTPLAIMTWLITAAKLNDGVINLDTTGQDYPMLAGNLVALFFSMILCIILSYIFPQDFDWAELRNIPVIECDPNSDPNNFEGEDSPEALNHVIKFTWATGGTLTLVLLILWPILALPAKVFSEGYFTFWIIIAMIWGIVASCVCIVLPIWEASDVIVNFFTWKKAPVAGGVATTAEESAHKGDHMELPPAPANRA

SEQ ID NO: 11327 - protein, 721 aa, Chlamydomonas reinhardtii
MSTCNNLFGFEEYNGQCEFFGEGPTVLPEGLGWFILVGLGAVFACVPTALIWLDRRFGNFGADSESFATAGRSIRAGLTACDIVAKWTWAATLLQSTNVAWKFGVAGPFWYAAGATVQVLLFAILAVEIKRKAPTIHTFLEIIRCRWGTTAHVVFTCYGFLTNIIVTAMLILGGAAVMEALTGVSVYAASFLIPAGVVMYTAVGGLKGTVVAEWLNVSVIYIVMLIFMFQVYATNPDLGSIATVYQRLAVMSIKYPVADNMGGSYMTMFSKSGIIFGIINIIGNFGTVFVDQSYWQGAIAAKPSATYRGYLLGGLCWFAIPFTFATTMGLGARALDLPITLEEANKGLVPPALAVHLMGQGGAFLMTLQLFMAVTATACAEQMAVATIVAYDIYKPYINKNADGRLMVKLQRITIVVYALVSGCVAVILLKLNVSLSWVYMFMGIVIGSAVFPIAASLTWAKCSATAACVSAVMTTPLSVMTWLIVAAKLNNGVLSLNTTGQDYPMLAGNLVALFLSMILCIILSYIFPQDFDWAELRNIPVLDSDPNADPNNFDGDDSPQALNKVVRFTWITSGILTLLLLILWPCLALPAMVFSQGYFTFWVMIAMIWGIVASAVCIMLPVIEASDLVAAVLRGKRLASNSSAHSSTHAQAAKAHPGPGGAPAAGADGGPGAAAAADAAAAVAVAVDGSGVEPVKSRSRQALVSAVLCVQLPTSRNARS

SEQ ID NO: 11328 - protein, 122 aa, Oryza sativa Japonica Group
MALVEDNNAVAVSFSEEQEALVLKSWAILKKDSANIALRFFLKIFEVAPSASQMFSFLRNSDVPLEKNPKLKTHAMSVFVMTCEAAAQLRKAGKVTVRDTTLKRLGATHLKYGVGDAHFEVQ

SEQ ID NO: 11329 - protein, 1065 aa, Synechococcus sp. RS9917
MSLLHATWLPAIRTPTSSGRAALLVWADTWRVAEPAGPGVTPATHPFTLSADDLRAWLSERELLPDGIIDATACLTLPSRTVKPKRKRGETAPVDEGWTGLPLQAGEPIPKQTEWWPWQVQGLAVEPGAATAWLARLPLSGRHPDLADELRWWSHMQRWALSLIARSRWIPQVELSKGEGYPHRARWVPLLNREDDRRRLEDMAARLPLVATCALPWREPTGKRSNRTTRLRPEAMRAANPVACCRPRSGRLRVATLLEDLVDAQLRTGFTAQTDGLDPLLAAWEEALGSDTGVIHLGDEDAERLATASHHWREGVAGTVAAARACLELETPDDGDDLWTLRFALQAEADPTLKVPAALAWAAGPKGLQLGEIAVEHPGELLLEGMGRALTVFPPIERGLDSATPEGMQLTPAEAFVLVRTAARELRDVGVGVELPASLSGGLASRLGLAIQAELPEKSRGFTLGETLDWSWELMIGGVTLTLRELERLAGKRSPLVRHKGTWIELRPNDLKNAERFFAAKPDLSLDDALRLTASEGDTLMRMPVHRLEAGPRLQAVLEQYHQQKAPDPLPAPEGFCGQLRPYQERGLGWLAFLHRFDQGACLADDMGLGKTIQLLAFLQHLKAEQELKRPVLLVAPTSVLTNWKREAAAFTPELEVKEHYGPRRPATPAALKKSLKDVDLVLTSYGLLQRDSELLESLDWQGVVIDEAQAIKNPSAKQSMAARDLARAGRSSRFRIALTGTPVENRVSELWALMDFLNPRVLGEEDFFRQRYRMPIERYGDMSSLRDLKSRVGPFILRRLKTDKAIISDLPEKVELSEWVGLSREQKALYAKTVEDTLDAIARAPRGQRHGQVLGLLTKLKQICNHPALALKEEAAGDEFLQRSMKLQRLEEILEEVIDAGDRALLFTQFAEWGHLLQGYLQRRWRSEVPFLNGSTSKSERQAMVDRFQEDPRGPQLFLLSLKAGGVGLNLTRASHVFHIDRWWNPAVENQATDRAYRIGQTNRVMVHKFITSGSVEEKIDRMIREKSRLAEDIIGSGEDWLGGLDMGQLKELVSLDDNGSLSA

SEQ ID NO: 11330 - protein, 160 aa, Dechloromonas aromatica RCB
MSQTLYDFSAQRLNGEPQDFEAYRGKVLLIVNTASECGFTPQYTGLEELYWMFKDRGFVVLGFPCNQFGGQEPGDAEAIGQFCQTRFDVTFPLFAKVDVNGDSAHPLYTWLKHEAAGVLGTEAIKWNFTKFLIDREGKVVHRYAPATRPDELVEAVEAQL

SEQ ID NO: 11331 - protein, 471 aa, Sulfolobus solfataricus
MPSTAEDVLKFLKENNIKWVDLQFTDVPGRLHHITIPADEFDLESLKTGFGKLDGSSIRGFTSIYESDMVLLPVPETMTLIPWSPGVARVLCKVFWGGGKGRFERDPRFIAEEAEKYQTEQGYTSYYGPELEFFMFDKVKLDVSAPQSGTGYKIYAREAPWTDSGTFVIRFKEGYYPAPPVDQLMDVRVEIVDTLVKYFGYTIEATHHEVATAGQGEIDFRFSTLVDTADKVQTLKYVAKNIAAKHGLVVTFMPKPIYGDNGTGMHTHLSLWTKDGKKNLMYDPNDEYAEISQFGRYVIGGLLTHARALSAIVSPTVNSYRRLIPGFEAPVYIAWSKGNRSAVIRVPAYYRGMEKAKRIEYRPPDPSTNPYLAFAALLMAALDGVNKKIDPGDPVDENIYHLTPEKRRQLGIKELPRSLNEALDELESDKEFLKPVFNSSILDTYIDLKRDEARSLQGYPHPMELYYYLDS

SEQ ID NO: 11332 - protein, 297 aa, Zea mays
MDPMDIVGKSKEDVSLPKSTMVKIIKEMLPPDVRVARDAQDLLVECCVEFINLLSSESNEVCSREEKKTIAPEHVIKALSDLGFREYIEEVYAAYEQHKLETLDSPKAGKFTRIEMTEEEAVAEQQRMFAEARARMNNGAPKPKEPEQEPPQLPQAQPQLQLHTEPQQPMQSQVQLHSQTQHYLQPQLQLHHQPQQLPQVQLHSQPQLQPQVHLHPQPQLPPQLQVHQQLQQPPQVQVHQQPEVQPQEAQLQSSAQQTSQPQPQAQLQSQGHSQAQLQAGLLGQLQTQAQTGPDMDS

SEQ ID NO: 11333 - protein, 170 aa, Arabidopsis thaliana
MGASASVPERSVHQFTVKDSSGKDLNMSIYQGKVLLIVNVASKCGFTETNYTQLTELYRKYKDQDFEILAFPCNQFLYQEPGTSQEAHEFACERFKAEYPVFQKVRVNGQNAAPIYKFLKASKPTFLGSRIKWNFTKFLVGKDGLVIDRYGTMVTPLSIEKDIKKALEDA

SEQ ID NO: 11334 - protein, 427 aa, Synechocystis sp. PCC 6803
MGKRTRRFWALAFSLLMGALIYLGNTPSALAFTEEQKLLLQSWRLVNQSYLDETFNHQNWWLLREKYVKRPLRNREETYTAIEEMLATLDEPFTRLLRPEQYGNLQVTTTGELSGVGLQININPETNQLEIMAPLAGSPAEEAGLQPHDQILAIDGVDTQTLSLDEAAARMRGPKNTKVSLEILSAGTEVPQEFTLTRQLISLSPVAAQLDDSRPGQSVGYIRLSQFSANAYKEVAHALHQLEEQGADGYILDLRNNPGGLLQAGIDIARLWLPESTIVYTVNRQGTQESFTANGEAATDRPLVVLVNQGTASASEILAGALQDNQRATLVGEKTFGKGLIQSLFELSDGAGIAVTVAKYETPQHHDIHKLGIMPDEVVEQPLISFAEITSPADVQYQAALDLLTGGVAIAHKSSSIPAMATAHKPN

SEQ ID NO: 11335 - protein, 118 aa, Brassica napus
MAESQTKSPGDHVSGGDQSPRSSSHVREQDRFLPIANISRIMKRGLPANGKIAKDAKEILQECVSEFISFVTSEASDKCQREKRKTINGDDLLWAMATLGFEEYIEPLKLYLTRYREM

SEQ ID NO: 11336 - protein, 392 aa, Caucanthus auriculatus; identical to SEQ ID NO: 7866

SEQ ID NO: 11337 - protein, 318 aa, Melia azedarach; identical to SEQ ID NO: 7868

SEQ ID NO: 11338 - protein, 392 aa, Caucanthus auriculatus; identical to SEQ ID NO: 7869

SEQ ID NO: 11339 - protein, 392 aa, Diacidia ferruginea; identical to SEQ ID NO: 7871

SEQ ID NO: 11340 - protein, 392 aa, Dinemandra ericoides; identical to SEQ ID NO: 7873

SEQ ID NO: 11341 - protein, 392 aa, Dinemandra ericoides; identical to SEQ ID NO: 7875

SEQ ID NO: 11342 - protein, 1121 aa, Ceratodon purpureus; identical to SEQ ID NO: 7881

SEQ ID NO: 11343 - protein, 3574 aa, Arabidopsis thaliana
MTSSSHNIELEAAKFLHKLIQDSKDEPAKLATKLYVILQHMKTSGKENTMPYQVISRAMDTVVNQHGLDIEALKSSCLPHPGGTQTEDSGSAHLAGSSQAVGVSNEGKATLVENEMTKYDAFTSGRQLGGSNSASQTFYQGSGTQSNRSFDRESPSNLDSTSGISQPHNRSETMNQRDVKSSGKRKRGESSLSWDQNMDNSQIFDSHKIDDQTGEVSKIEMPGNSGDIRNLHVGLSSDAFTTPQCGWQSSEATAIRPAIHKEPGNNVAGEGFLPSGSPFREQQLKQLRAQCLVFLALRNGLVPKKLHVEIALRNTFREEDGFRGELFDPKGRTHTSSDLGGIPDVSALLSRTDNPTGRLDEMDFSSKETERSRLGEKSFANTVFSDGQKLLASRIPSSQAQTQVAVSHSQLTFSPGLTKNTPSEMVGWTGVIKTNDLSTSAVQLDEFHSSDEEEGNLQPSPKYTMSQKWIMGRQNKRLLVDRSWSLKQQKADQAIGSRFNELKESVSLSDDISAKTKSVIELKKLQLLNLQRRLRSEFVYNFFKPIATDVEHLKSYKKHKHGRRIKQLEKYEQKMKEERQRRIRERQKEFFGGLEVHKEKLEDLFKVRRERLKGFNRYAKEFHKRKERLHREKIDKIQREKINLLKINDVEGYLRMVQDAKSDRVKQLLKETEKYLQKLGSKLKEAKLLTSRFENEADETRTSNATDDETLIENEDESDQAKHYLESNEKYYLMAHSIKENINEQPSSLVGGKLREEQMNGLRWLVSLYNNHLNGILADEMGLGKTVQVISLICYLMETKNDRGPFLVVVPSSVLPGWQSEINFWAPSIHKIVYCGTPDERRKLFKEQIVHQKFNVLLTTYEYLMNKHDRPKLSKIHWHYIIIDEGHRIKNASCKLNADLKHYVSSHRLLLTGTPLQNNLEELWALLNFLLPNIFNSSEDFSQWFNKPFQSNGESSAEEALLSEEENLLIINRLHQVLRPFVLRRLKHKVENELPEKIERLIRCEASAYQKLLMKRVEDNLGSIGNAKSRAVHNSVMELRNICNHPYLSQLHSEEVNNIIPKHFLPPIVRLCGKLEMLDRMLPKLKATDHRVLFFSTMTRLLDVMEDYLTLKGYKYLRLDGQTSGGDRGALIDGFNKSGSPFFIFLLSIRAGGVGVNLQAADTVILFDTDWNPQVDLQAQARAHRIGQKKDVLVLRFETVNSVEEQVRASAEHKLGVANQSITAGFFDNNTSAEDRKEYLESLLRESKKEEDAPVLDDDALNDLIARRESEIDIFESIDKQRKENEMETWNTLVHGPGSDSFAHIPSIPSRLVTEDDLKLLYETMKLNDVPMVAKESTVGMKRKDGSMGGLDTHQYGRGKRAREVRSYEEKLTEEEFEKLCQTESPDSPQGKGEGSERSLANDTSNIPVENSSDTLLPTSPTQAITVQPMEPVRPQSHTLKEETQPIKRGRGRPKRTDKALTPVSLSAVSRTQATGNAISSAATGLDFVSSDKRLEAASHPTSSLALTSPDLSGPPGFQSLPASPAPTPIRGRGRGRSRGRGAGRGRRVEGVLHGSNSSITQRTETATSLASDAEATKFALPRSASEIVSRVPKANEGSTSNPDQVSPVHSATTALRSDKAADKDLDAPPGFDSGSHVQTLNVLENSSERKAFAVKKRPLIQGVSSQHPGPNKQPLDLPVSTSSTLLGGGPVQNQNAVSSVCDGSKSPSEGRTYTALQGVTTAPSDATLPMSSQPSDATLPMSSQPVGSTVEAQEANVPSLPAALPAKRRVRNLPSRGETPKRQGKRRGQPLPATDASSARSTGLTPQIEVKVGNLSGTKAKFDAVAKEQPHFSQSVAPDIHSSGSLSQEIRRDTSGTGGSARKQTADVTDVARVMKEIFSETSLLKHKVGEPSATTRTNVPDAQSPGEMNLHTVETHKAEDSSGLKNQEALYNLSKADKLVSDIPHPVPGDLTTSGSVANKDVDIGSSKVAAENELVKIPGGDVDSSVIQLSLGNTLTAKSSLEKCTADQLLGEKLSQEGETTPASDGETCHLAEETASSLSYVRSEPTASASTTAEPLPTDKLEKNISFQDEVKTLNGDKREAILLSSEEQTNVNSKIETNSEELQASRTDEVPHVDGKSVDVANQTVKEDEAKHSVEIQSSMLEPDELPNAGQKGHSSIDLQPLVLVTSNENAMSLDDKDYDPISKSADIEQDPEESVFVQGVGRPKVGTADTQMEDTNDAKLLVGCSVESEEKEKTLQSLIPGDDADTEQDPEESVSDQRPKVGSAYTQMEDTDEAKLLMGCSVESEEKEKTLQSHIPGDDADTEKNPEESVSVQGVDRPKVGTTDTQMEDTNDAKLLVGCSVASEEKEKTLQSHIPGDDADTEQNPEESVSVQGVNRPKVGNANTQMEDTDEAKVLVGCSVESEEKEKTLQSHIPGDDADTEQNPEESVSNFDRPKDGTADTHMEDIDDAKLLVGCSVESEEKEKSLQSHMPSDDAVLHAPFENTKDSKGDDLHGESLVSCPTMEVMEQKGFESETHARTDSGGIDRGNEVSENMSDGVKMNISSVQVPDASHDLNVSQDQTDIPLVGGIDPEHVQENVDVPASPHGAAPNIVIFQSEGHLSPSILPDDVAGQLESMSNDEKTNISSEQVPDVSHDLKVSQDQTDIPPVGGIVPENLQEIVDVPASPHGVVPDVVVSQSEEIQSPSILPDDVPGQPDDGNCEKMDTMQNNTSIDIGITSGKTCQPSSSTQPEDENRNSLSHCEPSEVVEQRDSRDQVCIGSVESQVEISSAILENRSADIQPPQSILVDQKDIEESKEPGIESADVSLHQLADIQAEPSNLVDQMDIEESKEPGTESADVSLHQLADIQPGPSILVDQMDTEKSKEPGTESADVSLHQLADIQPGPSILVDQMDTEKSKEPGTESADVSLHQLADIQPGPSILVDQMDTEEFKNPDVSLHQLADIEPSLSISAVQKNIEDKDQSHVETAGSELVDVSAECSTEPQVQLPPSSEPVGDMHVHLGASKSEIVAEGTDFSSSLPKTEEENAKSQLADTEPSSSLTAVQKNIEDQVETAGCEFVVVSTGCSTEPQVQLPPSAEPVVAEGTEFPSSLLMTGVDNSSHLMTGVDNAKTHLADVVPSSSPTTMEKNIEAQDQDQVTTGGCGLVDVLTECSSEPQLQLPPSAEPVISEGTELATLPLTEEENADSQLANIEPSSSPSVVEKNIEAQDQDQVKTAGCELVSTGCSSEPQVHLPPSAEPDGDIHVHLKETEKSESMVVVGEGTAFPSSLPVTEEGNAESQLADTEPFTSPTVVEKNIKDQEQVETTGCGLVDDSTGCSSEPQVQLPPSAEPMEGTHMHLEETKKSETVVTEIQLADIDPSFSLIVVQTNIEDQDQIETGGCDLINVPSGCSTEPQIQLSSSAEPEEGMHIHLEAAMNSETVVTEGSELPSSLPMTEDENADGQLAEVEPSVSLTVEQTNIEEKDHIETAECELVDVSPGCSSQPEVKFPPSPDAVGGMDVHLETVVTEDTDSNSSLPKTEEKDAENPSDRLDGESDGTTVATVEGTCVESNSLVAEESNIEVPKDNEDV

SEQ ID NO: 11344 - protein, 452 aa, Vitis vinifera
MKGTLARHLTVQLGQVSRCQNLLESESTVDNIDADVDDKDFILSQDFFCTPDYITPDGQNILNGLDCNKDNIPCPKSPEKLKTSRIKRKREGKIGYYSPNSTLFDQPILELEKDTFGTDEVKVEKAIVTGSQKNQSYVSQSAVALRCRVMPPPCLKNPYLKNASETDIDPFGNRRSKYSGFFPALIGGDGLSRYHTDFHEIEQIGDGNFSRVFKVLKRIDGCMYAVKHSTRPLHQDTERRKALMEVQALAVLGSHENIVGYYTSWFENEKLYIQMELCDHSLSIKRSSHLFTEGEVLEAMHQIAKALQFTHEKGIAHLDVKPDNIYVKDGVYKLGDFGCATLLDRSLPIDEGDARYMPQEILNDNYDHLDKVDMFSLGAAIYELIRGSHLPESGYQFLNLREGKLPLLPGYSLQFQNLLKAMLDPDPVQRPSAKELVENPIFDRLQRNAKTK

SEQ ID NO: 11345 - protein, 1131 aa, Pinus sylvestris; identical to SEQ ID NO: 7884

SEQ ID NO: 11346 - protein, 259 aa, Oryza rufipogon
LSYFLLISILGSVLLMFLKPSNPEFRPGYIDMLFLSTSALTLSSLITIEMEVLSSSQIVVITLLMLLGGEVFVSFLGLMLRLNHKHNPEFSGDKVSSVPIELDTINSASTVISCEELQLEAAIPEVPSSTIKDLKRSKRLRWFLGFVVFSYFVVIHVAGFLLVVWYISRVSSAKAPLKKKGINIALFSFSVTVSSFANVGLVPTNENMAIFSKNPGLLLLFIGQILAGNTLYPLFLRLLIWFLGKVTKLRELKLMIKNP

SEQ ID NO: 11347 - protein, 638 aa, Alteromonadales bacterium TW-7
MGKIIGIDLGTTNSCVAVLDGDKARVIENAEGDRTTPSIIAYTQDGETLVGQSAKRQAVTNPTNTLFAIKRLIGRRFEDEEVQRDIGIMPFKIIKADNGDAWVEAGGEKRAAPQISAEVLKKMKKTAEDFLGEEVTEAVITVPAYFNDSQRQATKDAGRIAGLEVKRIINEPTAAALAYGMDKNKGENIVAVYDLGGGTFDLSIIEIDEVEGEHTFEVLATNGDTHLGGEDFDNRVINYLVAEFKKDQGLDLKTDPLAMQRVKEAAEKAKIELSSAQSTEVNLPYVTADATGPKHMNVKLTRAKLESLVEDLVTKSLEPLKRALADSDLSVGDINDIILVGGQTRMPLVQKTVADFFGKEPRKDVNPDEAVAVGAAIQGGVLAGDVKDVLLLDVSPLSLGIETMGSVMTALIEKNTTIPTKKSQTFSTAEDNQSAVTIHVLQGERKRSSDNKSLGQFNLEGIRPAQRGTPQIEVTFDVDADGILHVSAKDKDTGKEQKITIQASSGLSDEEVEKMVRDAEAHAEEDKKFEELVAVRNQADAMVHGTRKQVEEAGDALPSEDKEAIEAAVVDLEAAIKSDNKDEIEAKTQALAKKSQKLMEIAQAKAQQGQADAGEQQQSAKQDDDVVDAEFEEVKDDK

SEQ ID NO: 11348 - protein, 136 aa, Vitis vinifera
MICNLSRYHTDFHEIEVSNQTPSISILKNFSRVFKVLKRIDGCMYAVKHSTRPLHQDTERRKALMEVQALAALGLYKIFHKFYTFYNFFSTNLALLLHFVITAYPSRDLLTCSQKGKSWNLCIRLPRPCNLHMRKE

SEQ ID NO: 11349 - protein, 159 aa, Erythrobacter sp. NAP1
MTTIADFEVTTNRGETLDLATKKGKVLLVVNTASKCGFTPQYDGLEKLYQDFKDKDFEVLGFPCNQFGAQEPGNADEIAEFCKVNFGVTFPLMAKIDVNGPDASPLYDWMKSEKKGVMGSKSIKWNFTKFLIDREGNVVKRYGPQDTPRMIAKDIEKLI

SEQ ID NO: 11350 - protein, 1381 aa, Zea mays
  misc_feature (35)..(35): Xaa can be any naturally occurring amino acid
MLLQPLQNLRVPVPENLARYGNSSSNGSPSTSPFXGQGSLLDQYNGVHDASHGLHRKRKKHPDGAGDDDHADAYSNKMMEDHYRAMLSEHVQKYRRSKFKEGAFISDPSQVAIPQIKHKNGGKKVMKHISNFRDIAALNGIEASHEYNWIECIETHGGFNKLVASVDSTYLDMGDNIHYLVPEGYDKLALSLNLPISSDIRVEEHFLKGALDLCTLSAMLGTDQRFEASSHGGLSEPLPQFESLKERVKVQKFSLQVTEDPFAIPEGAAGRIRRSIISETGNLQVHYVKVLEKGDTYEIIERSLPKKQIVKKEPFVIVKEESEKTYKLWQYLATKSIPKHHRNFTSLMKKRQVDAKRFSDSCQREVKFKVRRSLKLMRCAAIRTRQLARDMLIFWKRVDKEQVFFLPLRCLQNMSLKMMTLKFFSRYQYELRKKEEREAAEALKREEELREAKRQQQRLNFLLSQTELYSHFMQNKAGGSAPPDEEDVPDEDEEEDPEEAQLKREALRAAQHAVSQQKMRTNAFDSETVRLRQTSESVLPTDDSSSMDPSKIDLLHPSTMPEKSSVQTPELFKGVLKEYQLKGLQWLVNCYEQGLNGILADEMGLGKTVQAMAFLSHLAEDKNIWGPFLVVAPASVVNNWAEELIRFCPDLKILPYWGPERMILRKNINPKRLYRRDASFHILITNYQILVNEEKLLRRVKWQYMVLDEAQAIKSSSSQRWKTLLSFSCRNRLLLTGTPIQNNMAELWALLHFIMPTLFDSHEQFNEWFSKGIEGHAEHGGALNEHQLSRLHAILKPFMLRRVKIDVIAEMTKKKEEIVPCKLSSRQQIFYQAIKNKISLNELLDGSRGNLNDKKLLSLMNIVMQLRKVCNHPELFERNEGSSYFYFADIPNSLLSPPFGALQDVHYAGKRNPIIFEIPKLVYDGIICNTENSGSICGFQNGYLNRLFNIFLPSNIHRSAIPEVNSSNESVLSSGAFGFTRLSNLCPVEAFFLATSSFFEGLAFSVMRWNRNYTDEIMDAFLDSEDTDIQFSQNDSTRVRAVARLLLSSTKAKPSLLRTKIGTGPSEGPYEALVLSHHDRLASNIRVLRSAYTYIPPARAPPPFALCQINVSCADRNFAYKFTDEMYDPWVMKLFLGFARTSEFNGPRQPVALHPLIQELNTDLPILEPMLQLPYRIFGSSPPMSNFDPAKMLTDSGKLHTLDMLLRRLRAEGHRVLLFAQMTKMLDILEDYMNFRKFKYFRLDGSSAISDRRDMVRAFQNRNDVFVFLLSTRAGGLGINLTAADTVIFYEIDWNPTQDQQAMDRTHRLGQTKEVTVYRLICKDTIEEKILQRAKQKNAVQELVMKGKHVQDDHLLRQEDVVSLLIDDTQIAHKLKEISMQ

SEQ ID NO: 11351 - protein, 166 aa, Brassica napus
MESEGKIVFTEEQEALVLKSWSVMKKNSADLGLKLFIKIFEIAPTAKKLFSFLRDSPIPAEQNPKLKPHAMSVFVMCCESAAQLRKTGKVTVKETTLKRLGANHSKYGVVDEHFEVTKYALLETIKEAVPEMWSPEMKSAWGQAYDHLVAAIKAEMQAFSLIYILI

SEQ ID NO: 11352 - protein, 1489 aa, Kluyveromyces lactis NRRL Y-1140
MSLEKLLNREENDSSKRTDFMGRWYLKMSKICERDDREMDYQNWKFLSYQEFELINEWNQQGKELTKDNCERLLVNMDKTHKEWVEYQKFKEQKDAIIAELKESIQIIKQEPSIPSGADANSVVSSDTEQIQDSETTANSKKSPAINGIKTSGKSPTKSPATNGRRRGAGGNRRVKRPSNLSKTVRSRNATDGDENGNENIENGGTTPKRRSRPKKILVSNVSKDVDAEEEDDIHTEKDASGSAADLDKDIVDESINDSENAPRKRPVSSTSLLSRNKSNKPTKSSPLTPDSAREKENVNGVTEGNEDMDHDSVLDADDSAIGSDDNPNDEQEEADDENVDEEAEDENDEAEVEDDIDDLGAPEDDGDDDFAPSYSAISKVKVNKKVNIDSPMPAIQKELRKMAIKSSVAKAMKRKFTNCKVISYSPESQLEIKITLKQLHIRKYKRHLAEEERKRKAEEALIKAEEEAKKRKLAPPPPPPPQQVRRVEHDLPTYGMKITLKEARAIQRHYDQTYITIWKDMARRDSGRISRQLQQIQSIRGQNFRKTSSLCAKEARRWQMRNFRQVKDFQTRARRGIREMSSFWKKNEREEREMKKKAEKEAIEQAKKEEEQRENLRAAKKLNFLLTQTELYSHFIGSKIKTNELEGTMTDDSLTSMSNNKNKVVDLTKTAASKTNVESIDFATEDDEKLRLMAAQNASNALKETQDKARKFDEEDEEDGELNFQNPTSLGEITIDQPKMLACTLKEYQLKGLNWLANLYDQGINGILADEMGLGKTVQSISVLAHLADRYNIWGPFIVVTPASTLHNWVNEISRFVPQFKILPYWGNANDRKTLRKFWDRKHLRYGRDAPFHVMVTSYQMVVSDASYLQKMKWQYMILDEAQAIKSSQSSRWKTLLSFHCRNRLLLTGTPIQNNMQELWALLHFIMPSLFDSHDEFSDWFSKDIESHAESNTELNQEQLRRLHMVLKPFMLRRIKKNVQSELGDKIEIDVLCDLTFRQAKLYQVLKSQVSGGYDAIENAAGNDDVTSDQKLVNLVMEFRKVCNHPDLFERADVMSPFSFVSFGESASLSREGDFVEVNYSAKNLINYNLPRLIYDELVVPNYNNDVDVRAKLLYHTMNIFHPANSFQLCFILSKLTDTSPNKFATLLEQNVINRAIDLQNDGYFNTAKYSIAYDEGEKIFSSNLLINDKLKYLHLLKNSTSGSVLKNLLEIPSSVYENEYFNSISPAYHPAASAPPINIDVLASNNFVQKKQYEMFNPSISSALSSIPSSVQHKLIVEKGIPIEELPVTEMAPKAFNNSFTSYIEMPSMDRFITESAKLKKLDELLVKLKEEDHRVLIYFQMTKMMDLMEEYLTYRQYTHIRLDGSSKLDDRRDLVHDWQTKPDIFIFLLSTRAGGLGINLTAADTVIFYDSDWNPTIDSQAMDRAHRLGQTRQVTVYRLLIRGTIEERMRDRAKQKEHVQQVVMEGKAKENKQKIIEVEKEHSESA

SEQ ID NO: 11353 - protein, 1029 aa, Corynebacterium diphtheriae NCTC 13129
MSTHLLHALWLKNSGLHLWIEQVEGHKIVLSDAVPDNTFPDSVATLIRGKRFTHQVKTKLLTPKGREVTLQLPTIAFTPEQAVRVLSQIAAITPMMASSAQRATLAPDLMWMVRLYQGLEQFVRAGRLTIKLGYADHQWWPTWQLSSGLQERGWIAQMTAAAPGVLIANAGSSVAEDIADELPHWIANFLLQDLLDTPRSSEWHSFPEALMRSTPLRRGTAQLVSALNEWRDSMTSVSVQLVFIVEEPSKDREDRIDPADMLWPIRVRVRSGVDSPQPIMLSHYDSATKERLNALRREAILVAPILEKQGTDSNVTPTQLFELQREEGAGDWDCYVTTDQLVEFIGDAAARLKSRGFNVLLPRSWDQQETKAHLRLSDPAEASTQATIGLDKIVDYDWHMSVGDIELTEAEMVELVRSKSGLIHLRGEWVMADTAAIRRIGDYMKDVAAQSRKRKKQALDTAVMEAELAKANDDPRWPMLEARAEKLAEEFNNEFAEFGQVTLAELRELALKAQENEPIAYTGSPWHASLAGGSMGKDSPAPQRVSIPDTVHADLREYQRRGVDWLYWMAHNHLGAVLADDMGLGKTLQLLSLEAVERSEQQRGPTLVIAPTSVVGNWAREAHKFVPTMRVAVHHGTSRKADDEFIQLAQSRDVIVTSYGTAARDFELLGKITWRRVVLDEAQHIKNSETKVSKAVRSLPSEHRVALTGTPVENRLSEMRSILDFCNPGVLGSASFFRNHFARAIEREHDEDMTERLRALTAPFILRRLKTDSAIVDDLPAKTETVLTVDMTSEQAALYKAYVDSVKTQLDQAEGMNKRGLVLSALTKIKQICNHPAHFLGDGSAMTIKGKHRSGKVAELMNLINDAVDSDQKLLIFTQYRAFGDLLVPYLSDYFGTTIPFLHGGVSKTGRDRMVEEFQTPDGPPAMILSLKAGGTGLNLTNASIVVHMDRWWNPAVENQATDRAFRIGQRKDVTVYKMITAGTLEESIQDILDGKTQLASAVVSEGEGWLTELSAEELAMLMSYRGRE

SEQ ID NO: 11354 - protein, 193 aa, Vibrio angustum S14
MQVVSSNHFILRLILLVSSIFFTSLVTTSANASSCPTLYQAPLKKLNSDEYYDICQQLTGKVVLVVNTASQCGFTPQFKQLEELYKTYKDSGLVVIGFPSNDFKQDRGSEQQTANICYSNYGVTFPMMTKTSVKGSRANSLYKHLIAQSGKSVGWNFQKYLLNKQGQVVGVFPSSLSPTSNEMVAAIKQQLKM

SEQ ID NO: 11355 - protein, 247 aa, Cryptococcus neoformans var. neoformans JEC21
MPTLILPGETVPIPSTSKAVVLGPGISQSTPTLQASSSTASGSSSAQGYIATRLGMLHSGKGKERSQKLWIEGNSKRYIPAQKDIVLGIIIARHADGYRVDLGSSQMAQLDALAFEGATKRSKPNLKVGTLVFARVMSASRDMEPELECFDPNTGKSDGFGELKGGVMVNATLQLCRRLLDRNHIVLPTIASIFPFEIAIGLNGRVWMKAETVGETLAMKRLIESVDDHIIPVEEKAIKEKLREYLS

SEQ ID NO: 11356 - protein, 535 aa, Bradyrhizobium sp. ORS278
MEAHFQIFLILLAVLAGTALIARRANLAPAILLMLAGIALAFVPTMPAFALPPELVLLVVLPPLIYSSSVAMSWREFKRNLRPIVLLAVGCVIFTASMVAVATHVLLGLPWSLGFLLGAIVAPPDVVAPLAIARRLHLPRRVMVILEGEGLANDATALILYRFAVAAITTGTFSLPVAAGEFAAIVIGEIAFGIGVGWLMLRARHYSDDTRVEITLSLLTPYLAYWIPEHLGGSGVIATVACGLYMSWNGPLWISSATRLQGVFFWDLVVYLIEGMLFLLTGFQMRLIYEKSKVFPLDEIMIATALVVAIVVIARFAWTFPATILPRVLSRSLRARDPLPPWQQTFIIGFTGVRGTVSLATALALPLTLSTGDPFPYRDEILFIAFGVIFFTLIGLGLTLPLVVRWLGVSRAGRAEHVREHEQEIAARREVLDRALQSLETMTNDRELSDEVVRLLRARHEVRANQLPERLNPDEYDASALGIELTRELIGVERKTIHAMLRDGQITDETRRRIERDLDLEEASLANREYGQLPL

SEQ ID NO: 11357 - protein, 589 aa, Aspergillus flavus
MPPYPEPQADSSPLRLHHHYFYIIIWALLASIILYIPGGLSFVDALLLASGAATQTGLNPIDLKDLHISQQITLWLVPMVTNVVFLHTLLVLIRIYWFRKRFKSAIREAKAVCHSQRQRMNQALDYEARRPIGLNRTITNTTDTTTTAFDSSDRDDEEQPLLGSTDDEISPGASPKTQVGDQSPVGYQTFKPAAIGPSSPRITFYESDRDYEARQKRRSSFSRRRSFSEAVNEAFPRTDSPNTPVLPSLMWQHSIASYSDWDEDQKEELGGIEYRALKTLMVILVGYFLAFHLLGIILFIPWIMTDSKYGGMVKDMGLNRPWWAVFTAGSAFHDLGYTLSPDSMASFRNAAFPLLVMTFLVVIGNTGFPCMLRLIIWLISKFTTYGSPLDDELHYLLEHPRRCFTMLFPGSETWRLAGVLLLLNALDLFVFYTLQENPQSNPFSPGLRLVDGLFQIASTRTAGFSITSLGTLHPAVQVSFVVMMYISAFPIAIAIRKTNVYEEKSLGIYDDEDKPNPHGLAAHIQRQLGFDLWYVMLGFFLISVTEGKRIQQTHGRDFAFSLFPLLFEIVSAYGTVGLSLGYPKTETSL

SEQ ID NO: 11358 - protein, 476 aa, Synechococcus sp. RS9916
MSASAAPFLHPGVAWALVVLFSVLWVALGVAWGRRGKGDADEYMLAGRNIGLALSTATLMASWVTGNTTLLAPEFGYKTGLWGMFSYALAGLGLILFAPLASRIKQLMPNGRTSGDFIRLRYGRLAWWVFMLITAVYTLGFLMTQAMGAGLLLQALSGFNYHVGMVVVIGVATVYTLFGGMRAVIGTDFIQSLLIMVLLAVVAVLAFRQFPMPEVHASLLARHPDRLDLLLPAGLLIAWNSALFSMGEVFHNNIWWSRVFASRRSVVMTSFVLGGIAWMSVPMVTGSIGLVALARELPLDQVNMVFPVMAADLLGAGGAALVFVVVFASLTSTLDSLLASTADLLAEDVYFRLLRPQASDLQLKQAARLMVVGLAVVTLVLSWPRLDSLASVLFFTGALVASTVWPVACGLYWRTANRKAAIAAMLAGSVVGLLAYVLIAPYCAAVFSAAVSAVVMLIGSRIWPERFDFTLLQEEG

SEQ ID NO: 11359 - protein, 286 aa, Prochlorococcus marinus str. MIT 9313
MDSPSTTANGWIDEHHQGVRYGLQGRVLVDETSPYQRITVIDSSRYGKGLLLDGCWMTAEHQERHYHESLVHPALCSAAQLERVLVIGGGDGGTARECLRYQDVKHLDMVEIDRRVVELSQKHLPSLGSHAWSDPRLQLNLENGIAWVANATESSYDVILIDGSDPAGPAEGLFNQTFFEHCRRILRPGGVFATQSESPEAFRQVHIDTVRLIRQVFGYADPLYGWVPMYPSGWWSWTFAAIDGPRYRNPLPARAAAISAGCEIWSPRWQQGAFEAIPAFIERELT

SEQ ID NO: 11360 - protein, 615 aa, Leuconostoc mesenteroides subsp. mesenteroides ATCC 8293
MSKIIGIDLGTTNSAVAVLEGGEPKIITNPDGGRTTPSVVSFKNGESQVGDVAKRQAITNPDTIISIKSHMGEAGYKVNANGKDYTPQEISAMILQYIKGYAEDYLGEKVEKAVITVPAYFNDAQRQATKDAGKIAGLEVERIINEPTAAALAYGLDKLDKDEKILVYDLGGGTFDVSILELGDGVFEVLSTNGDTHLGGDDFDNKVIDYLAEQFKSENGVDLKDDKLALQRLKDAAESAKKTLSSANEAQIDLPFIASGDNGPLHLQTSLTRAKFNELTADLIKKAEQPVLSALKDAGLSFSDIDEVILNGGSTRIPAVQESVKKMTGKEPNHSINPDEAVALGAAVQGGVITGDVKDVVLLDVTPLSLGIETMGGVFTKLIERNTTIPTSKSQVFSTAADNQPAVDIHVLQGERSMAADNKTLGRFQLADIPAAPRGVPQIEVTFDIDRNGIVNVSAKDLGTQKEQKITIQAAGGLSDEEIEKMMNDAKANEEADAKKKEAVDTRNEADQLIFQTEKTLEEVGDKLGDDEKKPTQDALEALKKAKEDAAADDADLTDLKAKSEELTKVAGELAMKLYQQAAPKDGAEGDAKSADDNTVDGDFEEVDPNKDDKK

SEQ ID NO: 11361 - protein, 239 aa, Casimiroa edulis; identical to SEQ ID NO: 7899
  misc_feature (2)..(2): Xaa can be any naturally occurring amino acid
  misc_feature (8)..(8): Xaa can be any naturally occurring amino acid
  misc_feature (13)..(13): Xaa can be any naturally occurring amino acid
  misc_feature (18)..(18): Xaa can be any naturally occurring amino acid
  misc_feature (30)..(30): Xaa can be any naturally occurring amino acid
  misc_feature (65)..(65): Xaa can be any naturally occurring amino acid
  misc_feature (113)..(113): Xaa can be any naturally occurring amino acid
  misc_feature (136)..(136): Xaa can be any naturally occurring amino acid
  misc_feature (170)..(170): Xaa can be any naturally occurring amino acid
  misc_feature (182)..(182): Xaa can be any naturally occurring amino acid
  misc_feature (188)..(188): Xaa can be any naturally occurring amino acid
  misc_feature (203)..(203): Xaa can be any naturally occurring amino acid
  misc_feature (206)..(206): Xaa can be any naturally occurring amino acid
  misc_feature (212)..(212): Xaa can be any naturally occurring amino acid

SEQ ID NO: 11362 - protein, 675 aa, Pseudotsuga menziesii
MGRKQKCAGFNNAGKDFNGFMFLAAFITAGFLFSSVIAAEEAAKLGTVIGIDLGTTYSCVGVYKNGHVEIIANDQGNRITPSWVAFTDTERLIGEAAKNQAAMNPERTVFDVKRLIGRKYEDKEVQKDIKLLPYKIVNKDGKPYIQVKIRDGEIKVFSPEEISAMILLKMKETAESYLGRKIKDAVVTVPAYFNDAQRQATKDAGVIAGLNVARIINEPTAAAIAYGLDKKGGEKNILVYDLGGGTFDVSILTIDNGVFEVLSTSGDTHLGGEDFDQRVMDYFIKLVKKKHNKDISKDNRALGKLRRECERAKRALSSQHQVRVEIESLFDGVDFSEPLTRARFEELNMDLFKKTLGPVKKALDDANLQKTEINELVLVGGSTRIPKVQQLLKDLFDGKEPNKGVNPDEAVAYGAAVQGGILSGEGGDETKDILLLDVAPLSLGIETVGGVMTKLIPRNTVIPTKKSQVFTTYQDQQTTVSIKVYEGERSLTKDCRELGKFDLSGIPPAPRGVPQIEVTFEVDANGILNVRAEDKGTKKTEKITITNDKGRLSQEEIERMVKEAEEFAEEDKKVKDKIDARNNLETYVYNMKSTINEKDKLADKIDSEDKEKIETAIKEALEWLDDNQSAEKEDFEEKLKEVEAVCSPIIKQVYEKTGGGSSGGDDEDEDSHEEL

SEQ ID NO: 11363 - protein, 306 aa, Ailanthus altissima; identical to SEQ ID NO: 7904

SEQ ID NO: 11364 - protein, 392 aa, Dinemandra ericoides; identical to SEQ ID NO: 7903

SEQ ID NO: 11365 - protein, 392 aa, Dinemandra ericoides; identical to SEQ ID NO: 7905

SEQ ID NO: 11366 - protein, 392 aa, Hiraea fagifolia; identical to SEQ ID NO: 7906

SEQ ID NO: 11367 - protein, 392 aa, Hiraea fagifolia; identical to SEQ ID NO: 7908

SEQ ID NO: 11368 - protein, 176 aa, Coccidioides immitis RS
MSSATSFFDFATPDKKGEPFPLSSLQGKVILVVNTASKCGFTPQLQGLEALYKKISADYPDKFTVLGFPCNQFGSQDPGTNDEIQSFCQVNYGVTFPILGKVDVNGDKAAPVFEWMKKEMPGLMGLKRVKWNFEKFLISADGKVVGRWASITKPESLEAPILKEIEKMEKGGRTSL

SEQ ID NO: 11369 - protein, 392 aa, Hiraea fagifolia; identical to SEQ ID NO: 7910

SEQ ID NO: 11370 - protein, 377 aa, Coprothermobacter proteolyticus DSM 5265
MNKRSVGAGVVVLILVLGITAGYVLGFLTSGRPIVLQAGDYRLLDELKAVLQERYYTDLPSDKELLYGSAKGLTAALGDPWTEYLTPEEISVLQSDLEGTYTGIGVVISKTGDQIVIQTVFPNTPAAKAGLKAGDIIMAVDGKSVEQVSVDVVSSMVRGSAGTSVTLEILRDGQTLSFDLKREEVSIPAVTESKMVTPTVGYIRLMQFYDNKASSELKSALVQLKKEGMTSLIIDLRDNPGGMLEEARKIVGYFAPAQVVVYEKDKQETKPLKAPGGAKLFEGNVVVWVNGGSASASEIVAGALRDLIGAKLVGEKTFGKGEIQTIEPLSEGAVKVTVAEYLTPNKTALNKVGLAPDVQVTATDDAKLLEASLEVFK

SEQ ID NO: 11371 - protein, 449 aa, Bacillus halodurans C-125
MAKFTREDILRIAQEDNVRFIRLQFTDLLGTIKNVEIPVDQLPKALDNKMMFDGSSIEGFVRIEESDMYLYPDLDTWVIFPWTPEKGKVARLICDVYQPGKPGEEPKPFLGDPRGILKRVLKEAEALGFTAFNIGPEPEFFLFKNDESGEPTLELNDKGGYFDLAPTDLGENCRRDIVLELEDMGFEIEASHHEVAPGQHEIDFKYADAVTTCDNIQTFKLVVKTIARKHGLHATFMPKPLFGVNGSGMHCNMSLFRGKENAFFDESTESQLSGTAMQFLAGILKHADSFTAITNPIVNSYKRLVPGYEAPVYVAWSMRNRSPLVRIPSSRGLSTRIEVRSPDPAANPYLAMAAMLAAGLDGIKRKLTPPAATDRNIYVMSKEERDEEGIRDLPSTLKEAVDNFLKNDVLVEAIGEHAVEHFVEAKEIEWDMFRTQVHPWERDQYMQTY

SEQ ID NO: 11372 - protein, 86 aa, Arabidopsis thaliana
DPILHEPLLSTQGQSEYDPEQHVSFRMFWKSPSRAIHHYWRKFDNAVMRRIFGGRGVSPVVPGSPIENSVPQWSEEVENKEQNGEP

SEQ ID NO: 11373 - protein, 675 aa, Haemophilus somnus 129PT
MKLPQQLRYLLCLLFGFVLSLNYAVAVEPKLKLTDLVIPQITQENQLATKRTAARLVHSHYQAVELNDEFSQRIFDRYLKALDFNRNTFLQSDIDNMRAMYADKIDDVLNEGNLDIAFDMYELLMKRRYERYRYALSLLDEEPDLNGNDQIEIDREKADWPKNETEANKLWEHRVKNDVINLKLKGKKWSEIQTRLVKRYNLAIQHLSKVKSDDIVQLYLNAFAREIDPHTSYLAPRKAKNFNENMNLSLEGIGATLQSEDGETTIKSLVPGAPADRSKKLKAGDKIIGVGQATGEIEDVVGWRIDDVVDKIKGKKGTKVRLEIEPAKGGKSQIITLVRDRVRLEDQAAKLTVETVAGNKIAVIKIPGFYNGLTEDVRKLLVEVEAKKAEALIIDLRGNGGGSLPEAIELTGLFITDGPVVQVRDAHQRIRIYDDPDTEQVYSGPLLVMIDRFSASASEIFSAAMQDYNRAIILGQNTFGKGTVQQSRSLNFVYDSNSMAPLGLLQYTIQKFYRINGGSTQLKGVAPDIIFPSSIDDEEYGEEKEDNALPWDKIPSASYSEVGNARLPVDILNQKHLERIAKDPEFIALDEDLKIRDERKERKFLSLNFAQRKAENDKDDEKRLKDLNARFKREGKKPLKDLDALPKDYEDPDFYLKEAQKIAVDLIEFNKKMAE

SEQ ID NO: 11374 - protein, 738 aa, Coprinopsis cinerea okayama7#130
MKQKRTRTPANDSSSSVTLLDFFATKPGTTPVQSKKRPPAKKASSASSSKPGLSRTTVQEVIVIDSDSDDSAVEIVDFVGRKRQRLGSQPAGTPSGGNSAKVESNDALILTNDVDSPFGGPVETADTHKRIFLDDNGRNPAWEKGGFGKPVLLQESPLPLDPSNSPTVTPQTAGHTNLETSIDTLPQSEDANSALAVADETACSSSTDICSIPATKAGWDLPVDIDMTLDDWGTGDDEFVEESGFVVDDDCLKEEENEVLRIDDPSCSSSTRNLASRSNAFSVLMSSFKENEAWKEASAAEAKTRPAKGDSGRRKAPFYKVLQGMPIAVDAFKYGKIPGVTAYFLTHAHSDHYTNLSSSWKHGPIYCSEGTANLIVHMLSVDRKWVKPLPMDTPTVIPDTQGVIVTLIEANHCPGSCLFLFEGRQTVNAGDTTFKSAYVGSPRTFRYLHCGDFRASPQHVLHPAVKGKVIDHVYLDTTYLDPKYTFPPQPLVVSACANLAKKLANGESTRQASGMFSSWLTTSKGKGKEVDKPTLFVIGTYSIGKERIVKAVAKAVGSKIYCEKRKAGLLRCQADPELHAMLTSDPAEAVVHLLPLGMISSDKMKEYLERFGDKYSKVVGFRPTGWTYVQPSGTDQQPSVNTILTRTVQKPFTYEDLKPNGKSTSTILMYPVPYSEHSSFYELTCFAMSLNWTKMIATVNVGSERSRGKMTKWFGKWEAERKRRGKVEVVAHRHIEYW

SEQ ID NO: 11375 - protein, 442 aa, Moorella thermoacetica ATCC 39073
MVDSREAILQKATDLGVKFIRLQFTDIFGVLKNVAITLDQLPKALNNELMFDGSSIEGFVRIEESDMYLRPDPSTFTIFPWKPNGDAVARLICDVYNADGTPFIGCPRGTLKRVIAEAEALGYTMNVGPEAEFFLFHTDATGRPTLETHDRAGYFDLTPVDLGEDARRDMVLTLQQMGFEIEASHHEVAPGQHEIDFKYADALRTADNIATFKFVVRTIAQRHGLHATFMPKPIYGIAGSGMHCNISLFRAGQNAFYDPDDDLQLSQVAYYFIGGLIAHARGMTAITNPTVNSYKRLVPGYEAPVYIAWSPQNRSPLIRIPAKRGLSTRLEVRHPDPSTNPYLAIAVMLKAGLDGIKNRIQPPAPINANIFDMEATRLRAEGIDLLPGTLDEALDALEKDPVIREALGPHIYQRFMEAKRIECEEYRTRVHQWEIEHYLTKF

SEQ ID NO: 11376 - protein, 529 aa, Arabidopsis thaliana
MSIGLTECVTNKLAAEHPQVIPISVFIAILCLCLVIGHLLEENRWVNESITAILVGAASGTVILLISKGKSSHILVFDEELFFIYLLPPIIFNAGFQVKKKKFFHNFLTIMSFGVIGVFISTVIISFGTWWLFPKLGFKGLSARDYLAIGTIFSSTDTVCTLQILHQDETPLLYSLVFGEGVVNDATSVVLFNAVQKIQFESLTGWTALQVFGNFLYLFSTSTLLGIGVGLITSFVLKTLYFGRHSTTRELAIMVLMAYLSYMLAELFSLSGILTVFFCGVLMSHYASYNVTESSRITSRHVFAMLSFIAETFIFLYVGTDALDFTKWKTSSLSFGGTLGVSGVITALVLLGRAAFVFPLSVLTNFMNRHTERNESITFKHQVIIWWAGLMRGAVSIALAFKQFTYSGVTLDPVNAAMVTNTTIVVLFTTLVFGFLTKPLVNYLLPQDASHNTGNRGKRTEPGSPKEDATLPLLSFDESASTNFNRAKDSISLLMEQPVYTIHRYWRKFDDTYMRPIFGGPRRENQPEC

SEQ ID NO: 11377 - protein, 527 aa, Aspergillus nidulans FGSC A4
MQQTPNPQVGVWQLLFERQDPSFPESHGIFPVSSHTAFVFLLTLTSGIVAPVNPSLSARELQLQLERSQAKGMVVHPSCLGTALKAAKRAGLASERVLVLGATNPGGAATTTVQFMSSVPSEPVGPVHIEPDDIAFLVYSSGTTGLPKGVMVSHRNVVAAVVLQAAIESPHVHWKKDRTLAVLPTYHIYGTSPSGPSRTSTDPLGLICLVHLPVWLGTTTVFMDKFDLQRFCKLIREHSIAHAYVAPPIVLHLAKNPSIDKRDLSSLRMLTSGGAPLGEALIRETYDRWKVPIRQAYGLSETTSVSHIQRWDSWNTAIGSNGAVLPGLEARIVLNNDPSKKAAVKEEEGELWIRGPTVFTGYMNDRASTDACLTASKWFKTGDIGYEDAMGNLHITDRAKDMIKFKGFQIAPTELEDILIEHPAVRDVAVIGVWNGEMHSEVPLAYLVAKESMAERERETAALSVMAYLRGKVVHYKHLRGGVIWIDQIPKSASGKILKRALRDRVGTLDQGKQILAPEYARYRAKL

SEQ ID NO: 11378 - protein, 280 aa, Glycine max
  misc_feature (158)..(158): Xaa can be any naturally occurring amino acid
EWTPIIHLLISPHTTTPSTSTSTTTSSTTTTTTTLVLSLPSNLNFSDPHHYIPASDATTFKQHNINHNNNHTPDFTSSHVEKSVEASKPVPPPRSSSKRSRAAEFHNLSEKRRRSRINEKMKALQNLIPNSNKTDKASMLDEAIEYLKQLQLQVQYLXLILQMLMMRNGLSLHPMSLPGGLRPMIMPQTGLNLDGSNGFQNSTCAIASSSNDESLVRHAFSFPKQCSISNKSIGVPSVKNIATSDTSSTFHPSIKDALYGNMPQPFMDTTKIGKPSPDVS

SEQ ID NO: 11379 - protein, 525 aa, Arabidopsis thaliana
MSSELQISPAIHDPQGQEKQQQAAGVGILLQIMMLVLSFVLGHVLRRHKFYYLPEASASLLIGLIVGGLANISNTETSIRTWFNFHDEFFFLFLLPPIIFQSGFSLQPKPFFSNFGAIVTFSVLGTFVASMVTGLLVYLGGVMFLMYRLPFVECLMFGSLISATDPVTVLSIFQELGSDVNLYALVFGESVLNDAMAISLYRTMSLVRSHSSGQNFFMVIVRFLETFVGSMSAGVGVGFTSALLFKYAGLDVDNLQNLECCLFVLFPYFSYMLAEGLSLSGIVSILFTGIVMKHYTYSNLSANSQRFVSAFFHLISSLAETFVFIYMGFDIAMEKHSWSHLGFIFFSILFIVIARAANVFGCGYLVNLARPAHRKIPMTHQKALWYSGLRGAMAFALALQSVHDLPEGHGQTIFTATTAIVVLTVLLIGGSTGTMLEALEVVGDSHDTSLGDGFEVVNSRYMTSYDDEDTPPGSGFRTKLREFHKSAASFTELDRNYLTPFFTSNNGDYDDEGNMEQHHGNNIIL

SEQ ID NO: 11380 - protein, 489 aa, Geobacillus kaustophilus HTA426
MKLLTLLSHLPGFWVHHGGNPDIVALEMDSRRVASGSLFFCLKGFTVDGHDFAEEAVARGAAAIVAERPLSVDVPVVLVSDSRRAMAILADAFYGRPTHRLHLIGVTGTNGKTTTTSIIEQIARKTGKKTGLIGTVHIKVGDRSYPAANTTPESLILQRTFKQMVDEGVEFVAMEVSSHALHQGRVHGCDYDVAVFTNLTQDHLDYHGTMEEYRNAKGLLFAQLGNRYDERRPKFAVLNHDDPVSQYYKHMTAAPIVTYGMREKSDVMAEQIRMTAGGMAFRLCTPHGSAAVETKLVGSFNVYNILAAAAACLASGFSLETIAAALADVEPVPGRFETVDEGQNFTIIVDYAHTPDSLENALKTVRQLAKRNVYVVIGCGGDRDPSKRPLMAQVAVRYADVAIFTSDNPRSEDPKQILRDMEAGVSAEIGKHVTIPDREEAIRYAIGQAQEGDVVLIAGKGHETYQIIGNDVIEFDDRAVARAAVKERG

SEQ ID NO: 11381 - protein, 171 aa, Frankia sp. R2
FFIHDPITKEQYSRDPRNIAKKAEAYLRGTGIADTAYFGPEAEFYIFDDVRYDYNPYGSMHAVDSVEAAWNTARKEEGGNLGYKPRFKGGYFPVPPTDHFTDLRSEMTRVLFEVGITVEMQHHEVGTAGQAEIDIRYDTLLKTADNLMLYKYVIRNVARSRGKTVTFMPKP

SEQ ID NO: 11382 - protein, 414 aa, Zea mays
  misc_feature (389)..(389): Xaa can be any naturally occurring amino acid
MWNDISLDSCGSCGYPLNLSSSNRSTSEVGSYKKSLKKGLISFISVDLSRFTQVDELESGSERSAFGLTCKNWFKVRNLGRKSLTFHCSFNPAIDKEHAKCIPKILAHSPCLNRISLAGLTELPDSALSTLRVSGSSLKSFSLYCCSGITDDGLAQVAIGCPNLVVVELQSCFNITDAALESLSKGCRGLKSLNLGSCMGITDQGVSAIFSNCPNICTLIVTGCRRLSGAGFRGCSSSFRYFEAESCMLSPDGLLDIASGSGLKYLNLQKLRSSTGLDGLGNLALAKSLCILNLRMCRYLTDDSVAAIASGCPLLEEWNLAVCHGVHLPGWSAIGLYCSKLRVLHVNRCRHICDQSLLALGNGCPRLEAVHINGCAKVTNNGLALFTLXRPHVNLRVYEVMSIGPSIENLFRLH

SEQ ID NO: 11383 - protein, 1070 aa, Kluyveromyces lactis
MIFRKVVRNPTVQNIQIYRKTLGHQIRDIIEKLTKKIDPFVKFIFPNFIAFHYFYIIAFALLCSILIYPVKNFAYIDILFLATGAATQGGLNTVDLNELSLYQQIVLYITTALTTPIFIHSGLAFVRFYWFERYFDGIRDWSKRDFEMRRTMTLRQRELTKNNTMENASRSTGQGPLNFLTRTFTHGDRDASNFQGRLFRGEVVKRDEDNNDDSSVDTRPPEAHSDHTEKFIGRRKSRDINPADMYRSIAMLQNRHESNDNIKGPALVIKSPAEREKEIEEQRRLQKEREEQQGQSIQFKVEPRPTKSTRSTFEPSGIRKSFTRRKRPSFFKGSQSARIIRDKLRRRSKGSDVNNVDDEEEEQDGHDADMEGSSEDDSVIESSDGQSESISAPNFDHHSSEPTLQSGGTVSAPSSLESNEIEEEDEELSDLPTGVSYYGLHSGGDPRNRLNRVMSTNYLSYEPKIGRNSTFVGLSESQKVELGGVEYRSTKVLCLLLSIYYLGFSILAMIIFAAWIQPMNNYKEIVRSQGVSPTWWGFWTGMSAFGNLGLTLTPNSMISFHKSIYTLIWMMWFIVIGNTGFPIFLRFVIWILFKLSPDLSLRKDSLGFLLDHPRRCFTMLFPKAATWWLFLILIGMNAIDLILFIILDLNTDVVKDLTAGFKVLNGLFQAVSTRTAGFAVLDLSQLHPSVQVSYMLMMYVSVMPLAISIRRTNVYEEQSLGVYGEWEKNQEDDGSEKNTKSFIGAHLRRQLSFDLWYMFLGLFIICICEGGKIQDPSKPSFTVFQCLFEVVSAYGTVGLSLGYPGSNQSFSGQFTTISKLVIIAMLIRGRHRGLPYTLDRAIILPSAKLKENDLLHELTHSRRPTTLGLNGSTSHDNRTTSVADSTSSIGNKHIDRFRDRSRSVWHGLTSAFSMGHQPRPHRTMTSRSLDDTITTDRMMSTQSNQSFNNESQQQTFSDGNNYPMHSMNSNHHYDNRSMTPNQYHVFRDSFDLRSGITEHKGLDGVHANTVEAFDHSNYNSNSNSNSNSNSNSKNTETSSSGPIFNHINSSTSLHSPHSTGSMQSLNSSPR

SEQ ID NO: 11384 - protein, 1484 aa, Candida glabrata CBS 138
MSLSALLNNDDPVEDTKLYLESLNREMDRLIKRDQLELMYQDWKFANYQEFELISEWNTQCKELVGDGNDLQNNDLMTEEVHLDDLYDNIQRIRNEWKDYESYKETRSQLLSKSIQAKPIKHRRRRRTKLEMEAAANLAALSQMGTTDVKTPEIINDHGNRSKASRSDTTNKTDNTMAGINSPTSDVDSGHKDELDQTKLIKKQEASSSTNSAASVTASVANGIVEDQKDEAERTIEANRIGSNMQNSDQDTMDDLKKTNDPSSDIDSDANTSVNDGSDENLSNKLDSDDLHSEPADNEEEPVSSDAEKDQAENINQTDESEEEIIVKEYDDNNDEDFAPEIKKPKPNGKIVTINSDRPKIVRELIKLRNKGKAPKSSKRRYTAVNITEYSPTEKKISVKITLKQMHVKKLKKILQDARKAEEKRLQEEAKQIADQESPRKRRKIDRSENTKQEDEDDKEDDDLDGLPTYGMKMSLKDAKAIQRHYDNTYTMIWKDMARKDCMKISRLVQQIQSTRALNYKKTSSLCAREARKWQTRNFKQVKDFQTRARKGIREMANFWKKNEREERDLKKKAEREALELAKKEEEEKESKRQAKKLNFLLTQTELYSHFIGRKIKTSALEGNEVAEEDEDNYDLTTTAPNKNDFHAIDFDNENDEQLKLKAAQNASNALAETRAKAKAFDDAHRQQQSTESDDEEEMNFQNPTSLGEITIEQPKMLACTLKEYQLKGLNWLANLYDQGINGILADEMGLGKTVQSISVLAHLAEHHNIWGPFLVVTPASTLHNWVNEISKFVPQFKILPYWGSANDRKVLRKFWDRKNLRYSEKSPFHVMITSYQMVVADASYLQKMKWQYMILDEAQAIKSSQSSRWKNLLSFHCRNRLLLTGTPIQNNMQELWALLHFIMPSLFDSHDEFNEWFSRDIESHAEGNSSLNQQQLRRLHMILKPFMLRRIKKNVQSELGDKIEIDVMCDLTQRQTKLYQVLKSQMSSNYDAIENAAAEGSDIAGGGNSDQSIINAVMQFRKVCNHPDLFERADINSPFSFTSFGKTSSLISSSIATSGGLTETISELMYSSTNPINCAIPKLIYEDLILPNYNNSIDIMEKLLLSDFSIYDPVNNKEMCQYLGLLTGLAYGSFRKIHKSNYFERIINLKKESKQSSQNLITVVSNANDLIADSIVHADTNLPNLTGIRNDIYHNDYLNSIQPGYCPKVVAPPINFNVNGSLNFTNKMSSYLFNPVITTALSSIPPPTQYNMFVKKCIPIEEFPISEMYPNPLNKHFSSNISMPSMDRFITESAKLKKLDELLVELKKNDHRVLIYFQMTKMMDLMEEYLTYRQYNHIRLDGSSKLEDRRDLVHDWQTNPEIFIFLLSTRAGGLGINLTAADTVIFYDSDWNPTIDSQAMDRAHRLGQTKQVTVYRLLVRGTIEERMRDRAKQKEQVQQVVMEGKTKDTNIQTTHTRPEHEQLTPKSLSSEPEATNNLITVKN

SEQ ID NO: 11385 - protein, 392 aa, Hiraea fagifolia; identical to SEQ ID NO: 7934

SEQ ID NO: 11386 - protein, 444 aa, Bacillus subtilis
MAKYTREDIVKLVKEENVKYIRLQFTDILGTIKNVEIPVSQLEKALDNKVMFDGSSIEGFVRIEESDMYLYPDLNTFVIFPWTAEKGKVARFICDIYNPDGTPFEGDPRNNLKRILKEMEDLGFSDFNLGPEPEFFLFKLDEKGEPTLELNDKGGYFDLAPTDLGENCRRDIVLELEEMGFEIEASHHEVAPGQHEIDFKYAGAVRSCDDIQTFKLVVKTIARKHGLHATFMPKPLFGVNGSGMHCNLSLFKDGVNAFYDENADLQLSETAKHFIAGIVKHATSFTAVTNPTVNSYKRLVPGYEAPCYVAWSAQNRSPLIRIPASRGISTRVEVRSVDPAANPYLALSVLLAAGLDGIKNKLEAPAPIDRNIYVMSKEERMENGIVDLPATLAEALEEFKSNEVMVKALGEHLFEHFIEAKEIEWDMFRTQVHPWEREQYMSQY

SEQ ID NO: 11387 - protein, 521 aa, Arabidopsis thaliana
MEEVMISPVEHDPQGQVKQQQAAGVGILLQIMMLVLSFVLGHVLRRHRFHYLPEASGSLLIGLIVGILANISDTETSIRTWFNFHEEFFFLFLLPPIIFQSGFSLQPKPFFSNFGAIVTFAIIGTFVASVVTGGLVYLGGSMYLMYKLPFVECLMFGALISATDPVTVLSIFQDVGTDVNLYALVFGESVLNDAMAISLYRTMSLVNRQSSSGEHFFMVVIRFFETFAGSMSAGVGVGFTSALLFKYAGLDTENLQNLECCLFVLFPYFSYMLAEGVGLSGIVSILFTGIVMKRYTFSNLSEASQSFVSSFFHLISSLAETFTFIYMGFDIAMEQHSWSHVGFILFSILFIGVARAVNVFGCAYLVNLFRQENQKIPMKHQKALWYSGLRGAMAFALALQSLHDLPEGHGQIIFTATTTIVVVTVLLIGGSTGKMLEALEVVGDDLDDSMSEGFEESDHQYVPPPFSIGASSDEDTSSSGSRFKMKLKEFHKTTTSFTALDKNFLTPFFTTNSGDGDGDGE

SEQ ID NO: 11388 - protein, 723 aa, Kluyveromyces lactis NRRL Y-1140
MAVMEAPLPQGAGYAVVVGLGFVFAFAMILTTYVLRRYQKEIITAEEFATAGRSVKTGLIAAAVVSSWTWAATLLQSTTMVYKVGISGGYFYAAGAGYQVILFSALAIKCKQRAPNAHTYLEIIKARYGTIGHFCYMFYALATNVLVTAMLLTGGSAVVSDLTGMHTVAACFLLPVGVVLYTIFGGIKATFLTDYVHTIVIIVIIMIFAFTVYATNSQLGSPKAVYDLVREAAKAHPIEGNAGGEYLTMRSRSGGIFFVINIVGNFGTVFLDAGYWNKAISSSPAAALPGYVLGGLSWIAIPNLISLAMGLACVALESSPNFPTYPERLTAEQVSAGLVLPTAAVTLLGKGGAVASLLLVFMAVTSAMSAELIAVSSIFTYDIYRSYLKPKATGKQLIFSSHISCIVFGLIMSGFATGLYYAGISMGYLYELMGIIISSAVIPCALSLFWDAQNLVAVVASPIIGTSLAIMSWLVCTKSLYGEITVSTTFEDDPMLTGNIVALLSPLITIPLLTYIFKPQNFDWEILKTITRADEEEELLEAEGNEVSVSDSDSVGNNQDAEKLQAVKTVITTVDEIPRETIERMAEEESQYLSRASKIAGYLAIFFAISFMVLWPMPMYGTGYIFSEKFFTGWVCVLIIWIFFTAFCVCCYPLWEGRHGIYTTVRGIYWDLSGQTYKLREWQDANPREMKAVQSQIIAKIESIRSETNKSKVRQNLDDVIER

SEQ ID NO: 11389 - protein, 392 aa, Janusia californica; identical to SEQ ID NO: 7937

SEQ ID NO: 11390 - protein, 318 aa, Brucea javanica; identical to SEQ ID NO: 7938
  misc_feature (50)..(50): Xaa can be any naturally occurring amino acid
  misc_feature (261)..(261): Xaa can be any naturally occurring amino acid
  misc_feature (263)..(263): Xaa can be any naturally occurring amino acid

SEQ ID NO: 11391 - protein, 133 aa, Glycine max
MEPMDIVGKAKEDASLPKATMTKIIKEMLPPDVRVARDAQDLLIECCVEFINLVSSESNEVCNKEERRTIAPEHVLKALGQDSLKGAKWSNRAEMTEEEALAEQQRMFAEARARMNGGAIQSKEPEADQSLES

SEQ ID NO: 11392 - protein, 392 aa, Janusia californica; identical to SEQ ID NO: 7941

SEQ ID NO: 11393 - protein, 423 aa, Oryza sativa
MAGGEYTPADAEADLLLPPPAGSEPDEPAARPAPADTLGVAYAIFFTLGTGFLLPWNAYITAVDYFSYLYPGAPVDRVFSVSYMLACFLPLVLIVLCFPKSSAPARINTGMSLFTVALLVVPVMDAVYVRGVPGLYGAFDVTVAATVLCGVADALVQGGVIGFAGELPARYMQAVVAGTATSGVLVSVLRVITKGVYPQDANGLRKSAILYFVVSIVVMIICIVCYNVADKLPVVIYYKNIKKRAQKAEEDGGMSGSAWRSTLWSIVGRVKWHGIGIALIYAITLSIFPGYITEDVHSEALKDWYPIMLITAYNVFDLVGKSLPAFYFLENANIAVAGSFARLLFYPLFYGCLHGPSFFRTEIPVTILTCLLGFTNGYLTCILMTLAPKAVPIQHSETAGIVIVLFLVAGLVVGSFVAWFWVI

SEQ ID NO: 11394 - protein, 516 aa, Brassica napus
MAQSSRICHGVQNPCVIISNLSKSNQNKSPFSVSLKTHQPRASSWGLKKSGTMLNGSVIRPVKVTASVSTSEKASEIVLQPIREISGLIKLPGSKSLSNRILLLAALSEGTTVVDNLLNSDDINYMLDALKKLGLNVERDSVNNRAVVEGCGGIFPASLDSKSDIELYLGNAGTAMRPLTAAVTAAGGNASYVLDGVPRMRERPIGDLVVGLKQLGADVECTLGTNCPPVRVNANGGLPGGKVKLSGSISSQYLTALLMAAPLALGDVEIEIIDKLISVPYVEMTLKLMERFGVSAEHSDSWDRFFVKGGQKYKSPGNAYVEGDASSASYFLAGAAITGETVTVEGCGTTSLQGDVKFAEVLEKMGCKVSWTENSVTVTGPSRDAFGMRHLRAVDVNMNKMPDVAMTLAVVALFADGPTTIRDVASWRVKETERMIAICTELRKLGATVEEGSDYCVITPPAKVKPAEIDTYDDHRMAMAFSLAACADVPVTIKDPGCTRKTFPDYFQVLESITKH

SEQ ID NO: 11395 - protein, 392 aa, Janusia californica; identical to SEQ ID NO: 7942

SEQ ID NO: 11396 - protein, 165 aa, Ralstonia solanacearum GMI1000
MSDIYAFEADSLAGQRVPLSQYRGKVLLIVNTASQCGFTPQYAGLEAVYKRLNEKGLEVLGFPCNQFGKQEPGGAEEIGAFCEKNYGVSFPMFGKIEVNGSNAHPLYKWLTSEKPGVLGTEAIKWNFTKFLLRRDGTVYKRYAPLTKPEEMLGDIETLLAEPDPL

SEQ ID NO: 11397 - protein, 206 aa, Anemia phyllitidis; identical to SEQ ID NO: 7943

SEQ ID NO: 11398 - protein, 392 aa, Mascagnia chasei; identical to SEQ ID NO: 7946

SEQ ID NO: 11399 - protein, 204 aa, Anemia phyllitidis
VMAYKFHDDEHGEVVAEIRRSDLEPYMGLHYPATDIPQAARFLFMKNRVRLIYDCRLPPVKVIQDKNLVQPLSLAGSTLRAPHRCHAEYMGNMGSIASLGMAVIVNDDDSSDAGNMQQRTRLWGLVVCHHTSTRYVPFPLRSACEFLMQVFSLELNMEVELAAQRREKHILQTQTLLCDMLLRDAPIGIVSQSPNIMDLVKGSI

SEQ ID NO: 11400 - protein, 821 aa, Oryza sativa
MASTSRRGGGEDDDDEPYLLGFIVANAVGLQYYQGGRAITRRESVGLVREPHNPHDANAIRVDNARGEKIGHIGRRAAAALAPLLDAGHVAAAHGIVPKPASKRLYSLPCQVHLFARPPHAALVAAALAASGIDLIHVDHPEFALSESAIVQEQQTKRSRGDVDRLFSHVGKGGRARIAPMEAPRDVVVSELFEHQKAALGWLVHREESCDLPPFWEEDNDGGFKNVLTNQKTNERPPPLKGGIFADDMGLGKTLTLLSLIGRSKARNVGGKKARGAKRRKVEEAVEEESRTTLVVCPPSVFSSWVTQLEEHTKTGSLKVYLYHGERTKEKKELLKYDIVITTYSTLGQELEQEGSPVKEIEWFRVILDEAHVIKNSAARQTKAVIALNAERRWVVTGTPIQNSSFDLYPLMAFLRFQPFSIKSYWQSLIQLPLERKNNGIGLARLQSLLGAISLRRTKETESGSKSLVSIPPKTVLACYIELSAEEREYYDQMELEGKNKLREFGDRDSILRNYSTVLYFILRLRQLCNDIALCPLDLKSWLPGSGSSLEDVSKNPELLKKLASLVDDGDDFECPICLAPPAKTVITSCTHIYCQTCIMKILKSSSSRCPICRRSLCKEDLFIAPEIKHPDEDSSVNLDRPLSSKVQALLKLLRRSQSEDPLSKSVIFSQFRKMLILLEGPLKAAGFNILRLDGSMTAKKRSEVIRQFGCVGPDSPTVLLASLKAAGAGVNLTAASTVYLFDPWWNPGVEEQAMDRVHRIGQTKEVKVVRLIVKDSIEERMLELQERKKKLISGAFGRKKGGKEHKEIRVEELQMMMGMK

SEQ ID NO: 11401 - protein, 206 aa, Dryopteris filix-mas; identical to SEQ ID NO: 7951

SEQ ID NO: 11402 - protein, 848 aa, Candida albicans SC5314
MAVRKPLTQFTTPLGSGAGVPKDKRPPRVTDSATRLSKPFKVPFSSSTQNSVSSETITISRRPVRSTRKRTNYAVDGITSEKDDEEEYNNDQNVNGDGQIIKRKKFGALLPRSIINSDNIAKNEDKFKRSFTVPFDKNNSKQTEIQRGPPPPLGTKVRAILPPRALHDPTSEFAIVLYDPTVDKIPKISEVESSTSSSTSPEPEPETKETEERPIKRKRTHKSLAEILGIVTNPEEKLSKYPDVPVVIDPKLAKILRPHQIAGVKFLYRCTAGLIDARAKGCIMADEMGLGKTLQCLTLMWTLLRQSPRGKRTIEKCIIVCPSSLVRNWANEIVKWLGEGALTPLAVDGKSTKNSELGTALQQWSTAQGRNIVRPVLIISYETLRRNVDKLAGTEVGLMLADEGHRLKNGDSLTFTALNSLRCERRVILSGTPIQNDLSEYFSLLNFANPGYLGTRIEFKKNYENAILKGRDSTASDEEREKGDKKLNELSQMVSKFIIRRTNDILSKYLPIKYEYVLFTGLSPMQKDIYNHFITSPEIKKLMKGTGSQPLKAIGMLKKLCNHPDLLDLPEDVEGSEEFIPDDYQSSIAGGSASRNREIQTWFSGKFLILERFLQKINKETDDKIVLISNYTQTLDLIEKMCRYKKYGVLRLDGTMNINKRQKLVDKFNDPNGPEFIFLLSSKAGGCGINLIGANRLVLMDPDWNPASDQQALARVWRDGQKKDCFIYRFISTGTIEEKIFQRQSMKMSLSSCVVDEKEDVERLFSVANLRQLFKFQPDTQCDTHDTFNCNRCKGDKGQFIKAPAMLYGDATTWNHLNHQALANNEDILITNEAQHNDVTFAFQYISH

SEQ ID NO: 11403 - protein, 239 aa, Zea mays
MELRRPAPSPLVDNYVVPGDVVLDLSEMNNQTIKLGAGLRQECDTIEATSAGKLRQLKPNKYCIENSQKRYKPSVEDTVLGIVVDTKPDNFLVDIKGPNLAFLPVLSFEGGTRRNIPKFKIGTLIYARVVKANSIMNPELSCMDATGKAAKFGQLKDGYMFDTSTGMSRMLLSSPTCPVLEVLGKKLSFEIAVGLNGRVWVNAPAASTVILVSNAIMRSESLSGIKQRAMVENLLERLS

SEQ ID NO: 11404 - protein, 219 aa, Oryza sativa Indica Group
MPDSDNDSGGPSNYAGGELSSPREQDRFLPIANVSRIMKKALPANAKISKDAKETVQECVSEFISFITGEASDKCQREKRKTINGDDLLWAMTTLGFEDYVDPLKHYLHKFREIEGERAAASTTGAGTSAASTTPPQQQHTANAAGGYAGYAAPGAGPGGMMMMMGQPMYGSPPPPPQQQQQQHHHMAMGGRGGFGHHPGGGGGGSSSSSGHGRQDRGA

SEQ ID NO: 11405 - protein, 407 aa, Synechococcus sp. WH 5701
MLTIESVELLLLVAAVVAMVARRLRLPYSVGLVLGGIVLAWLPFAPDIALTRELIFNAFLPPLIFEAAFYIAWPSLRKDLPVVLTLATVGVVLSAGITTVGMHVLAHWSWPASLLFGVLISATDPVSVIATFKEAGVHGRLRELVEAESLLNDSTAAVGFGIAIAFATGAAITPLGTTQFLAVTIVGGVACGAAVAAALLALAGRTEDPLVEITFTTIAAYGSFLLAEHLEVSGVLATLTAGIMLGNLGPLGAISPKGREAVQSFWDYAAFVVNSLIFLLMGMLEAHQNFTRVLLPIGIAIALVTVGRALSTYLCCSLFQGSPLRVKASHQHVLFWGGLRGALALALSLGLPTSLPYRDTVVTVAFAVVAFSVIVQGLSITPLMRSLGEIGPASADIAGDIALEASR

SEQ ID NO: 11406 - protein, 343 aa, Brassica napus
  misc_feature (210)..(210): Xaa can be any naturally occurring amino acid
STHASAEFSSHFFSSVDHLDGPNHPKKPLTIKEAAKPEAKAMAPPKFRPPVVSVGPSHCGSNQSTNDHQVTHPPVSMSDRSKNVEERLDTSSGGSSGCSKETESGRSVSISRKRKHAMDTDQESMSQSDVRLMPTDDQTMGNKSSQRSGSTRRSRAAEVHNLSERRRRDRINERMKALQELIPHCSKTDKASILDEAIDYLKTLQMQLQXVMWMGSGMAAAAAAAATPMMFPGVQSSQYINQMAMQSQMQMPQFPVMNRPAAQNHPGLVCQNPAVQFQMQAQNQMLSEQLARYMGGFPPMPATTQTQTVQQPMDMMRFGSQVGQQSQLSTPVTTDSLRMGKTG

SEQ ID NO: 11407 - protein, 169 aa, Oryza sativa
MALVEGNNGVSGGAVSFSEEQEALVLKSWAIMKKDSANIGLRFFLKIFEVAPSASQMFSFLRNSDVPLEKNPKLKTHAMSVFVMTCEAAAQLRKAGKVTVRDTTLKRLGATHFKYGVGDAHFEVTRFALLETIKEAVPVDMWSPAMKSAWSEAYNQLVAAIKQEMKPAE

SEQ ID NO: 11408 - protein, 491 aa, Methanopyrus kandleri AV19
MPRRLQNVYKVPGRGRHQLRIAGKSIPGVSPLADEVYTVDFKKRQKENEEKVEKVMEQVESKDVKFVRLQFVDIHGFVKNFAIPAERLEDALVEGVLFDGSSIDGFVDIEESDMIAMPDPDTFAVLPWRPREGKVARIICDVYWPEGKPFEGCPRLNLKRVMNELAEKGYMMYCGPECEFYLLKQDPETGEVEAHDEGGYFDFYPLDRAEDIRREIIFAMEEFGLEVEMSHHEVGPGQHEIDFKFADAVTTADNVISFKQIVKAIARKHGLIATFMPKPIYGENGNGMHVHQSLWDPEGKENLFYDPDAEDQYYLSDTALYYIGGIMEHAHALCAVCNPLVNSYKRLVPGYEAPVYIAWSPKNRSAFIRVPAARGKATRIEYRSPDPACNPYLAFAAMAVAGVDGIENKIDPGDPVNENLYEMSEEERKELGIEHLPENLRDALEAFKEDEVVQSAFTDHIVEQWLELKWEEWSEYRERVTKWEIKKFIVY

SEQ ID NO: 11409 - protein, 171 aa, Frankia sp. PtI6
FFIHDPITKEQYSRDPRNIANKAEAYLRGTGIADTAYFGPEAEFYIFDDVRYDYNPYGSMHAVDSVEAAWNTARKEEGGNLGYKPRFKGGYFPVPPTDHFTDLRSEMTRVLFEVGITVEMQHHEVGTAGQAEIDIRYDTLLKTADNLMLYKYVIRNVARRPRKTVTFMPKP

SEQ ID NO: 11410 - protein, 1120 aa, Saccharomyces cerevisiae YJM789
MTTQQEEQRSDTKNSKSESPSEVLVDTPDSKSNGSSDDDNIGQSEELSDKEIYTVEDRPPEYWAQRKKKFVLDVDPKYAKQKDKSDTYKRFKYLLGVTDLFRHFIGIKAKHDKNIQKLLKQLDSDANKLSKSHSTVSSSSRHHRKTEKEEDAELMADEEEEIVDTYQEDIFVSESPSFVKSGKLRDYQVQGLNWLISLHENKLSGILADEMGLGKTLQTISFLGYLRYVKQIEGPFLIIVPKSTLDNWRREFLKWTPNVNVLVLHGDKDTRADIVRNIILEARFDVLITSYEMVIREKNALKRLAWQYIVIDEAHRIKNEQSALSQIIRLFYSKNRLLITGTPLQNNLHELWALLNFLLPDIFGDSELFDEWFEQNNSEQDQEIVVQQLHSVLNPFLLRRVKADVEKSLLPKIETNVYVGMTDMQIQWYKSLLEKDIDAVNGAVGKREGKTRLLNIVMQLRKCCNHPYLFEGAEPGPPYTTDEHLIFNSGKMIILDKLLKRLKEKGSRVLIFSQMSRLLDILEDYCYFRDFEYCRIDGSTSHEERIEAIDEYNKPNSEKFVFLLTTRAGGLGINLVTADTVILFDSDWNPQADLQAMDRAHRIGQKKQVHVYRFVTENAIEEKVIERAAQKLRLDQLVIQQGTGKKTASLGNSKDDLLDMIQFGAKNMFEKKASKVTVDADIDDILKKGEQKTQELNAKYQSLGLDDLQKFNGIENQSAYEWNGKSFQKKSNDKVVEWINPSRRERRREQTTYSVDDYYKEIIGGGSKSASKQTPQPKAPRAPKVIHGQDFQFFPKELDALQEKEQLYFKKKVNYKVTSYDITGDIRNEGSDAEEEEGEYKNAANTEGHKGHEELKRRIEEEQEKINSAPDFTQEDELRKQELISKAFTNWNKRDFMAFINACAKYGRDDMENIKKSIDSKTPEEVEVYAKIFWERLKEINGWEKYLHNVELGEKKNEKLKFQETLLRQKIEQCKHPLHELIIQYPPNNARRTYNTLEDKFLLLAVNKYGLRADKLYEKLKQEIMMSDLFTFDWFIKTRTVSELSKRVHTLLTLIVREYEQPDANKKKRSRTSATREDTPLSQNESTRASTVPNLPTTMVTNQKDTNDHVDKRTKIDQEA

SEQ ID NO: 11411 - protein, 204 aa, Glycine max
HACAHASAQVLNVWKEQGHRVLLFTQTQQMLNIFENFLTTSGHIYRRMDGLTPVKQRMALIDEFNDSSEIFIFILTTKVGGLGTNLTGANRVIIFDPDWNPSTDMQARERAWRIGQKRDVTVYRLITRGTIEEKVYHRQIYKHFLTNKILKNPQHKRFFKARDMKDLFTLNVDGETGSTETSNIFSQISEEVNVIGTYKENKDK

SEQ ID NO: 11412 - protein, 171 aa, Acidothermus cellulolyticus
FFIHDPLTGEAYSRDPRNVARKAEAYLVSTGIADTAYFGPEAEFYIFDEVRFETSAHQSYYHIDSVAGAWNTGRIEDNGNRGYKVRYKGGYFPVPPTDHFADLRAEMARELIRAGILVEKQHHEVGTAGQAEINYKFNTLLRAADDMQLFKYIVKNVAWRAGKTVTFMPKP

SEQ ID NO: 11413 - protein, 473 aa, Sulfolobus tokodaii str. 7
MPSLPKTAEEALKFLKDNKIKWVDLQFTDLPGRLHHITVPASEFTEDSFKTGFGKLDGSSIKGFTMIYESDMVLMPIPQTMAVIPWNEGIARVITQVFWGGGKGRFERDPRHIAEEAEKKQSEEGYISYFGPELEFFIFDKVDLDVATPQSGTGYKIHAREAPWARNGGFLIRYKEGYYPAPPVDQLMDIRVEAINILTDYFGFNIEATHHEVATAGQGEIDFRFSTLADTADKVQTLKYVVKNVAAKHGMIATFMPKPMFGDNGTGMHTHFSLWTKDGKNLMYDPNDEYAELSQIGRYIVGGILEHGRALSAIVSPTTNSYRRLIPGYEAPVYLVWSKSNRSAAIRIPSYYRGMEKAKRLEYRPPDPSCNPYLAFAAILMAALDGIKKKIEPGDPVDENVYHMSEERKKQLKIKELPRSLDEALDELESDNEFLKPVFNSSILNTYIDLKRDEAKTMQQYPHPMELYYYLDA

SEQ ID NO: 11414 - protein, 160 aa, Bacillus anthracis str. Ames
MTVYDFSAKTITGEEKSLKDYEGKVLLIVNVASKCGFTPQYKGLQEVYDKYKEQGLEILGFPCNQFGGQEPGTEADITSFCELNYGVNFPMFAKIDVKGDKAHPLYTYMTEQAPGLLGMKAVKWNFTKFLIGKDGKVVGRFAPQTKPVDLEVEIEKVLGE

SEQ ID NO: 11415 - protein, 473 aa, Prochlorococcus marinus str. MIT 9215
MSKSPQDVLSQIKDEGIELIDLKFADIHGKWQHLTLTSDMIEEDSFTEGLAFDGSSIRGWKAINASDMSMVPDASTAWIDPFYKHKTLSMICSIQEPRSGEPYDRCPRYLAQKAIKYLESTGIADTAFFGPEPEFFLFDDVRYDSKEGSCFYSVDTIEAPWNTGRIEEGGNLGYKIQYKEGYFPVSPNDTAQDIRSEMLLLMGELGIPTEKHHHEVAGAGQHELGMKFDSLINSADNVMTYKYVVRNVAKKYGKTATFMPKPVFNDNGTGMHVHQSLWKSGQPLFFGEGAYANLSQTARWYIGGILKHAPSFLAFTNPTTNSYKRLVPGFEAPVNLVYSEGNRSAAVRIPLTGPSPKAKRLEFRSGDALANPYLAFSVMMLAGIDGIKNQIDPGDGVDVDLFELPADELAKIDTVPSSLNDSLNALKADNEYLLAGGVFTEDFIDNFIDIKYEEVQQLRQRPHPHEFFMYYDA

SEQ ID NO: 11416 - protein, 864 aa, Pinus sylvestris; identical to SEQ ID NO: 7965

SEQ ID NO: 11417 - protein, 229 aa, Brucea mollis; identical to SEQ ID NO: 7967
  misc_feature (6)..(7): Xaa can be any naturally occurring amino acid

SEQ ID NO: 11418 - protein, 382 aa, Salmonella enterica subsp. enterica serovar Typhi str. CT18
MKALHFGAGNIGRGFIGKLLADAGIQLTFADVNQVVLDALNARHSYQVHVVGENEQVDTVSGVNAVSSIGDDVVDLIAHVDLITTAVGPVVLERIAPAIAKGLVKRKAQGVDAPLNIIACENMVRGTTQLKGHVMNALADGDKAWVEQHVGFVDSAVDRIVPPSASATNDPLEVTVETFSEWIVDKTQFKGALPNIPGMELTDNLMAFVERKLFTLNTGHAITAYLGKLAGHQTIRDAILDEGIRAVVKGAMEESGAVLIKRYGFDADKHAAYIQKILGRFENPYLKDDVERVGRQPLRKLSAGDRLIKPLLGTLEYGLPHVNLVKGIAAAMHFRSDEDPQAQELAALITEKGPQAALAQISGLDANSDVVAEAVNAYNATK

SEQ ID NO: 11419 - protein, 164 aa, Triticum aestivum
ADRASNLTDAAVDSLVQSINVADGVKARFFTNILALAESAGEKVLAFSQYLLPMKFLERLLVKTRGWHVGKEMFVIRGDSKCTMEERELTVAQFNNSADAKVLFGSIKACGEGISLVGASRVVILDVHLNPSVTRQAIGRAFKPGQQKKVFVYRAQDSRGENNP

SEQ ID NO: 11420 - protein, 188 aa, Pseudotsuga menziesii var. menziesii
DDVIVISIDGAPKEGCQHISVLTEADETQCPSVAIHPDDVVALPYSSGTTGLPKGVMLTHKSLVSSVAQQVDGENPNLYFHSEDVILCVLPLFHIYSLNSVLLCALRAGAATLIMQKFNLTMLLELIQRYKVTVAPIVPPIVLDITKNPIVSQYDVSSVRIIMSGAAPLGKELEDALRERFPKAIFGQ

SEQ ID NO: 11421 - protein, 1242 aa, Yarrowia lipolytica
MDKSKKSKNFKKIGQPRIITGASMYDYQIHGIEWMASLYENGLNGILADEMGLGKTLQTIAFLSFLIEKQVGGPYLVVVPLSTLNNWENEFRKFAPSIPVVKFYGDKKERAALWKGVRVDYEMRGLKKRGGKDGEFVETFPVVITTYETVVMETRRLQMMTWKYLIVDEGHRIKNVNSLLLKKLKLLDTSNRLLLTGTPLQNNLTELWSLLNFLLPDVFSDLSMFQSWFDEKENGSGDGFGGENRSAELVETLHSILKPFLLRRLKSEVYSNLPDKREYLIYIQMAPLQEALEHRLRRHARTINTKAQKKDRVTPEIVPEPLGKRVRKQIVREDVVDTFDADLGSDDDGYDSNESVDRDLKRQKKEDYEEEEDYEDGSDGEEEEEEEDDEEGGSEVEDEGIRKKKKKHVNSTTSSSLLPPADKAAPLTQLQKDIIEGRVKWVDNKWVPKTEEELAKMEADRALAENLMNEHTMSETAQMADHVPKDILDVINDTKNASTTIPSLQPMHPDAPRHAIKSDPHQMPPKNYYSAPDGNWYPLYLHPLFPKRKQTVTGMTNHVIGSDGFGKPLKESHQKSREQKSREQKSREQKSREQKSREQSPSQKLGSCVSTAAKVESRDLTSSFSVKKELDPVDQYMLRLQLLKEKREKEEAEAAAERAKMDPVDAYVDKLRQLQRLSPEDEEETDVETKMEEELRRLREETLNSLDSVEAETETESREMRELRAELLGLKKQEDVKSESETVKKGSFGEDKDSMKKEQVSISSFVKSESEGVTSKNDSESSGVSEPSAVTVTSGMAFEPIYSASQSSEVTHNAPETVQSPSMVSDTTLNPSTLSDTALNPSIVSDTAPKPSTSPSVTPTAPKTVVKPSTTSQLSAVPLTTISDSDSDEFASANEDLQESNGKVPPEDLDEEVSEKLKEEVKSEQKVVDSVDEKAAEVVQELSTSVMPSRDLTPEELAPDITEFLSTIAFDKISTSQTLANLRKVANSPYLVKFPWGEEEPVDERIISDSGKMRVFDQLAMELVSRKHKMLVFSQFSGTLDLLTEWCEFRHLPYCMLIGSMGLEERQEMIDAFNEESGPSIFLITTRAGGTGINLTAADSVVIFDSDWNPQQDKQAIDRSHRIGQKKPCVIYRLISTNTMEEMLVRVASDKKRLDEMVIQAGDYSGFSKDANKTVDIDKTFLREIMTGKSDYEAHEGIEKIDDELMETLLDRSDESYKRHRDKTVELPKSIEVIIGSRDEHT

SEQ ID NO: 11422 - protein, 612 aa, Frankia sp. EAN1pec
MARAVGIDLGTTNSVVSVLEGGEPTVIANAEGSRTTPSVVAFAKNGEVLVGEVAKRQAVTNVERTIRSVKRHMGTDWKMTVDSKEFTPQEISARILQKLKRDAEAYLGESVSDAVITVPAYFDDAQRQATTEAGTIAGLNVLRIVNEPTAAALAYGLDKGEKEQTILVFDLGGGTFDVSLLEIGDGVVEVKSTSGDTQLGGDDWDQRITDHLIKTFNGQHGVDLGKDKMALQRLREAAEKAKIELSQSTQTSINLPYITASAEGPLHLDVSLSRAELQRMTQDLIDRCKGPFQQAVKDAGIKISDVDHVVLVGGSTRMPAVVDLVRELTGGKEPNKGVNPDEVVAVGASLQAGVLKGEVKDVLLLDVTPLSLGIETKGGIMTKLIERNTTIPTKRSEIFTTAEDSQPSVQIQVFQGEREMAAYNKKLGMFELTGLPPAPRGMPQIEVTFDIDANGIVHVSAKDLGTGKEQSMTITGGSALPKDDINRMVQDAEQYAEEDRQRREEAETRNRAESLVYSTERFLAENGDKIEAGVKSDVEEKLSTLRGAVGGTDIAAIREAADELTKASQAMGESMYAQAAGAQGAPGAPGAGAGQADDDVVDAEIVDEEDKK

SEQ ID NO: 11423 - protein, 392 aa, Peixotoa glabra; identical to SEQ ID NO: 7974

SEQ ID NO: 11424 - protein, 1525 aa, Kluyveromyces lactis NRRL Y-1140
MVQDLPDEVLANPELYGLRRSHRAAITHNTYAGLDSDSDEEVIRPRRGKQKRKAVKQEHNYDEEEEEEEEIDDFSDTDDFGSKRKPTRAPSAKRGRKRVSAGNSKSKRQAKRVEESDEENVVLPTRFSSRNNNKVINYTLNDDSNDEDLMESSEEQDEGHNLDSEDMDLQDGYSASPSPQQETHSIDIVVDHRLKEGVDNSGSTKNRRWDVDSIRANFEFLIKWADQSHLHNSWESYEDLKENGTKGLKRIENYYKQFIILDQEVRADPYTTREDIEVMDLEHERRIDEFEEFKVPERIIDSERFENEDGSGSSQLKYLVKWRRLNYDECTWEVASEIVKMAPEQVKEFQNRTNSKIMPQNSSNYPANQRPKFEKLDAQPSFIKGGELRDFQLTGINWMAFLWSKNDNGILADEMGLGKTVQTVSFISWLIYARRQNGPHLVVVPLSTMPAWQETFDKWAPGLNCVYYMGNQASRDLIQDYEFYTNPQAKGKKHLKFNVLLTTYEYILKDRSTLGSIKWQFLAVDEAHRLKNAESSLYESLNSFKVANRLLITGTPLQNNIKELAALVNFLMPGRFTIDQEIDFENQDEQQEEYIRDLHKRLQPFILRRLKKDVEKSLPSKTERILRVELSDVQTEYYKNILTKNYSALTSGIKGGHVSLLNVMNELKKASNHPYLFDNAEERVLSKFGDGHKSRENILRGLIMSSGKMVLLDKLLTRLKKDGHRVLIFSQMVRILDILGDYLSIKGINFQRLDGTVPSAQRRISIDHFNAEDSNDFVFLLSTRAGGLGINLMTADTVIIFDSDWNPQADLQAMARAHRIGQKNHVMVYRFVSKDTVEEEVLERARKKMILEYAIISLGVTDGNKISSTKKNEPSAGELSEILKFGAGNMFKPNDNQQKLEDLNLDEVLNHAEDHITTPELGESNLGGEEFLRQFEVTDYKADVDWDDIIPEDELKKLKDEEQRRIDEEYVREQLDIMNRKTAAIDKIKRSVNGETFGSDSEDEGNSKSRKRSKANNLDAFGEREIRALYKCILRFGDIENKFEELIADGSLPVKSIDRYKELYHEMITEAETLMRDEEAKRHEIFSKLEKDAAEYRQKIKNLEIKPEDDAGKETPITLLSAKRREKRAILFEFHDTKALNADTLVNRRDNLKFLSNFVERNYKDDPLQFKFVNKNPKPVSAWNCVWGKEDDEKLLIGIYKYGYGAWMQIRDDPFLGLTEKLFLNNEVTQKAATPAAPSLTPSAPGASVAGSSTPGADAVKTETPDTTANTPIVTASSENTNKKTVKKAPGAVHLGRRVDYLFTVLRDEAKGPQTDPSHPAGSSSTGTTTPQQNKRKPKKSATTAGNSNGNENAHTAGTPSDGNSVNLTGKDSTPDNSSETKRGKAHHHQQPSSRSGTPVVGSKKQQRKGKDIPLAPKADIRLPDKEYDSMDEEECKKTMTNVRSSLKRLRSGGDGLERKQWANLLKKELKRVGDYIESHKKDSSKTSPEKYKRHLWSFTAYYWPRDVPSSKLLAMYDKIKASEH

SEQ ID NO: 11425 - protein, 468 aa, Propionibacterium acnes KPA171202
MSAVYRSHDQPCYQLETHNGHTGKVSRQTEFVLRSMEERNIRFVRLWFTDVLGSLKSVAIAPAEVEGAFVEGVGFDGSAIEGYARVYEADMVAHPDPATFQVLPWRSGTSTARMFCDITNPDGTSSAADPRHVLKRTMGRAAEMGFTFYVHPEIEFYLLNDEHHPGESPVALDNGGYFDHTTLGAGTDFRRDAINVLEQMGISVEFSHHEAAPGQHEIDLRYADALTMADNIMTFRVVIREIASLKGIKATFMPKPFTDHAGSGMHSHVSLFEGDTNAFYDAADEARMSPVAKYFVAGLLHHAPEIIAVTNQWVNSYRRLSGGGEAPNYICWGRNNRSALVRIPMYKPDKASSARVELRSIDSAANPYLAYSLVLAAGLDGIEKELPLPEEASDDVWQLSARERHALGIKQLPQSLGAAIRCMEESELVAETLGEHVYDYFLRNKRAEFEEYNRQVSQFELDRYLPHL

SEQ ID NO: 11426 - protein, 392 aa, Tetrapterys discolor; identical to SEQ ID NO: 7977

SEQ ID NO: 11427 - protein, 188 aa, Pseudotsuga menziesii var. menziesii
DDVIVISIDGAPKEGCQHISVLTEADETQCPSVEIHPDDVVALPYSSGTTGLPKGVMLTHKSLVSSVAQQVDGENPNLYFHSEDVILCVLPLFHIYSLNSVLLCALRAGAATLIMQKFNLTMLLELIQRYKVTVAPIVPPIVLDITKNHIVSQYDVSSVRIIMSGAAPLGKELEDALRERFPKAIFGQ

SEQ ID NO: 11428 - protein, 226 aa, Glycine max; identical to SEQ ID NO: 458

SEQ ID NO: 11429 - protein, 662 aa, Physcomitrella patens subsp. patens
MGRHTLLVLGLLFAAGVAGSFGAAEEAAKLGTVIGIDLGTTYSCVGVYKNGHVEIIANDQGNRITPSWVAFTDNERLIGEAAKNQAAVNPERTVFDVKRLIGRKFEDKEVQKDIKLFPYKIVNKDGKPHIQVKVKDGEVKVFTPEEISAMVLVKMKETAEAYLGKKIKDAVVTVPAYFNDAQRQATKDAGVIAGLNVARIINEPTAAAIAYGLDKKGGEKNILVFDLGGGTFDVSVLTIDNGVFEVLSTNGDTHLGGEDFDQRIMEYFIKLIKKKHNRDISKDKKAIGKLRREAERAKRALSNQHQIRVEIESLFDGVDFSEPLTRARFEELNNDLFRKTMGPVKKAMDDAGLQKTDIHEIVLVGGSTRIPKVQQLLRDYFDGKEPNKGVNPDEAVAYGAAVQGGILSGEGGEETKDILLLDVAPLTLGIETVGGVMTKLIPRNTVIPTKKSQVFTTYQDQQTTVSIQVFEGERSLTKDCHELGKFDLTGIPAAPRGVPQIEVTFEIDANGILNVKAEDKGTGKSEKIVITNDKGRLSQEEIDRMVQEAEEFAEEDKKVKERIDARNSLETYVYNMKNQLGDKLGEKISAEDKETIETAMKEALEWLDENQSAEKEDFQEKLKEVEGICNPIVTKLYQAAGGAPGAGASEDGESDDESHEEL

SEQ ID NO: 11430 - protein, 392 aa, Tristellateia madagascariensis; identical to SEQ ID NO: 7980

SEQ ID NO: 11431 - protein, 470 aa, Bdellovibrio bacteriovorus HD100
MTGKDVLKFANEKGAKMVDLKFCDMLGTWQHLTVPLHQLTAEAFEEGYGFDGSSIRGWKGIEESDMIIMPDPSTAMMDPFMQVPTLSLICDVCLPETLQAYNRDPRQVVKKAIAYMQSTGIADTAYFGPEAEFFIFDDIRYEQTNNSAFYMIDSDEAVWNTGRDEGGKNLGYKIRPKEGYFPALPTDSQQDLRTEICLELERCGMQVERHHHEVASSQGEINFRFDTALNMGDKMMWFKYIVKNVAKRYGKTVTFMPKPIFGDNGSGMHIHMSLWKDGKNLFAGNKYAGLSEMALHYIGGVLKHAPALCGIINPTTNSYKRLVPGFEAPTKLAYSFKNRSAAMRIPNSGPNPKAKRIEFRTPDPSANIYLAEAAILMAGLDGIINKINPGDPLDKDIYGLPPQEAAAIPSVPGTLEESLNHLMKNCSFLKKGDVFTDDLIETWVQYKIDKEVRPVQQRPVPYEFHLYYDC

SEQ ID NO: 11432 - protein, 160 aa, Azotobacter vinelandii
MSAFHDLTLRGLDGQDLPLAQFRDKVVLVVNVASKCGLTPQYAGLEKLHLQYRERGFSVLGLPCNQFAGQEPDNEAQIREFCSLNYGVTFPLAAKLEVNGSGRHSLYRLLAGEGAEFPGDITWNFEKFLVGRDGRVLARFSPRTAPDDPALLQAIEKALG

SEQ ID NO: 11433 - protein, 493 aa, Vibrio vulnificus YJ016
MRNTMNLTNLLAPWLDCPELADITVQSLELDSRQVKQGDTFVAIVGHVVDGRQYIEKAIEQGANAVIAQSCQQYPPGLVRYQQNVVIVYLEKLDEKLSQLAGRLYQHPEMSLIGVTGTNGKTTITQLIAQWLELAGQKAAVMGTTGNGFLNALQPAANTTGNAVEIQKTLADLQQQGAKATALEVSSHGLVQGRVKALQFAAGVFTNLSRDHLDYHGTMEAYAKAKMTLFTEHQCQHAIINLDDEVGAQWFQELQQGVGVSLFPQDASVKALWASSVAYAESGITIEFDGCFGQGRLHAPLIGEFNATNLLLALATLLALGVDKQALLDSAASLRPVLGRMELFQVNSKAKVVVDYAHTPDALEKALQALRVHCTGHLWAIFGCGGDRDKGKRPMMAEIAERLADHVVLTDDNPRSEDPAMIVQDMLAGLTRGDSAVVEHDRFSALQYALDNAQADDIILLAGKGHEDYQVLKHQTVHYSDRESAQQLLGISS

SEQ ID NO: 11434 - protein, 619 aa, Methanosarcina mazei Go1
MAKILGIDLGTTNSCVAVMEGGEAVVIPNAEGSRTTPSVVGFSKKGEKLVGQVAKRQAISNPDNTVYSIKRHMGEANYKVTLNGKDYTPQEISAMILQKLKADAEAYLGETIKQAVITVPAYFNDSQRQATKDAGAIAGLEVLRIINEPTAASLAYGLDKGDIDQKILVYDLGGGTFDVSILELGGGVFEVKSTSGDTHLGGDDFDQRVIDYLLAEFKKSEGIDLSKDKAVLQRLKDAAEKAKIELSGVANTNINLPFLTVGTDGEPKHMDIDLTRAQFQKMTEDLLEKTLVSMRRALSDAKLTPNDLDKVILVGGATRMPAVVELVENFTGKKPYKNINPDEAVAIGAAIQAGVLGGEVKDVLLLDVTPLTLGIETLGGIATPLIQRNTTIPTKKSQIFSTAADNQPSVEIHVLQGERGIASENKTLGRFILDGIPPAPRGIPQIEVTFDIDANGILHVSAKDLGTGKQQSISIQKPGGLSDDEIERMVKDAEMHAEEDRKRKEEVEIRNNAEALINAAEKTIKEAGDLATEDQKSKVNAAIEDLKKALEGKDAEDIKAKTEALQESVYPISTAMYQKAQQAQQAAGGEGGAAGTDARGPDETVVDADYEVVDDEKRK

SEQ ID NO: 11435 - protein, 392 aa, Tristellateia madagascariensis; identical to SEQ ID NO: 7984

SEQ ID NO: 11436 - protein, 430 aa, Glycine max
  misc_feature (107)..(107): Xaa can be any naturally occurring amino acid
VSGNHKGSYLTMLSSGGLVFGIINIVGNFGTVFVDNGYWVSAIAARPSSTHKGYLLGGLVWFAVPFSLATSLGLGALALDLPINENEAGRGLVPPATAVALMGKGGXILLLTMLFMAVTSAGSSELIAVSSLCTYDIYRTYINPNASGKQILKVSRGVVLGFGCFMGLLAVILNKAEVSLGWMYLAMGVLIGSAVLPIAFMLLWRKANAIGAILGTVLGCVLGIITWLSVTKIQYGRVNLNTTGRNAPMLAGNLVSILTGGVAHAVCSMLRPQNYDWSTTKQITVVEKEKSNLPAEEFKEEKLIRAKSWVVKWGVGFTLLIVILWPILSLPAGEFSKGYFYFWAVIAIGWGTVGSAVIIVLPLIESWETIQTVIMGMFTNDRLMEKVEELNFKLQTIMQAMPEAERLYLLEKGKAKKLDSSEQQASSLPA

SEQ ID NO: 11437 - protein, 668 aa, Ostreococcus tauri
MSFAACAFLDARGVIASTARVVRRETKRGHDATRPKSSKSNLDVTRNKTDAAAPLDVYDRRARAHVIGLCACIALVNPQGANAITENQMLWLEAWRAVDKAYVDKTFNGTNWFKLRESGIKQLDLSDTDSTYEAIRGMLQKLDDPFTQFLEPEKYASVTDRTMKADVSGVGVEMGFTDDKRIIVVAPVPGGPSAEAGVRAKDLIVEVDGSATKGKSLYEVADELSGPQGSKVTLTVDRDGKKEQIVVQRRRYTVIPVTSEKCDVDGGKKIGYVKLSTFNQVSGKETKKALEQLKSENVDAYVLDLRDNVGGLFPGALEIAKALINEGTIVYIADSTGERDVFEADRTALDAKTPLKVLVNRGTASASEVLSGALKDNKRAVIMGEQTFGKGLIQTLVPLSDGSAVSVTVAQYRTPLGTDINKIGITPDRPLPLDANGTDAVPSNAQDFCAYARSAPASASASAESAPRVALASRSATRYASTFTANADDVNDVVKLYRGPHIKLFRALVRTKIAQLGAAVGLATPLFLSASDASGTLAFAGIACGVGSGACSAALQYYARRYVGELALVDRGKKLRVSTMDFWGARVDERFGVERVKPPLSNLSRGELEEIANRTFIPLDIIGERQYVVSLRHGDLLDAKKLFAVLGSDADARTSHATSPRTGRDASE

SEQ ID NO: 11438 - protein, 290 aa, Oryza sativa Indica Group
MKSRKSYGLLLSPVGSPPSDNESGAAAAAAAAGGGGCGSSAGYVVYGGGGGGDSPAKEQDRFLPIANVSRIMKRSLPANAKISKEAKETVQECVSEFISFVTGEASDKCQREKRKTINGDDLLWAMTTLGFEAYVGPLKSYLNRYREAEGEKAAVLGGAGGAAAARHGEGGCCGGGGGADGVVIDGHSPLAGGLSHSHHGHQQQDGGGDVGLMMGGGAAGVGYNAGAGSTTTAFYAPAATAASGNKAYCGGDGSRVMEFEGIGGEEESGGGGGGGGGERGFAGHLHGVQW

SEQ ID NO: 11439 - protein, 392 aa, Tristellateia madagascariensis; identical to SEQ ID NO: 7985

SEQ ID NO: 11440 - protein, 473 aa, Propionibacterium acnes KPA171202
MFEGPDDLLAYVKKEGIEMIDVRFCDLIGIMQHFTVPAREFDKDQYENGLAFDGSSIRGFQKINESDMALLPDPTTAWIDPFRERKTLIVNFNVHDPITKEAYSRDPRNIARKAEAYLASTGIGDTAFFAPEAEFYVFDDIRFDTRQNTSYYSIDSEAGAWNTGRTEDGGNRGYKVKYKGGYFPVAPTDHFGDLRDEIVTIMERLGMKVERAHHEVGTAGQAEINWRFDTLSRSADDVMKFKYIVKNVAWQHGKTATFMPKPIFGDNGSGMHVHSSIWKGGEPLFFDESGYAQLSDMARYYIGGILKHAPSLLAFTNPSANSYHRLVPGFEAPVNLVYSQRNRSACMRIPITGPNPKAKRVEFRCPDPSANPYMAFAALLLAGLDGIQNKIEPPAPVDKDIYELPPEEHAAMDHVPGNLGAVLDNLEADHEFLLAGDVFTPDLIETWVELKRGDLAALQQRPHPYEFDLYYDI

SEQ ID NO: 11441 - protein, 250 aa, Oryza sativa
MEPAFPNGGAAAPPPPMAAEQLPPAAAVVREQDRLMPIANVIRIMRRVLPPHAKISDDAKEVIQECVSEFISFVTGEANDRCHREHRKTVTAEDLVWAMDRLGFDDYVPPLTAYLRRMREYEGGGSGGGGGGDRGAAAAPAVVPPPPPPPPEDAFRYVQVHHPVYAAPGEPVQGYGYPVAMSSALPAPHVHVGVRGGGQHEVFGGGPAPLAVYYGGAPYGEASSRGGCSAADEGSSSSSASPAPVGPNYE

SEQ ID NO: 11442 - protein, 164 aa, Cytophaga hutchinsonii ATCC 33406
MATVDKTQSIYSIKVTTLDGQPFDLSTLKGKKILIVNTASKCGYTPQYEELQQLHALHGDSVAVLGFPCNDFGGQESGSESEIGAFCTKNYGVTFQMFEKVHIKGNEQHPLYKWLTDPALNGWNKDAPTWNFCKYLINEKGELVNFFGSGVKPMSKTVLDAIRK

SEQ ID NO: 11443 - protein, 896 aa, Verrucomicrobium spinosum DSM 4136
MDFPTVWQQLLSREWMWTFGRNAMEGAQLAKQGRVKIRAAELLSEQELEITAFVTDNRLTQFETTVTLQFKDARRLSIMSRCLCPAGAYCKHAAALLVQATDRKLQDEIEERVTAPPPPPPVARASAIAKAKLPIHLLEAGRPEPVLVLRRIDASLPKDAKSSKLLRLPVADPMVTYPGCPERLLLTVRSSQHEWEADGKLQRLERDLDLERSFLRDVMLLGLTPFMEAHPGVVTSAPLNHLAVSQGYELEFWKGFRQEESKHLQQRGWRIESSSDFGYDVVELHEHHWVTGLRPEPGNGLVYSLEMGVEIDGKRVSLIPILAEAVQKGLTVQEVSENPDTPFLFLVPELGDRLISLPGKRLLPILSVLHELFTPGAKKKDKIKVDRLRAAQLGREQGMALQMPTEIAKLGEKLANFTSLPVVTPPSGLQATLRPYQLEGLGWLQFLREYGLHGILADDMGLGKTLQTIAHLLTEVEAGRADQPSLILAPTSVIRNWVAEAKKFAPAMKVLILHGENRKERFPFIKNYHVVVTSYPLLIRDIERLQKFEWHVVVLDEAHGIKNARAKAAQAARALNARHRLCLTGTPMENHLGELWSLFHFLMPGYLGEQDAFKAYFRNPIEKKQDPTAQQRLTARLQPVLLRRTKDAVAKDLPPKTELINAVELDKAQADLYETIRATVDKRVREAIADQGIEKSQLIVLDALLKLRQVCCHPSLLKTESAKKVETSAKTEYLMDEMLPELIEEGRRILIFSQFTSMLDILERMLKERGIRYVKLTGSTEDRMKPVEQFQNGDMPVFLISLKAGGVGITLTAADTVIHYDPWWNPAIEAQATDRAYRIGQKKPVFVHKLICQGTIEERIVEMQRRKSALINGLLTGNTDASRLTQDDVRELLAPL

SEQ ID NO: 11444 - protein, 112 aa, Triticum aestivum
  misc_feature (8)..(8): Xaa can be any naturally occurring amino acid
PDGKIAKXAKETVQECVSEFISFITSEASDKCQREKRKTINGDDLLWAMATLGFEEYIEPLKVYLHKYRETEGDSKLAGKSGDVSVKKDALGPHGGASGTSARGYHNGDISN

SEQ ID NO: 11445 - protein, 635 aa, Haloarcula marismortui ATCC 43049
MASNKILGIDLGTTNSAFAVMEGGDPEIIVNGEGERTTPSVVAFDDGERLVGKPAKNQAVKNPDETIQSIKRHMGEDDYSVELDGEEYTPEQVSAMILQKIKHDAEEYLGDEIEKAVITVPAYFNDRQRQATKDAGEIAGFEVERIVNEPTAAAMAYGLDDESDQTVLVYDLGGGTFDVSILDLGGGVYEVVATNGDNDLGGDDWDHAIIDYLADEFEAEHGIDLRDDRQALQRLTEAAEEAKIELSSRKETRINLPFIATTDDGPLDLEQKITRAKFESLTEDLIERTVGPTEQALADADYTKSDIDEVILVGGSTRMPQVQDQVEEMTGQEPKKNVNPDEAVALGAAIQAGVLSGDVDDIVLLDVTPLSLGVEVKGGLFERLIDKNTTIPTEESKIFTTAQDNQTQVQIRVFQGEREIAEENELLGAFALSGIPPAPAGTPQIEVSFNIDENGIVNVEAEDKGSGNKEDITIEGGAGLSDDQIEEMQQEAEQHAEEDEQRRERIEARNEAEASVRRAETLLDENEEEIDEDLQSDIEAKIEDVEEVLEDEDATKEDYEAVTETLSEELQEIGKQMYQDQAQQAAGGAAGAGPGGAAGPGGAAGPGGAAGGAAEQGEEYVDADFEDVEESDEDE

SEQ ID NO: 11446 - protein, 468 aa, Pseudomonas syringae pv. phaseolicola 1448A
MSKSVQLIKDHDVKWIDLRFTDTKGTQHHVTMPARDALEDDFFEVGKMFDGSSISGWKGIEASDMILLPDDETAVLDPFTEEPTLILVCDIIEPSTMQGYDRDPRAIARRAEEYLKSTGIGDTVFAGPEPEFFIFDEVKFKSDISGSMFKIFSEQGSWMSDQDVEGGNKGHRPGVKGGYFPVPPFDHDHEIRTAMCNALEEMGQTVEVHHHEVATAGQNEIGVKFNTLVKKADEVQTLKYVVHNVADAYGRTATFMPKPLYGDNGSGMHVHMSIAKDGKNTFAGEGYAGLSDLALYFIGGIIKHGKALNGFTNPSTNSYKRLVPGFEAPVMLAYSARNRSASIRIPYVNSPRGRRIEARFPDPSANPYLAFAALLMAGLDGIQNKIHPGDAADKNLYDLPPEEAKEIPQVCGSLKEALEELDKGRAFLTKGGVFSDDFIDAYIALKSEEEIRVRTFVHPLEYELYYSC

SEQ ID NO: 11447 - protein, 535 aa, Ralstonia metallidurans CH34
MRKTLKNISLVSIGVVAGVLATLQISATAQNTTGPLPLDQLRLMADIFGQIKREYVEPVDDKKLLTEAIKGMVASLDPHSAYLDEKDFKELQEGTRGRFAGLGIEISQEEGLVKVINPIEDTPAFRAGIQPGDLITRIDDKPVRGLPLEQAVKRMRGEPGTKVTLTIYRKSEERTFPVSITRAEIRVQSVKTKMLDNNTIGWVRLTSFQERTVTDLGRRLKEMADKNPNLRGIVLDLRNNGGGVLQGAVGVAAAFLPEDSVVVSTNGQVPDAKRVYKASFSNYRLSSLEDDPLKDLPAEFKKLPMVVLTNAYSASASEIVAGALQDHKRATLMGKTTFGKGSVQTVRPLTNDTGIKLTIAYYYTPSGKSIQAKGIRPDIPVDQNPDGDPDDALITREIDTERHLHNKQESEEPEMAEREQRRVEELRRLEEENAKKTPEEREKERKKKPVEFGSADDFMLQQAIAQLDGKPVQRSKSRLEATGTAGKPDSSDNPKPASKAPAKPAAKPAAPAKPSSPPPASAPIGEPLGTPTGKK

SEQ ID NO: 11448 - protein, 1078 aa, Anabaena variabilis ATCC 29413
MAILHGSWILSEQDSYLFIWGETWRSPQVNFSFEEIALNPLALSASELSEWLQSQHQAIAQILPQQLAKKTSKAASSPTTNLPIHSQIIVLPTEISQPRKKETIFISPVHSAALESDADSEVYLQPWRVEGFCLPPSAAVKFLTSLPLNITSTENAFLGGDLRFWSQIARWSLDLISRSKFLPIIQRQPNNSVSAKWQVLLDSAVDGTRLEKFAAKMPLVCRTYQRLGNEELSPSPIYIDFPSQPQELILGFLNSAIDTQLREMVGNQPVVETRLMASLPSAVRQWLQGLSGASNSVDADAVGLERLEAALKAWTMPLQYQLASKNQFRTCFELRSPEPGETEWTLAYFLQAADNPEFLVDAGTIWQHPVEQLIYQQRSIQEPQETFLRGLGLASRLYPVIAPTLDTESPQFCHLNPMQAYEFIKAVAWRFEDSGLGVILPPSLANREGWANRLGLKISAETPKKKPGRLGLQSLLNFQWHLAIGGQTISKGEFDRLVALKSPLVEINGEWVELRPQDIKTAEAFFAARKDQMALSLEDALRLSSGDTQVIEKLPVVSFEASGALQELIGALTNNQAVAPLPTPKNFQGKLRPYQERGAAWLAFLERWGLGACLADDMGLGKTIQFIAFLLHLKEQDVLEKPTLLVCPTSVLGNWEREVKKFAPTLKVLQYHGDKRPKGKAFPEAVKNHDLVITSYSLIHRDIKSLQGLSWQIIVLDEAQNVKNAEAKQSQAVRQLDTTFRIALTGTPVENRLQELWSILDFLNPGYLGNKQFFQRRFAMPIEKYGDAASLNQLRALVQPFILRRLKTDRDIIQDLPDKQEMTVFCGLTGEQAALYQKVVETSLAEIESAEGLQRRGMILALLIKLKQICNHPAQYLKTNTLEQYSSGKLQRLEEMLEEVLAESNTYGVAGAGRALIFTQFAEWGKLLKPHLEKQLGREVFFLYGSTSKKQREEMIDRFQHDPQGPPIMILSLKAGGVGLNLTRANHVFHFDRWWNPAVENQATDRVFRIGQTRNVQVHKFVCNGTLEEKIHDMIESKKQLAEQVVGAGEEWLTELDTDQLRNLLILDRSAVIDEEAE

SEQ ID NO: 11449 - protein, 473 aa, Prochlorococcus marinus str. MIT 9312
MSKSPQDVLSQIKDEGIELIDLKFTDIHGKWQHLTLTSDMIEEDSFTEGLAFDGSSIRGWKAINASDMSMVPDSSTAWIDPFYKHKTLSMICSIQEPRSGEPYDRCPRALAQKALKYLDSTGIADTAFFGPEPEFFLFDDVRYDSKEGGCFYSVDTIEAPWNTGRIEEGGNLGYKIQYKEGYFPVAPNDTAQDIRSEMLLLMGELGIPTEKHHHEVAGAGQHELGMKFDSLIKAADNVMTYKYVVRNVAKKYGKTATFMPKPVFNDNGTGMHVHQSLWKSGQPLFFGESAYANLSQTARWYIGGILKHAPSFLAFTNPTTNSYKRLVPGFEAPVNLVYSEGNRSAAVRIPLTGPSPKAKRLEFRSGDALANPYLAFSVMMLAGIDGIKNQIDPGDGVDVDLFELPAEELAKIDTVPSSLNDSLNALKADKDYLLAGGVFTEDFIDNFIDIKYEEVQQLRQRPHPHEFFMYYDA

SEQ ID NO: 11450 - protein, 605 aa, Bacillus megaterium
MSKIIGIDLGTTNSCVAVLEGGEPKVIPNPEGNRTTPSVVAFKNGERQVGEVAKRQAITNPNTIISVKRHMGTDHKVEAEGKQYTPQEMSAIILQHLKGYAEEYLGEPVTKAVITVPAYFNDAERQATKDAGKIAGLEVERIINEPTAAALAYGLEKTDEDQTVLVYDLGGGTFDVSILELGDGVFEVRATAGDNRLGGDDFDQVIIDYLVAEFKKENGVDLSKDKMALQRLKDAAEKAKKDLSGVTSTQISLPFITAGEAGPLHLEVSLSRAKFDELSAGLVERTMAPVRQALKDAGLSASELDKVILVGGSTRIPAVQDAIKKETGQDPHKGVNPDEVVALGAAIQGGVLTGDVKDVVLLDVTPLSLGIETMGGVFTKLIERNTTIPTSKSQVFSTAADSQTAVDIHVLQGERPMSADNKTLGRFQLTDIPPAPRGVPQIEVSFDIDKNGIVNVRAKDLGTNKEQAITIKSSTGLSDDEIDRMVKEAEENADADKQRKEEVELRNEADQLVFTTEKTLKDLEGKVEEAEVTKANEAKDALKAAIEKNDLEEIKAKKDELQEIVQALTVKLYEQAQQAQQAGEQGAQNDDVVDAEFEEVNDDKK

SEQ ID NO: 11451 - protein, 643 aa, Neptuniibacter caesariensis
MGKIIGIDLGTTNSCVSILDGDSAKVIENAEGDRTTPSIIAYADEGEILVGQPAKRQAVTNPDNTLFAIKRLIGRRFKDDVVQKDIKMVPYKIIEADNGDAWVEVKGDKLAAPQISAEILKKMKKTAEDYLGEEISEAVVTVPAYFNDAQRQATKDAGKIAGLEVKRIINEPTAAALAYGMDKSKGDKTIAVYDLGGGTFDISIIEIAEVDGEHQFEVLSTNGDTFLGGEDFDLRLIEFLADEFKKDTGIDLHNDPLALQRLKEGAEKAKVELSSAQQTDVNLPYITADATGPKHLNVKITRAKLESLVEELVQRSLEPCKIALQDSDLSASEIDEVILVGGQTRMPMVQEKVAEFFGKEARKDVNPDEAVAMGAAIQGAVLAGDVKDVLLLDVTPLTLGIETMGGVATPVIEKNTTIPTKKSQIFSTADDNQSAVTIHVVQGERKQAAQNKSLGRFDLAEIPPAPRGVPQIEVTFDLDANGILNVSAQDKATGKQQSIVIKASSGLSDDEIEQMVNDAEAHAEEDKKFEELTAARNQGDAMVHSAKKTMEEAGDKATDEEKAAVEAATAELEEVLKGDDKDAIEAKTTALTEAISGVAQKMYAEAAQQAEAEQAAGGAEQQQAGGNDDAVDAEFEEVKDDKK

SEQ ID NO: 11452 - protein, 181 aa, Paenibacillus polymyxa
MSIYDYSAIAMNGKEIVLSDYKDKVVLIVNTASQCGFTFQYQDLQRLYDQFKDRGLVILGFPCNQFADQEPDSNESVQTFCTLNYGVAFPMFQKVNVRDEQAHPLFTYLASSLPFEGFDETHSVAKILIPLIHERHPEYLPGDSIKWNFTKFLIDRNGKVIKRFEATTDPLDMEEYIEALL

SEQ ID NO: 11453 - protein, 126 aa, Fragaria x ananassa
VEKIDICEIDKMVVDVSKQFFPRVAVGYEDPRVTLHIGDGVAFLKAVPAGTYDAVIVDSSDPIGPAQELFEKPFFQSVANALLPGGVVCTQAESIWLHMHIIEDIVSNCHQIFKGSVDYAWTTVPT

SEQ ID NO: 11454 - protein, 658 aa, Podospora anserina
MALTTAYSGAPAGRMPFDNAFGFTFSQPFQHESDFTPANHRVPKLMLAYMRINLLCDSLSQPVARLTCFSLWYLGRALTYSQIRADSLALASGLLSLPNLDPTEIKKLPPTPSCPQGPEIAPVVLIQLPNCLPFAPILLGTFASGFTATLVSPALTADEVAWILQNAKPRVIITATACLEAMKAAIGKQEGDQSFWNGVPVFTVDAVNDTYPLAFSGQSNPQDWRQLLQAKGKPSVQPNQRLNEQQAKARTAVILWSSGTSGRSKGVLLSHHALNFATASLWHDADYYPPSGPQRWLGFAPFYHVFGLCNVFLLGIAAGARVFIMQGFKLPDMLEGIKKRQITYVHMSPPVAVMLAKAEVVEEYAKRDPKTGKNGFSSVVGAVTGGAPLGHEVVVQVYKRCGFRIRLGYGLSETCSTALQRGLGEREMGEQAGDTGLPHWGVEVMIANGEGYATKEGEKTPAAGVDVEGEVLVKAPGLMSAYLPVGLFSGAKPDMSVTNEALTADGWFRTGDVGALCKAGRLRITDRLKELIKVRAYQVAPAELEAVLCSSESVGDAGVVGVYDDDEATEWPRAFVVPAGGKENKSRADLEKLAVELKELVEKRTAKYKWLVGGIVFIDQVPKSPSGKILRRLLKSGAEGTKGVEIKLYEKKKRSAKL

SEQ ID NO: 11455 - protein, 391 aa, Androstachys johnsonii; identical to SEQ ID NO: 8011

SEQ ID NO: 11456 - protein, 671 aa, Bacillus pumilus SAFR-032
MEIFLAVLVLLALIASSNIINRFVPFIPVPLIQVGLGILVAAFPSGLHISLNPELFFVLFIAPLLFNDGKRTPRDELWKLRAPILLLALGLVFATVIVAGYTIHWMIPSIPLPAAFALAAILSPTDVVAVSALSSRVNMPKGIMRLLEGEGLMNDASGLVAFKFAIAATVTGAFSIAEASFSFVLIAAGGLLTGFILSFFIIRFRYFLRRLGMDDVTMHIILQILTPFVIYLAAEEIGVSGILAVVAGGVTHAIEQDRMEANLAKLQIASSNTWNIILFILNGLVFVILGLQIPDVSTVIFQDEAFNNMQVITYILIITLCLMILRFLWVWLFWAGKWSATKKQNVKKPKLRASMLMTFSGVRGAVTLAGAFSIPFTLADGSPFPERHLIIFLAAGVILCTLILASVLLPLLSEKKDKQIAVDLDTKIQHAKRKLLRSAIKTLREGMNEDNREVSLALINDYRMKLRNIQREPYQFGMRRQEKKIRLHGIKAEQMKLQQLIEEEKIDQQEAYELQERFHELEMLYSNSFKIRFSKVKFLRLLQWLQLWRPNQLVSSGILENEDSYKQIRKKTAEAAVDSIKQHMNDENKQTCHQVIGFYNQVIYRCEHGPSFFQQKDRSFDRKKKELNFQAVQTIRNEIQTLYENGEINRDIAHHLREYINDMEAVLLTNT

SEQ ID NO: 11457 - protein, 392 aa, Blepharandra heteropetala; identical to SEQ ID NO: 8012

SEQ ID NO: 11458 - protein, 254 aa, Oryza sativa Indica Group
MEAATRARRRNGAAADGNGGAQQAAAAPAIREQDRLMPIANVIRIMRRVLPAHAKISDDAKETIQECVSEYISFITGEANERCQREQRKTITAEDVLWAMSRLGFDDYVEPLGVYLHRYREFEGESRGVGVGVGAARGDHHHGHVGGMLKSRAQGSMVTHHDMQMHAAMYGGGAVPPPPHPPPHHHAFHQLMPPHHGQYAPPYDMYGGEHGMAAYYGGMYAPGSGGDGSGSSGSGGAGTPQTVNFEHQHPFGYK

SEQ ID NO: 11459 - protein, 638 aa, Buchnera aphidicola str. Bp (Baizongia pistaciae)
MSKIIGIDLGTTNSCIAIMDGNKARVLENSEGDRTTPSIIAYTNDNEILIGKPAKRQSITNPKNTLFAIKRLIGRKFTDNEVQRDIKIMPYKIIQSENGDAWINIKNKKLAPPQISAEILKKMKKTAEDYLGESIQEAVITVPAYFNDAQRQATKDAGRIAGLKVKRIINEPTAAALAYGLDKGKGNKTIAVYDLGGGTFDISIIEIDDVDKEKTFEVLATNGDTHLGGEDFDNRLINYLVEDFKKDQGTDLRNDSLAMQRLKESAEKAKIELSSTQQTDVNLPYITADSTGPKHLNIKVTRSKLESLVEDLITRSIEPLKIALKDAKLSISDIDDVILVGGQTRMPMVQKKVAEFFKKEPRKDVNPDEAVAVGAAVQGGVLSGEVKDVLLLDVTPLSLGIETMGGVMTTLISKNTTIPTKHSQIFSTAEDNQTAVTIHVLQGERKRSIDNKSLGQFNLDGIQPAPRGMAQIEVTFDIDSDGILHVSAKDKNTGKEQKITIKASSGLNETEIKKMILDAEQNSESDQKFEELVKVRNQGDQISHSTKKQLKDLEKTINVNDQKEINEALNKLDTALKGENKTKIEEKIQEVLKISTKLIEKNKPKQTSESSNSNSPSSSKPEENVVDAEFEEVKDQKK

SEQ ID NO: 11460 - protein, 274 aa, Colwellia psychrerythraea 34H
MCPAKTTDGQQRGFVIPIGGAEERVNDPIILKRFVELCGGENAYIVIIPTASQLDDTGSNYETVFHELGVKKAVSLPINDREQANSEDYLAELNNATGIFITGGNQLRLSTILGGTPVAQSIRKLNAAGVHVAGTSAGAAIMPGHMIAGGRTGALPNEEGVTFAPGMGLINKVIIDQHFSQRNRLGRLLSAISYNPFASGLGICENTAAFIDPSGTLEVVGHGSITVVDPSDLTHSSMADANRGEAITLIGLKLHVLSPGATYCINERIAKPAT

SEQ ID NO: 11461 - protein, 392 aa, Lophanthera lactescens; identical to SEQ ID NO: 8016

SEQ ID NO: 11462 - protein, 1047 aa, Cyanothece sp. PCC 8801
MSILHGSWINEIDQSYLFIWGETWRSVEPQLSNDDSVSLHPFSLNQAELINFLQSKELALKINPEQQSKREIIYLPSINKVIKSEQRSLPILSSQVTDKDQLIKNDAYELSPWQVEGLSLNARQTINLLNQLPLGFSEKNTQYLGEDLRFWTHVYRWSLDLLARKKFLPGVIHLDNDTAQSQWFPILDSTLDQTRFSQFNQWIPRVCLSYNITDKPLVSQPLILDFLRNIINVNIPLITSSIPLPNKNLLVQRWLRSLKEKEKNFGANERDIKRLENALHNWVLSIEEYLVTPTNKNLGINQFRVCFQLQPPSSSQVNSGDVNWKLNYYLQALDDSSFLVDAQTIWRSPFEKLSWQGRTIEHPQETLLKGLGLASRLYYAIAENLQESQPHYCELNPIQVYEFIRSTALILEDNGLGVILPSSLTKGEEEKRLGISIEAQVTPKKDERLSLKSLLNYQLKIAIGDQSISQQEFEKLLAQKSPLVEINGEWIALQPADVRAAQSIFNQSYEPIKLSVEDALRLSTGETQVIAKLPIVKFEASGTLQELINNLTNNQSIQIIDNPPGFKGQLRPYQQRGVGWLAFLEKWGLGACLADDMGLGKTPQLIAFLLHLKAENLLNKPTLVVCPTSVLNNWEREVKKFAPTLSTWIHHGDKRKKGKNFAQEVKTKNLVITSYSLLYRDAKILEEIEWQGVVLDEAQNIKNPQAKQSQAVRKLKTEFRIALTGTPVENRLAELWSILDFLNPTFLGTQQFFQRRFATPIEKYGDRESLQILRSLVRPFILRRLKTDQDIIQDLPEKQEMNVFCGLSSEQAELYQKLVDSSLEELEDKTGIQRQGLILSLLVKLKQICNHPAQFLKEKQLNFPHRSGKLMRLEEMLEELIEEGDRALIFTQFSEWGKLLQPYLMAKFSQEVLFLHGGTRREQRQVMIDRFQNAPDGPQLFILSLKAGGTGLNLTRANHVFHIDRWWNPAVENQATDRAFRIGQKRNVQVHKFVCTGTLEDKINEMLETKKQLAEQTVDAGENWLTQLDTDQLRTLLLLDRDAIIDE

SEQ ID NO: 11463 - protein, 162 aa, Ureaplasma parvum serovar 3 str. ATCC 700970
MERLNMKLSDYPVLDIDKKLFNWSKVKNKLVLIVNVASKCGYAKQYEQLEYLYKKYKNKGFIIVAFPCRQFMFQEFDDNNKIKEFCSTKYNVTFPIMDLTNVVGSNISPLYKQLITEYPWSPKAKAVKWNFEKFFVKNDEIIGRFESKCEPNDLEEFIKNNL

SEQ ID NO: 11464 - protein, 380 aa, Diacidia ferruginea; identical to SEQ ID NO: 8019

SEQ ID NO: 11465 - protein, 474 aa, Nocardioides sp. JS614
MFQNSDELLKYVKDEGVEMIDVRFCDLPGIMQHFTVPVSSFDQSVFDDGLGFDGSSIRGFQAIHESDMSLFPDPTTAYLDPFRTAKTLVVNFFIHDPLTGEAYSRDPRNIARKAMAYLGTTGIGDKAYFAPEAEFYVFDNVRFETKANAGYYEIDSSAGAWNTGAAFENDNRGYKVKYKGGYFPVAPTDHFGELRDEMVIELERAGLQVERAHHEVGTAGQAEINYRFDELLKAADDVMKFKYIIKNVAWRNGKTATFMPKPIFGDNGSGMHCHQSIWNAGEPLFYDETGYGGLSDTARWYIGGLLKHAPSLLAFTNPTVNSYHRLVPGFEAPVSLVYSQRNRSACVRIPITGSNPKAKRIEFRCPDPSANPYLAFSALLLAGLDGIKNKIEPAAPIDKDIYELPPDEMADIEQVPASLDAVLNNLETDHEFLTAGNVFTSDLIETWIDYKRQNEILPVQQRPHPHEFELYYDI

SEQ ID NO: 11466 - protein, 392 aa, Byrsonima crassifolia; identical to SEQ ID NO: 8024

SEQ ID NO: 11467 - protein, 206 aa, Zea mays
  misc_feature (78)..(78): Xaa can be any naturally occurring amino acid
MEAGGAGSGLNGAVQAKGTGADDGSAKRLPPCCVKARAAAPESEARCHATVVSGWFTEPRSRCGKASKVQYYNNPMWXGEANSLKVEKILYQGKSLYQEVLVFESSTYGKVLVLDGIVQLTDKDECAYQEMITHLPLCSIPSPKKVLVIGGGDGGVLREVSRHSSVESIDICEIDQLVIDVCKDFFPHLSVGFQDPRVQLHVGDGM

SEQ ID NO: 11468 - protein, 456 aa, Streptococcus thermophilus LMG 18311
MVFIKETPIMAITAADIRREVKEKNVTFLRLMFSDILGIMKNVEIPATDEQLDKVLSNKVMFDGSSIEGFVRINESDMYLYPDLDTWTVFPWGDENGSVAGLICDIYTSAGEPFAGDPRGNLKKALRHMEEVGYKSFNLGPEPEFFLLKLDEQGNPTLEVNDKGGYFDLAPTDLADNTRREIVNVLTEMGFEVEASHHEVGVGQHEIDFKYTEVLKACDNIQIFKLVVKTIARKHGLYATFMAKPKYGIAGSGMHCNMSLFTEEGNAFFDPEDPHGMQLSQDAYYFLGGLMKHAYNYTAIINPTVNSYKRLVPGYEAPVYIAWAGSNRSPLIRVPASRGMGTRLELRSVDPMANPYLAMAVLLEAGLDGIINKIEAPAPIETNIYSMSPEERKEAGIIDLPSTLRNALKALETDEVVRQALGNHIYTNFLDAKRLEWASYATFVSQWEIDNYLDLY

SEQ ID NO: 11469 - protein, 439 aa, Thermotoga maritima
MTIETIKRIIEEENVRFIRLQFTDINGTLKNLEITPDVFLESWEDGIMFDGSSIEGFVRIEESDMYLKPVLDTFAVLPWTVDGAKSARVICDVYTPDGKPFEGDPRYRLRRMMEKAEQLGYTPYAGPEMEFFILPINEKGEPVPEFLDHGGYFDLLPLSKVEEIRRDIAIALEKMGITVEATHHEVAPSQHEVDFRYDTFLRTGDNAQTVKLVIKTMAIFHGYHATFMPKPFYGVNGSGMHVHMSLFRGDKNAFYDPDDPLGLSKELRYFVGGILKHAKRLAAVTNPTINSYKRLVPGYEAPVYISWSVGNRSALIRIPKARGKATRLEYRSPDPTCNIYLAFAAILAAGLDGIINKIEPPAPVEENIYHMTSERREELNIESLPGSLKEAVEELKKDDVIIDALGEHIFEKFVEAAEKDWKEFSTYVTNWELQRYLYL

SEQ ID NO: 11470 - protein, 988 aa, Ralstonia eutropha JMP134
MQSDTLPGTDAAPDSSLPAWQQALEALQGLAAGTEGVGIATDRRLLWALTLDADGAVGAIEPLEQVRGARGWGKPRPVPLARVAEDGQLPAWDTRVAHAIRRDQSHNRRYVLDRAAAIAALVGHPAVVLARSPEQVLEVTEGTPALEAVHTDGRYLLRIYPPLREAPAMEAYLPAAARQDAEALRHITVLRDGPQRLRVIRFTPAQLGAAQLVADGLSIPEAGRAQLDRTLRALAGHFQVEADPTGAVRELEPEARLRAEVAPHGRGIALRLVVTPLGPLGPRLAPGAGRERLMATVRGETLATQRDLDAELANVAEVFAELPFLVPLAPPDGEHSWVLDDPEDALAVVEALPRLAGVQALEWPRGKEMRVVAADLPQLSVTVETRNTWYRLVGELRVAEGLVLELGKLIDWTGSHAGRFVPMGQGVYIALTRTLRGRLRDLASVADQVPDGIRVPLMATPWLDDVLAGAGVDPDAHFRQRLARLRTARETDITLPPNLAAELRPYQYDGYRWAMTLASAGLGACLADDMGLGKTLQALAVLLARAGGGAGLVIAPTSVCGNWAAEARRFAPTLNVHVYAEGEREALLTQVGAGDLVIVSYTLLQQARQAFCAREWHTVVADEAQAIKNAASRRAQALFDLPSGFRMVLSGTPIENRLAELWSVMRFCNPGLLGSLARFNEHFANPIERSGAREVRQRLRRMIAPFVLRRTKAQVLDELPPRTELVIRVEPAPVEAAHYEALRRQAQSQAEAALARVEAARKATRGAPEGARARAVAQAQFQAEARIHVLAQLMRLRRAACDARLVTPEVGQAGAKVRTFVDLAGELAANGHKVLVFSQFVDFLQLLRQGIEQAGLALQYLDGATPAAERTRRVAAFQAGEGDVFLISLKAGGFGLNLTAADYVIIADPWWNPAAEDQAMGRAHRIGQQRPVTVYRLITAGTIEERIVELHKDKRALADGLLDADDEAASGIGAPLPDVDELVGLLRR

SEQ ID NO: 11471 - protein, 671 aa, Candida albicans SC5314
MSESSVHLLNQAAGYGVLIGVGALFAGGMILTTFLLQKYLHENANSTETFSVANRSVGTFLSASAVYSSWSWSTEFLFVSSMTYNYGVQAGYYYGAGLAIQIAVMSVIGIHAKKRIPTAHTSLEAVQLRYGKAAHLLYLVLSLICNICSCSAMILACASGISIIAGNLHIVASTMLIPFGVLLYTVVGGLKATFLTDFVHTTVLLVVLCYINTAVLTSDQVGGIDGLYDKIIEVSKTKFIEGNYDGSILTGKSKGSVIFGLVLTAGNFGLTVMDSSFWQKTFSASPRATVPAYLLTAFLIFSNVWPISAIIGGSSHFLESDPSFPTYPRKMTQYEIDSGFVLPYVLKAILGNGGVGALLLILYLAVTSTVSAQMVSVSSIVSFDIYKKYIHPNAQNKSMINVSHITCVVFGLGIAGFSIMLHYVGVNMTWFGYFIPMAICPGVIPLIFTVTRDRQTFWAAFISPIVGFAAGLAVWISTAYHFYGSVTIESTGGQLPALYGSLTALLLPGTLSIIISFIKPEKFDWEKLKQVNLLVDGDSSSEVEIDNDTPTIPKEKQDGVEVNFESDETSSLEQQQQSQAASQLTVKEMDFWIKISTGSVIFILLVTWVIWPMSVYRDWVFTASYFKGYVTVALIWLYTTLIVIGLVPFYTGRHSAAKVFRGVYNDYIKRK

SEQ ID NO: 11472 - protein, 344 aa, Oryza sativa
MVGAVQEGIVREMNGGFEVMSGYDRSSMAPKQQQREEESKWYEEEIDDDLKLCYALNSVLHRGASKYQEIALIDTKHFGKALIIDGKMQSTEVDEFIYHESLIHPPLLFHPNPKTVFIMGGGEGSAAREVLRHNTVHRVVMCDIDQEVVDFCRTYLTVNWDAFASDKLCLIINDARAELEKSREKFDVIVGDLADPVEGGPCYQLYTKSFYQHFVKPKLNDRGVFVTQAGPAGVLTHKEVFSSIYNTLRHVFKYVKAYTAHVPSFADTWGWVMASDYPFSMNAQQINERIKERIDGELVYLSGESLISSTILNKSVYQSLLNETHVYTEDDARFIYGHGRARCA

SEQ ID NO: 11473 - protein, 412 aa, Microcystis aeruginosa PCC 7806
MRKKSLWVGLLVGFWFCLTWMAWTPTAAAFSEEQKLLLQSWRLVNQSYYDDTFNHQNWWQVREQFIKKPLNDRTAAYNAIEQMLATLDEPFTRLLRPDQYHNLQISTTGELSGVGLQININPDNGYLEVVAPLAGSPAEAAGLTSHDRILFIDGIDTTTLTLDAAAAKMRGTAGTEVSLVILPYQKSQPKTLSLTRQRISLSPVVAVLDKNSSSLPIGYVRLNQFSANAAKEVSEAVTNLQKQGAKGYILDLRNNPGGLLQAGIEIARMWINQGTIVYTVNREGIADSFAAAGNALTDSPLVVLVNQGTASASEILAGALQDNQRGVLVGEKTFGKGLIQSLFELPDGAGLAITVAKYETPAHHDIHKLGIMPDQVVAQEPITYEEIGTEKDSQYQTAIQFLNQNTVLAKAS

SEQ ID NO: 11474 - protein, 442 aa, Brucella melitensis 16M
MIRKLSLLFAGALLGASAMVMVQGAPASTAFAAGKDSDVYKELALFGDIFERVRAQYVTPPDDKKLIESAINGMLTSLDPHSSYLNPEAAQDMRVQTKGEFGGLGIEVTMDNDLVKVIAPIDDTPASKAGVLSGDLITKIDGQEVRGLSLTDAVDKMRGEVGAPIELTILRKGADKPITLKINRAIIKVKAVRSRVENDVGYLRIISFTEQTSEDLKKAIKDIQEKVPADKLKGYVLDLRLNPGGLLDQAVAVSDAFLDKGEIVSTRGRDPQDVTRFDVRKGDLTNGKPLIVLINGGSASASEIVAGALQDHRRATVLGTQSFGKGSVQTIIPLGENGSLRLTTALYYTPSGKSIQGKGITPDIKVDQPLPPELKGEDVVRGESELKGHIKGNAEDASGSGSSAYVPPDPKDDLQLNEALKLLRGEVANAAFPPDPKKGVLN

SEQ ID NO: 11475 - protein, 510 aa, Mycobacterium tuberculosis CDC1551
MIELTVAQIAEIVGGAVADISPQDAAHRRVTGTVEFDSRAIGPGGLFLRLPGARADGHDHAASAVAAGAAVVLAARPVGVPAIVVPPVAAPNVLAGVLEHDNDGSGAAVLAALAKLATAVAAQLVAGGLTIIGITGSSGKTSTKDLMAAVLAPLGEVVAPPGSFNNELGHPWTVLRATRRTDYLILEMAARHHGNIAALAEIAPPSIGVVLNVGTAHLGEFGSREVIAQTKAELPQAVPHSGAVVLNADDPAVAAMAKLTAARVVRVSRDNTGDVWAGPVSLDELARPRFTLHAHDAQAEVRLGVCGDHQVTNALCAAAVALECGASVEQVAAALTAAPPVSRHRMQVTTRGDGVTVIDDAYNANPDSMRAGLQALAWIAHQPEATRRSWAVLGEMAELGEDAIAEHDRIGRLAVRLDVSRLVVVGTGRSISAMHHGAVLEEAWGSGEATADHGADRTAVNVADGDAALALLRAELRPGDVVLVKASNAAGLGAVADALVADDTCGSVRP

SEQ ID NO: 11476 - protein, 148 aa, Pisum sativum
MGFTDKQEALVNSSSEFKQNLPGYSILFYTIVLEKAPAAKGLFSFLKDTAGVEDSPKLQAHAEQVFGLVRDSAAQLRTKGEVVLGNATLGAIHVQKGVTNPHFVVVKEALLQTIKKASGNNWSEELNTAWEVAYDGLATAIKKAMKTA

SEQ ID NO: 11477 - protein, 144 aa, Vicia faba
MGFTEKQEALVNSSSQLFKQNPSNYSVLFYTIILQKAPTAKAMFSFLKDSAGVVDSPKLGAHAEKVFGMVRDSAVQLRATGEVVLDGKDGSIHIQKGVLDPHFVVVKEALLKTIKEASGDKWSEELSAAWEVAYDGLATAIKAA

SEQ ID NO: 11478 - protein, 1256 aa, Olimarabidopsis pumila
MKRKNYFEFNHPFNPCPFEVFCLGTWKAVEYLRIENGTMTMRLLENGQVLDDIRPFQRLRLRSRKATLIDCTSFLRPSLDVCVLYQKDEEITEPVWVDARILSIERKPHDESECLCKFHVSVYIDQGCIGSEKHRMNKATVVVGLNQISILQKFCKEQSLDNYYRWRYSENCTSLVKTRLNLGKFLPDLTWLLVTSVLKNIVFQIRTVHEKIVYQIVTDEGCEGSLSAMNIMVEDGVFMSKVVLFNPAEDTYQDTDVKEEIEEEVIMELRRSKRRSAQPDRFAYSESQPDSKDGWVRMMPYRYNTLTVLSDDDEDEEDCDDDGDTDDDLYLPLSHLLGKKGTKKGLSKDKQREIVLVDKTERKKRKKTEEFGRNRELSVIPFTPVFEPIPLEQFGLNASSFGGGSSGSQLMDEIDKYRSKAAKYGKKKKFEMEEMEADLCWNGPLGNVVQKRNGPHSRIRSGSGKTGVSEEPQIYKKRTLSAGAYNKLIDSYMSRIDSTIAAKEKATDAVEQWEGLKNGASSSMKAEERLSEEEDDDEEETSEIEMLWREMELCLASSYILDDNEVRVDNEAFHKATGYDCEHDYELNEEIGMCCRSCGHVGTEIKNVSAPFAQHKKWTTETKHVNEDDINTTKVNQEGVESHSFTKPVASSDMPSAEESDNVWSLIPQLKIKLHLHQKKAFEFLWRNLAGSMVPAMMDASSEKIGGCVISHTPGAGKTFLIIAFLASYLKIFPGKRPLVLAPKTTLYTWYKEFIKWEIPVPVHLLHGRRTYCVAKENTIQFKGIPKPSQDVMHVLDCLDKIQKWHAQPSVLVMGYTSFLTLMREDSKFAHRKYMAKVLKESPGLLVLDEGHNPRSTKSRLRKALMKVDTDLRILLSGTLFQNNFCEYFNTLCLARPKFVHEVLMELDQKFETNQAAQKAPHLLENRARKFFLDIIAKKIDTKVGDERLQGLNMLRNMTSGFIDNYEGSGSGSGDVLPGLQIYTLLMNSTDIQHKSLTKLQNIMSTYHGYPLELELLITLAAIHPWLVKTTTCCTKFFNPQELFEIEKLKHDAKKGSKVMFVLNLVFRVVKREKILIFCHNIAPIRLFLELFENVFRWKRGRELLTLTGDLELFERGRVIDKFEEPGGQSRVLLASITACAEGISLTAASRVIMLDSEWNPSKTKQAIARAFRPGQQKVVYVYQLLSRGTLEEDKYRRTTWKEWVSSMIFSEEFVEDPSQWQAEKIEDDVLREIVEEDKVKSFHMIMKNEKASTGG

SEQ ID NO: 11479 - protein, 230 aa, Oryza sativa Indica Group
MASTTAAAARFTCLAPATRPASASAGRFLLPAQHWGAATAHGSSAAVPVPVVAAAPSRRWAPGVTYATAATGKSVHDFTVKDIDGKDVALSKFKGRALLIVNVASQCGLTTANYTELSHLYEKYKTQGFEILAFPCNQFGAQEPGSNPQIKQFACTRFKAEFPIFDKVDVNGPNTAPIYKFLKSSAGGFLGDLVKWNFEKFLVDKTGKVVERYPPTTSPFQIEVLMVKQP

SEQ ID NO: 11480 - protein, 159 aa, Oceanobacter sp. RED65
MSVYDFKATDITGQERELSEFKGKPLLIVNTASKCGLTPQFDGLEALYKQYKDQGFAILGFPCNQFAEQDKGSDSEIAGFCMKNYGVSFPMFSKIEVNGDNAHPLYRYLKDQAPGFLGSKKIKWNFTKFLINKEGKVVKRFAPTTKPAAIEKHVKALVE

SEQ ID NO: 11481 - protein, 352 aa, Thalassiosira pseudonana CCMP1335
CPSYKRITGTDFICDGFFYAKRSLSENYFLTHFHSDHYGGITKNWSEGTIYCSLPTANLVNDQLGVDRRYLHPLPMNTPTIIASKGTPITVTLLDANHCPGAIMFLFEVGNKKILHVGDFRWNSELMLRMPQLRAFSQLNPRLDEIFLDTTYCNPKYTLPTQEEAIAAAIEVAEREVATAKREKTKTLFLFGSYTIGKEKIYLSVAERLKLKVYVDKRRYRILSALEWPKERMNMFTTNKTESCLWVVPLGQVNFKQMREFMDEGNKNNVFSAPYGRVVGFRPTGWTYSSPKKSTKPFSTSPSKKSGRNLISTKTSGRYAVHGVPYSEHSSFPELVDCLRQLKPKKIIATVS

SEQ ID NO: 11482 - protein, 154 aa, Lupinus luteus
MGALTESQAALVKSSWEEFNANIPKHTHRFFILVLEIAPAAKDLFSFLKGTSEVPQNNPELQAHAGKVFKLVYEAAIQLQVTGVVVTDATLKNLGSVHVSKGVADAHFPVVKEAILKTIKEVVGAKWSEELNSAWTIAYDELAIVIKKEMNDAA

SEQ ID NO: 11483 - protein, 146 aa, Phaseolus vulgaris
MGAFTEKQEALVNSSWEAFKGNIPQYSVVFYTSILEKAPAAKNLFSFLANGVDPTNPKLTAHAESLFGLVRDSAAQLRANGAVVADAALGSIHSQKGVSNDQFLVVKEALLKTLKQAVGDKWTDQLSTALELAYDELAAAIKKAYA

SEQ ID NO: 11484 - protein, 282 aa, Nostoc punctiforme PCC 73102
MEVNSKQELIIIGGAEDKKEDCQILREFVRRAGGTKAKIVIMTAATELPRDVGENYIRVFEKLGAEDARIVDTETRDDAYSSTALEAVSKATGIFFTGGDQARITSILKDTELDTAIHKRFAEGAVIAGTSAGAAVMPDKMIVEGDSQTNPRMEIVEMGPGLGFLPGVVIDQHFLQRGRLGRLISALVQEPADLGFGIDENTAMVVTDKQIEIIGEGSVTIVDVQDTYNNMGEILKDEALAICGAKLHILPHGYKFDLKTRQPILNNGYIPDVPVLANSEKI

SEQ ID NO: 11485 - protein, 582 aa, Pseudomonas syringae pv. tomato str. DC3000
MKQNATTYSQRLLRGQSPSYERLQARLAEDGSQIDAEPLALHCGWGRLLIGHTYPDPAALAQDLLNEKAGERDIALYVAAPQQVLAQAPQQLFLDPSDTLRLWFSDYRPAQRVFRGYRIRRAHNETDWQAINNLYLARGMLPIDPALLTPRHQGGPVYWVAEDEGSNTIIGSVMGLNHQKAFNDPEKGSSLWCLAVDPQCTRPGVGEVLVRHLIEHFMSRGLSYLDLSVLHDNEQAKALYAKLNFRNLPTFAIKRKNGINESLFLGPGPQADFNPYARIIVEEAHRRGIDVQVDDADAGLFTLCYGGRRIRCRESLSDLTSAVSMTLCQDKSLTHRALKAAGLRLPAQQRAGDEADNRAFLEEHKQVVVKPLDGEQGQGVAVDLRTLEDVQSAIEQARQFDSRVILESFHEGLDLRIVVIGFQVVAAAIRRPAEIIGDGRHTIKQLIEAQSRRRAAATDGESRIPMDQETERTVREAGFDYADILPMDQRLAVRRAANLHTGGCLEDVTAILHPVLSDAAVRAARALDIPVVGLDLMVPAADQPDYVFIEANERVGLANHEPQPTAERFVDLLFPHSLPVHI

SEQ ID NO: 11486 - protein, 549 aa, Photorhabdus luminescens subsp. laumondii TTO1
MEIFFTILILILVVSVSGVLTKVIPFRIPLPLMQIAMGALLAWPHFGLHVTFNPELFLVLLIPPLLFVDGWKMPTREFFQYGREIFILMLVLVLVTVVGIGYLIYWLMPGIPLIAAFALAAVLSPTDAVALSSIVGKRRMPKRMMNVMEGEALMNDASGLVALKFAVAIAMGTMAFSVTGMTIEFFKVAIGGLLSGIAVTWLYSKSLRLMNRWSGGDPATQIVFMLLLPFASYLIAEHIGVSGILASVAAGMTISKSGVIRNAPLAMRLRADSVWSMLAFVFNGLVFIMLGLQLPGIWQTSVIQAEIDPTVETWMLFAAVAVIYGALLLLRFCWLWLMKNISKVFMRKNPLNFATYTTRELWLASFAGVRGAITLAGALSVPLFLADGTPFPARYQLIFIAAGVILFSLLIGVLSLPFLLRGMQTSDKEADISEVRMARAAMAEVAIVSMNKMEERLSASPEEQLDAEVITEVASRVIGYLRRRTVGQDEIEHNLLVEDLERRFRLTALRAERGELYHLRATRKISNETLQTLLHDLDLLEALLVQKEH

SEQ ID NO: 11487 - protein, 441 aa, Candidatus Pelagibacter ubique HTCC1002
MPINLSKIAKAKKIKYFLISFVDFFGVLRSKLVPAQAIADMQKNGAGFAGFATWLDMSPADGDMFALPDPKSLIQLPWNKEIGWLASDLYMYGKPVKASPRVMLKEQINKLHKKDLVMKSGVECEYFLISEDGSKIADARDTQSKPCYDQSALMRRYDLIKEICDSMITMGWNPYQNDHEDANGQFEMNWDYTDCLTTADRHVFFKYMVKSLAEKHGLRATFMPKPFSNLTGNGCHAHISLWNGKINKFLDNGDKLGLSKLAYNFLGGIMKLTQPLTAFFNPTINSYRRINAPPTKSGATWSPSSISYTGNNRTHMIRIPDKGRFELRLMDGAVNPYLLQAGVIAAGLHGINNKIDPGEPLSCNMYTDHKNYPHLKKLPDIIEDALDQLENSKEIKEAFGGDTIKSYLKLKRSEINDFNQEEKFDKKSSVTHWEKNSTLDC

SEQ ID NO: 11488 - protein, 448 aa, Leuconostoc mesenteroides subsp. mesenteroides ATCC 8293
MARKTFTKEEIKQIVADENVEFIRVTFTDVLGAIKNVEVPTSQLDKVLDNDLMFDGSSIEGFVRINESDMYLYPDLSTFMIFPWATDGHGGKVARLIADIYTADREPFAGDPRHALRTVLTEAREAGFTSFNVGTEPEFFLFKLDEKGNPTTELNDKGGYFDLAPLDMGENVRREIVLTLEKMGFEIEAAHHEVAEGQHEVDFKYASALEAADNIQTFKLVVKTIARKNGYFATFMPKPVAGINGSGMHTNMSLFTKEGNAFEDVSDEMGLSKAAYNFLGGVLEHATAFTALANPTVNSYKRLTPGFEAPVYVAWSASNRSPMVRVPASRGQSTRLELRSVDPTANPYTSLAAILASGLDGIKRELEPLASVDKNIYLMDEIERERAGITDLPDTLLAAVRELAADDVVRAAIGEHIADKFIEAKKIEYTSYRQYVSQWETDSYLEKY

SEQ ID NO: 11489 - protein, 413 aa, Cyanothece sp. PCC 8801
MRKSTFWVSLLVSCTLLFNSFVWTPSASAFTENQKVLLQSWRLVNQSYLDDTFNHQNWWLMRQKLLNRPLSDREETYDTIEEMLATLDEPFTRLLRPEQYHNLQVSTSGELSGVGLQININPDTGNLEVVAPLAGSPAEAAGIQSRDRILEIDGIDTATLTLDEAANKMRGPSGTQVSLIIQPHQDQDNIHEVKITRERISLSPVVATVDQHISTTPIGYIRLNQFSANAAQDIKKAITDLEDQGAQAYILDLRNNPGGLLQAGIEVARLWIDEGTIVYTVNRQGVQDSFTAFGSALTQDPLVVLVNQGTASASEILAGALQDNGRALLIGEKTFGKGLIQSLFELGDGAGLAITVAKYETPNHKDIHKLGIMPDEVVPQDPISYQQIGTDADLQYQAAIKVLTGNTILAHAS

SEQ ID NO: 11490 - protein, 446 aa, Lactobacillus rhamnosus
MARKAITADEIRQTVKDENVLFLRLMFTDINGIIKNVEVPISQLEKVLNNKIAFDGSSIDGFVRIEESDMLLYPDLNTWLLFPWENDHGKIARLICSVHRPDGTPFGGDPRNNLIRVVNEMKDAGFTAFNIGPEPEFFLFKLDEDGNPTTHLNDRGSYFDFAPLDMGENCRRDIVLELEKMGFEVEASHHEVAPGQHEIDFKYADALEAADNIQTFKLVVKTIARKHGLYATFMPKPLHGINGSGMHINMSLFHDKGNAFFDPDTGDQLSETAMHFLAGVLRHAYALTAINNPTVNSYKRLVPGFEAPVYVAWSGKNRSPLIRVPQSRGLSTRLELRSVDPTANPYLAIAAILQAGLDGVKNQLKPEEAVDRNIYRMQDDERKANHIQDLPSTLHNALKALAADDVVKAALGKHLYQSFMDSKNLEWSAYRQQVSEWERQQYLELY

SEQ ID NO: 11491 - protein, 392 aa, Coleostachys genipifolia; identical to SEQ ID NO: 8041

SEQ ID NO: 11492 - protein, 392 aa, Acmanthera latifolia; identical to SEQ ID NO: 8044

SEQ ID NO: 11493 - protein, 392 aa, Pterandra arborea; identical to SEQ ID NO: 8047

SEQ ID NO: 11494 - protein, 222 aa, Brassica napus
  misc_feature (22)..(22): Xaa can be any naturally occurring amino acid
MDATKEASVPDQKRPREEDDQXTAAGAAMETDNSAPASNGEQTKKPACISSVIPGWFSEMSPMWPGEAHSLKVEKVLFQGKSDYQDIIVFQSATYGKVLVLDGVIQLTERDECAYQEMITHLPLCSIPNPKKVLVIGGGDGGVLREVARHSSVEQIDMCEIDKMVVDVSKQFFPNVAIGFEDPRVNLVIGDGVAYLKNAAEGSYDAVIGDSSDPIGPAKELV

SEQ ID NO: 11495 - protein, 392 aa, Galphimia gracilis; identical to SEQ ID NO: 8049

SEQ ID NO: 11496 - protein, 392 aa, Acridocarpus natalitius; identical to SEQ ID NO: 8051

SEQ ID NO: 11497 - protein, 447 aa, Methanosarcina acetivorans C2A
MVQMKKCTTKEDVLEAVKERDVKFIRTQFTDTLGIIKSWAIPAEQLEEAFENGVMFDGSSIQGFTRIEESDMKLVLDPSTFRILPWRPATGAVARILGDVYLPDGKPFQGDPRYVLKTAISEAEKMGFSMNVGPELEFFLFKLDANGNPTTELTDQGGYFDFAPLDRAQDVRRDIDYALEHMGFQIEASHHEVAPSQHEIDFRFSDVLNTADNVVTFKYVVKSIAYHKGYYATFMPKPLFGENGSGMHSNQSLFKNGKNAFYDPDTPMQLSQDAMYYIGGLMSHIKEFTAITNPVINSYKRLVPGYEAPIYITWSSKNRSSLIRIPATRGEGTRVELRCPDPSCNPYLAFALMLRAGLDGIKSKIDPGEATNVNIFHLTEKERAERSIHSLPGDLKEAIDEMKGSQFVKEVLGEHVFSHYLCAKEMEWDEYKAIVHPWELEKYLPML

SEQ ID NO: 11498 - protein, 159 aa, Corynebacterium glutamicum
MTSIHDISVTLNDGTETTMADWAGHLLLIVNVASKCGLTPQYEGLQKLYEEYQDRGFFVIGVPCNQFNGQEPGTDAEVCAFAQNQYDVTFPLLSKTEVNGEGTHPLYKVLKEATDGSEIEWNFEKFLVDAEGNTIKRFAPRTEPSAAEVVEAIEENLPI

SEQ ID NO: 11499 - protein, 159 aa, Lagarostrobos franklinii
ILCVLPLFHILSLNSVLLCALRVGAAILIMQKFNITTLLELIEKYKVTVAPFVPPIVLEIAKNPIVANYDVSSIRMITAGGAPLGEDLEDALRARFPSAKFGQGYGMTEAGPGLARNLGFAKEPFPVKSGSGGTVVRNAQMKIIDTETGASLPHNQAGE

SEQ ID NO: 11500 - protein, 162 aa, Zea mays
GTPAGTGPEFPGRPTRPNVARIMKNAIPQTGKIAKDAKECVQECVSEFISFITSEASERCHQEKRKTINGEDILFAMSTLGFDSYVEPLKLYLQKFREAMKGEKGIGGAVSATDGLSEELTEEAFTNQLPAGLITADGQQQNVMVYTTSYQQISGVQQIQFS

SEQ ID NO: 11501 - protein, 284 aa, Desulfitobacterium hafniense Y51
MELWYTEEHTENVRFSIKVDRQLYSGQSEFQRIDVFESKEFGTFFTLDGLMMVTQKDEFIYHDMIVHVPMATNPQIKDVLVIGAGDGGTVRELTRYDSIVNIDMVEIDKLVVDVCKEYLPQTACKLEDPRVRLFFEDGLRFIRTKENSYDLIIVDSTDPFGPGEGLFTKEFYGNCYKALKDDGILVNQHESPYYETYAQNMGRAHQRIKEFFPVCRVYQAHIPTYPSGHWLFGFASKKYDPLIDIDEQAWNDLGIKTQYYNTEIHKGCFALPNYVKEQLADAVE

SEQ ID NO: 11502 - protein, 609 aa, Propionibacterium freudenreichii subsp. shermanii
MARSVGIDLGTTNSCVAVLEGSEPTVIPNAEGSRTTPSVVAFAKGGEVLVGEVAKRQAVTNVDRTIRSVKRHMGTDWSVNIDGKKYTPQEISARVLQKLKRDAEAYLGEPVTNAVITVPAYFNDAQRQATKEAGEIAGLTVDRIINEPTAAALAYGLDKGDKEQSVLVFDLGGGTFDVSLLDISDGVFEVKATNGDNRLGGDDWDQRIVDWLVTQFKNANGIDLSADKMAMQRLQEAAERAKIELSSAQETQINLPYITAGAAGPLHLDAKLTRAEFQRMTKDLLDRCKTPFQAVIKDAHTSLDKIDEVILVGGSTRMPAVVDLVKELSGKEPHKGVNPDEVVAMGAALQAGVLKGEVKDVLLLDVTPLSLGIETKGGVMTKIIERNTTIPTKRSEIFTTAEDNQPSVMVQVYQGEREFARDNKPLGNFELTGLMPAPRGVPQVEVTFDIDANGIVHVSAKDKATGKEQSMTVTGGSALGKDDIDRMVKDAEAHAEEDKKRREAVEMRNQADALAFRTEQLLADNAATIGDDVKAPVVEALDKLKEALKGTGNDDQVKALMEELNEKTSVMGQAVYAASQAQAQGPASPSEQETSSDDDVVDAEIVDDK

SEQ ID NO: 11503 - protein, 693 aa, Aspergillus nidulans FGSC A4
MVAVIAAPDEAGVETVTFTAPLTQGFGYGIIIGLGFAFALVMIFITWSLKRYQHEIITSEMFSTAGRSVKSGLVASAVVSSWTWAATLLQSSAVAYQYGTSGPFFYASGATVQIILFATLAIELKRRAPNAHTFLEAIRARYGTVVHLVFIVFCLMTNILVTAMLLTGGAAVLNSMTGVPVVAACFLLPIGVVLYTLFGGIKATFITDYMHTVVIVVIIFIFAFSAYASNDRLGSPGKVYDLLVQAALRNPVSGNAEGSYLTMRSKDGGIFWVINLVGNFGTVFLDNGYYNKAIAAHPVHAFPGYVIGGLCWFAIPWLCATTMGLSALALEGTRRIASVDVTAGLVLPFASVELLGYSGAVCTTLMIFMAVTSAFSAQLIAVSSILTYDIYQAYINPAAKGKRLVWVSHLSCVVFAIAMAAFATGLHYAGIGMGYLYLLMGVIISSAVFPGAMTLVWKGQNWIAAAASPVLGLAMSLVAWLVTTKTEYGVFTVETTGANYPMLAGNVAALLSPVVFSPVLTYLFGPQNYDYESMRAIRKVDDSDVAAAAHVDLELIPGASNTNSSPSQQQQEEEEIRKLNKAAFISRCLTVGMVICFLILWPIPMYGSGYVFSKKFFTGWVVVGIIWLFGTAFGVILFPLWEGRSSIKRVGKLMLLDAMGRQWKSSALVGQGDEESEESGSGAVTPSEKIVAK

SEQ ID NO: 11504 - protein, 163 aa, Triticum aestivum
  misc_feature (66)..(66): Xaa can be any naturally occurring amino acid
  misc_feature (145)..(145): Xaa can be any naturally occurring amino acid
MVFKDRGSPRGGGGVREQDRFPPIANISRIMTQAVLANGKIAKDAKERGGECFSEGVSPAISEAGXKGHNDKRKTINGDDLHWAMATLGYEEYVNPLKIYLQKYRDMEGDSKLTSKSGEGSVKKDIIGAHSGATSSNAQATGQRXGNAQGMGNNAPQDHNGDT

SEQ ID NO: 11505 - protein, 138 aa, Zea mays
MASVRLSSATMTSSLAHATMVAPFIGLKSSAAFPVTCKANTEITSITSNGGRINCMKVWPPVGKKKFETLSYLPGLTDVEIAQEIDYLIRNKWTPCIEFEWSTVLYTVSMETSLDTMMDDTGQCGTFLCSDALTHLRC

SEQ ID NO: 11506 - protein, 473 aa, Synechococcus sp. PCC 7002
MTQTATDVLRLIQEENIQIIDLKFVDLPGIWQHCSFYQDQLDEASFVDGVPFDGSSIRGWKAINESDMAMVPDPTTAWIDPFCKEKTLSLICSIKEPRTGEWYSRDPRSIAQKAVDYLAASGIGDTAYFGPEAEFFVFDDVRFDQTENKGFYYVDSVEGRWNSGRKEPGGNLAHKPGYKQGYFPVPPTDTLQDMRTEMLLTMAKCGVPIEKHHHEVATGGQNELGFRFATLLKAADYLMTYKYVIKNVARKYGRTVTFMPKPLFNDNGSGMHTHQSLWKEGQPLFWGDRYANLSQLALHYIGGILKHAPALLAFSNPSTNSYKRLVPGFEAPVNLAYSQGNRSASVRIPLSGPNPKAKRLEFRCPDATANPYLAFAAMLCAGIDGIKNAIDPGDPLDVDIYDLTPEELSKIPSTPASLEAALEALQQDHDFLTAGGVFTTDFIENWIEYKLDAEVNPLRLRPHPYEFALYYDC

SEQ ID NO: 11507 - protein, 288 aa, Prochlorococcus marinus str. NATL2A
MNYKLKTRSEWLDEYHQGVRYGLQGKLILEESSPFQKITIYESKRYGKALLLDDCWMTAEKSEKCYHECLIHPALCCSTQIENILIIGGGDGGSARECLKYKEVKSIDLVEIDLRVIELSQKYLPTIGGDAWSDSRLNLQIKNGIDWVKHTQENSYDVIIIDGADPIGPSKELFSNSFLKDCKRILKQGGVLATQSESPESFQKIHINIVKVLREIFDYADPMYGSVSIYPSGLWSWTFASMKQQRYMHPKKSRVKEISENCQIWSTRWQQGAFNSIPAFIERELAKK

SEQ ID NO: 11508 - protein, 272 aa, Alkaliphilus metalliredigens QYMF
MEKMENVELIIIGGGEDKKADQEILKEVVHSAGGESAKIAIVTTATNYPLEVGEEYRKIFYDLGVDEVQTINITNRKDANRKQTIKVLEGVDCIFFVGGDQLRISSILGGTEVHNYMKKAIKNGVVIAGTSAGASMMSEIMVVEGADEEAPRKCTLKMAPGMGLLEGAIIDQHFNQRGRIGRLLAAVAQNPHILGLGIDEDTAITVNDQREISVIGSGVVTVVDGLQVNYTNISEKYPDEPLAITNVKVDILPSGYGYHIGNRRAIIRENTQ

SEQ ID NO: 11509 - protein, 887 aa, Alkaliphilus metalliredigens QYMF
MKLVSTRVYLGRNIYSHWPVVRIDVDLEKYVNIPTCDIEGFNEKLLTLLPGLREHKCSPGYEGGFVERLNRGTYLAHVLEHMALDIQNKLGYRVTFGKTRYLEGETIYCLVFTYEDPIAGLESGKLAFNIIDSLLNNKAIDLEQHLNGIQGLVSTSTLGPSTAAIVEEAKKRDIPVTRIGEHSLVQLGYGKYGRKVQATVTDQTSCVAVDTACDKVLTNHILRSVGIPVPFGKVVTAREHAVEVAEEIGYPVVVKPDNGNQGKGVSLELRCSEDVESAFDIARGFSDRVLLETFIPGKHYRIAVVADQVVAVSQRIQTHVVGNGYNTIRELIDIENSNPLRGEGHEKPLTKIKIDDVMMLILQKTSRTLEDVPKKEELIYLRENANLSTGGIAIDVTDEIHPDNVKVVRDAVRIIGLDIAGIDVTMPDISQSIRQVGGAVIEVNACPGIRMHHHPSEGQSRNVAASIVNMLFPAEKPFTIPIFSVTGTNGKTTTTRMLAKILRQNGLVVGMTSTGGIYVQDELICGGDATGPRSAESILLDNRVEVAVLETARGGLINKGLAYDLADIGIITNIGNDHLGMDGVNTLEEMADVKALVTEAIRPQGYAILNAEDKFVERIAQRITCQILYFAKDMNNKVIKDHVNRGEKAVYIKDDIIQVFDGEKEKPVIHVENIPATYGGVLIHNIENSLAAVAAAFGHGIKTDVIAKGLSQFQTDASTNPGRFNIFEMEKCRVVIDYGHNIDGYQKVLEGLKLMKKNRLIGVIGVPGDRTDISTLKIGEISGKHFDHVYIKEDKDLRGRNPGEVANLMKKGCALGGLKEEEIQIEHCEIKALQKALESAQQGDIIIVFYEKLEPLVKLIKDTQDAEKTMSLNPQLEIKIEEAVGKL

SEQ ID NO: 11510 - protein, 171 aa, Arabidopsis thaliana
MGASASVPERSVHQFTVKDSSGKDLNMSIYQGKVLLIVNVASKCGFTETNYTQLTELYRKYKDQDFEILAFPCNQFLYQEPGTSQEAHEFACERFKAEYPVFQKVRVNGQNAAPIYKFLKASKPTFLGSRIKWNFTKFLVGKDGLVIDRYGTMVTPLSIEVSVLYISKVPM

SEQ ID NO: 11511 - protein, 158 aa, Oceanobacillus iheyensis HTE831
MSVHDFTVTTIEGEEKRLSDYKGKVILIVNTASQCGFTPQLEDLQKLYKQYQDNDFEILGFPCNQFGNQDPGASEEISAFCQKNYGVTFQMFKKVDVKGKEAHPLYKHLTEEKKGILGGQIKWNFTKFLIDQNGNVIERFSPQKNPNTLNKDIEVLLR

SEQ ID NO: 11512 - protein, 1128 aa, Stellaria longipes; identical to SEQ ID NO: 8066

SEQ ID NO: 11513 - protein, 444 aa, Roseovarius nubinhibens ISM
MKKFLMAAAAGTLTGVLVTTQVAAPLLAQEAKKNTNVYEQLDLFGDIFERIRVQYVEEVDDADLIEAAINGMLTSLDPHSGYLPPADAEAMQEQTRGEFGGLGIEVTQEEGFVKVVSPIDGTPADNAGIEAGDFVTHVDGESVLGLTLDEAVDLMRGPVGSEIVITVVREGEEPFDVSIIRDTIKLTAVRARTEQDTVVLRVTTFNDQTYSNLEEGLNEQVEAAGGWDKINGVVVDLRNNPGGLLTQAIKVSDAFLDKGEIVSTRGRNPEDGERFNATEGDLASGKPLVVLINGGSASASEIVAGALQDHNRAVVVGTKSFGKGSVQTVMPLRGDGAMRLTTARYYTPSGRSIQALGVSPDILVEQPRRKRDEEEEETKTNRPGRTEADLRGSLDNDSLTEDEIRQIEEDRARAEEAAKLREEDYQLAYAIDVLRGLSALNGKK

SEQ ID NO: 11514 - protein, 517 aa, Ostreococcus tauri
MAPSPRRKVPLVAYNDVKDSPALKMSETPAKQRFETSPLSVLLKPISPLSENSPDWSDERTREGDASAIGSPEEPTTPRGDALGVFAKEVDHAARWDVRAFPADAPASANSVEVRRRRGKTRSGDFDRENTFDREFDFDDGRGVGDHDGDGHPMFRVFGRDIGKPPRASSEREEGDGLGKTSGRGRTRGLFGSFGNRSGAFERVGSGSSSMGSKRSDEIGQLSRMNSLAETKVLTSTLLVRQTSVSGDAQFDFDDHFRFEQQIGASQNSEVWLVTSKVSGNAFVVKKCLHSFTTEAQRAKYKREVEAAALLPEHPNIVRYYRSWQQDQHFYIQMEHCACGSLTSVFARLPPQTLVAELDVWRLAEQTASGLAFMHLHRIIHLDVKPDNIYIDVSGTCKIGDFGLAYVMESGWDWEEGDGGYLAPELLNLFPGQYPSPSADVFSLGVTLYEVASGLKFPRGATPRMAIPPLPEGRSAELARLIAGCLDFDPAKRATAQEVANFARENVAALEMGATSM

SEQ ID NO: 11515 - protein, 314 aa, Leitneria floridana; identical to SEQ ID NO: 8072

SEQ ID NO: 11516 - protein, 1162 aa, Arabidopsis thaliana
MTTVIDATMAYRFLEEATDSSSSSSSSKLESSPVDAVLFVGMSLVLGIASRHLLRGTRVPYTVALLVIGIALGSLEYGAKHNLGKIGHGIRIWNEIDPELLLAVFLPALLFESSFSMEVHQIKRCLGQMVLLAVPGVLISTACLGSLVKVTFPYEWDWKTSLLLGGLLSATDPVAVVALLKELGASKKLSTIIEGESLMNDGTAIVVFQLFLKMAMGQNSDWSSIIKFLLKVALGAVGIGLAFGIASVIWLKFIFNDTVIEITLTIAVSYFAYYTAQEWAGASGVLTVMTLGMFYAAFARTAFKGDSQKSLHHFWYFQNLEMVAYIANTLIFILSGVVIAEGILDSDKIAYQAKVTTVLGLRQLYSFTSLLLLLSTWNSWRFLFLLYVYIQLSRVVVVGVLYPLLCRFGYGLDWKESIILVCHIDSVLTYSHSFDSAIKRKFTYQQGDWNIVLLQFLFFTGGIVFLTLIVNGSTTQFVLRLLRMDILPAPKKRILEYTKYEMLNKALRAFQDLGDDEELGPADWPTVESYISSLKGSEGELVHHPHNGSKIGSLDPKSLKDIRVQATYWEMLDEGRISEVTANILMQSVDEALDQVSTTLCDWRGLKPHVNFPNYYNFLHSKVVPRKLVTYFAVERLESACYISAAFLRAHTIARQQLYDFLGESNIGSIVINESEKEGEEAKKFLEKVRSSFPQVLRVVKTKQVTYSVLNHLLGYIENLEKVGLLEEKEIAHLHDAVQTGLKKLLRNPPIVKLPKLSDMITSHPLSVALPPAFCEPLKHSKKEPMKLRGVTLYKEGSKPTGVWLIFDGIVKVTQNLSFTFNSTLGLYEVLTGKPYLCDLITDSMVLCFFIDSEKILSLQSDSTIDDFLWQESALVLLKLLRPQIFESVAMQELRALVSTESSKLTTYVTGESIEIDCNSIGLLLEGFVKPVGIKEELISSPAALSPSNGNQSFHNSSEASGIMRVSFSQQATQYIVETRARAIIFNIGAFGADRTLHRRPSSLTPPRSSSSDQLQRSFRKEHRGLMSWPENIYAKQQQEINKTTLSLSERAMQLSIFGSMVNVYRRSVSFGGIYNNKLQDNLLYKKLPLNPAQGLVSAKSESSIVTKKQLETRKHACQLPLKGESSTRQNTMVESSDEEDEDEGIVVRIDSPSKIVFRNDL

SEQ ID NO: 11517 - protein, 380 aa, Glycine max
MDSHIHHHQSYQQQNQPSSGLLRFRSAPSSLLSNLTPSFVSEDFGSSSFRELEGNNNKGCSKDLSSMNSHKGVYGGGLPPHYPRHGSSSSAATSSSAMEGSYGMVSSMGLDHEAPHKGFGSSLLRQSSSPAGLFSNNNISFQNGFATMKGVGNYGAVNGSNGELSPCINRLKNQVSFSPRNASSLGMLSQISELGSEDIEATSPDDDTKHGGNDTQHYGPGFPFGSWNDTPQLSENISGLKRGRSGNEKMFSDVQNGELANQVNMLSHHLSLPKTSAEMITMEKLLQFPDSVPCKIRAKRGCATHPRSIAERVRRTRISERMRKLQELVPHMDKQTNTADMLDLAVEYIKDLQKQFKTLSEKRANCKCISMPKADTNQIA

SEQ ID NO: 11518 - protein, 392 aa, Acridocarpus macrocalyx; identical to SEQ ID NO: 8077

SEQ ID NO: 11519 - protein, 1410 aa, Arabidopsis thaliana
MECIGKRVKSRSWQRLQAVNKRKKMETVAPVTSPPKKRRQKKPKNYDSDIEDITPTCNDSVPPPQVSNMYSVPNNSVKESFSRIMRDLNVEKKSGPSSSRLTDGSEQNPCLKERSFRVSDLGVEKKCSPEITDLDVGIPVPRFSKLKDVSEQKNTCLMQKSSPEIADLDLVISVPSSSVLKDVSEEIRFLKDKCSPEIRGLVLEKSVPGEIEILSDSESETEARRRASAKKKLFEESSRIVESISDGEDSSSETDEEEEENQDSEDNNTKDNVTVESLSSEDPSSSSSSSSSSSSSSSSSSSDDESYVKEVVGDNRDDDDLRKASSPIKRVSLVERKALVRYKRSGSSLTKPRERDNKIQKLNHREEEKKERQREVVRVVTKQPSNVVYTCAHCGKENTGNPESHSSFIRPHSIRDEIEDVNNFASTNVSKYEDSVSINSGKTTGAPSRPEVENPETGKELNTPEKPSISRPEIFTTEKAIDVQVPEEPSRPEIYSSEKAKEVQAPEMPSRPEVFSSEKAKEIQVPEMPSIPEIQNSEKAKEVQANNRMGLTTPAVAEGLNKSVVTNEHIEDDSDSSISSGDGYESDPTLKDKEVKINNHSDWRILNGNNKEVDLFRLLVNSVWEKGQLGEEDEADELVPSAEDQSQEQAREDHRKYDDAGLLIIRPPPLIEKFGVEEPQSPPVVSEIDSEEDRLWEELAFFTKSNDIGGNELFSNVEKNISANETPAAQCKKGKHDLCIDLEVGLKCMHCGFVEREIRSMDVSEWGEKTTRERRKFDRFEEEEGSSFIGKLGFDAPNNSLNEGCVSSEGTVWDKIPGVKSQMYPHQQEGFEFIWKNLAGTIMLNELKDFENSDETGGCIMSHAPGTGKTRLTIIFLQAYLQCFPDCKPVIIAPASLLLTWAEEFKKWNISIPFHNLSSLDFTGKENSAALGLLMQKNATARSNNEIRMVKIYSWIKSKSILGISYNLYEKLAGVKDEDKKTKMVREVKPDKELDDIREILMGRPGLLVLDEAHTPRNQRSCIWKTLSKVETQKRILLSGTPFQNNFLELCNVLGLARPKYLERLTSTLKKSGMTVTKRGKKNLGNEINNRGIEELKAVMLPFVHVHKGSILQSSLPGLRECVVVLNPPELQRRVLESIEVTHNRKTKNVFETEHKLSLVSVHPSLVSRCKISEKERLSIDEALLAQLKKVRLDPNQSVKTRFLMEFVELCEVIKEKVLVFSQYIDPLKLIMKHLVSRFKWNPGEEVLYMHGKLEQKQRQTLINEFNDPKSKAKVFLASTKACSEGISLVGASRVILLDVVWNPAVERQAISRAYRIGQKRIVYTYHLVAKGTPEGPKYCKQAQKDRISELVFACSSRHDKGKEKIAEAVTEDKVLDTMVEHSKLGDMFDNLIVQPKEADLVEGFSILMP

SEQ ID NO: 11520 - protein, 204 aa, Triticum aestivum
MEAERSQLSPIDPRRARFPCCIVWTPIPFITWLMPFIGHIGICREDGVILDFAGPNFVSVDNFAFGAVTRYIQLNGDECYKLLDTGAETTWDGALRKGVQEFQNRNYNLFTCNCHSFVANNLNRLFYAGHDKWNVVSLAAVMFLRGRWVSAGAVVKTLAPFVVVLALGVLLGGTTFLLGLLAFAAVMAGWFLVGTYCIKGLVEL

SEQ ID NO: 11521 - protein, 521 aa, Cyanothece sp. PCC 7424
MSLESTADVTIKHNLEQFLVVLSVSLSVATISRVFSWFRQIPYTLLLVIVGLGLGFVDIRLVNLSPELILEIFLPPLLFEAAWNIRWRDLKDNWLPVVLFAVVGVIISIVGIGFALSQFTVLPLATALLVGASLSATDPVSVVALFRELGASKRLTVLMEGESLFNDGVAVVAFLLLVGIPLGVEEFSLSNTIVQFFTFVGIGTGIGCLIGFGISYLTQRFDIPLVEQSLTLVSAYGTYLITEELGGSGVIGVVTVGIILGNFGSRIGMNPRTRLLVSEFWEFLAFFVNSIVFLLIGDQIKFSSLADNLTLIFVSIAAVVVTRLIAIFALGSFSNILTKDKINIKEKTILWWGGLRGSVSIALALSVPNILEGKQDIIDAVFGVVLFTLLVQGLTTKTFLEKLDLIGDQPLRQKFSELLARRVALIRVLDYIDKLDNNPEVDEEFYRYEQSLVTEELKQVKDEIDKLINQYPQLRSLIMEQVRESLLDIEAETYAEFIRAGRLNQKLSPKLQEILTEAEEH

SEQ ID NO: 11522 - protein, 392 aa, Triaspis hypericoides; identical to SEQ ID NO: 8079

SEQ ID NO: 11523 - protein, 304 aa, Zea mays
MSEEPSNKNEKMSSGERVPLWEKHKGKKEESYGSSKSHKKDDKKKKRMKKVRSPTLASLPRGATRAAPKPAAAFPLFLSPATPPPELAAGMAVWPAGRVAARLSSSRWWRAPQQAGKTSLVRLRRVVWMATAAVAAPAGARASAGDGGWGRWPVAQAVGSGARGLDLDPVDRICLNSWQLSLGQFTPFLTTESDLRPWLLLLEECKQRHTRNLNNLEPDTRNVSHSMTLTSYDQIQQSTPHPTAREMRLAQDPNYAVARAASRAINELKKQWELEEGDSLRFVMNQNLASGDTDDDNSVADDAS

SEQ ID NO: 11524 - protein, 392 aa, Triopterys rigida; identical to SEQ ID NO: 8081

SEQ ID NO: 11525 - protein, 159 aa, Prochlorococcus marinus str. MIT 9303
MAINISQIVVRTPEGAEKSLSEYNGTVLLIVNVASRCGFTKQYKGLQALQDTYGPKGLKVLGFPCNDFGAQEPGTLEEIKSFCSTTYGASFELFDKVHAMDKTTEPYTTLNQTEPAGDVAWNFEKFLVGKDGTVIKRFKSGVEPESTELKGAIEQALNT

SEQ ID NO: 11526 - protein, 392 aa, Janusia linearifolia; identical to SEQ ID NO: 8083

SEQ ID NO: 11527 - protein, 442 aa, Rickettsia typhi str. Wilmington
MLLRFIIALFFSINCVVEGKETENKISNQEAYKQFQDVFERIEKDYVQVPDRQKMIDEAINGMLNSLDPHSNYYTDEDLEDIFTFTKGEFGGIGVEIMYDSGAIKIISSIDDLPAFKAGLKGGDYIVGVNDELVSTLGPNKAIKEMRGTPGTKVRLLIIKEEEAKPQELELTREIVKIKPIKAHLEKNNIAYIRITTFNESTISELKAAVKKLKTESKDNLKGIILDLRNNAGGILDQAIAVSDYFIDSGVIVTTKGRTTSSNSETKANEFSLKAPRVPMIVLINGNSASASEIVAGALQDHKRAIILGTKSFGKGSVQALTQINSRAAVKLTISKYYTPSGRSIQAEGIEPDILIEPAKVEYPEVKKIDKRFSESSLKNYLKNDNEKNKDSKKETKAKNNKQEESELSELYKKDYQFARAYDVITGLIINMNLETQENAKQ

SEQ ID NO: 11528 - protein, 677 aa, Camellia sinensis
MSGKGEGPAIGIDLGTTYSCVGVWQHDRVEIIANDQGNRTTPSYVAFTDTERLIGDAAKNQVAMNPTNTVFDAKRLIGRRFTDASVQSDMKLWPFKVIAGPGDKPMIGVNYKGEEKLFAAEEISSMVLIKMREIAEAYLGSTVKNAVVTVPAYFNDSQRQATKDAGVIAGLNVMRIINEPTAAAIAYGLDKKATSVGEKNVLIFDLGGGTFDVSLLTIEEGIFEVKATAGDTHLGGEDFDNRMVNHFVQEFKRKSKKDISGNPRALRRLRTACERAKRTLSSTAQTIIEIDSLYEGVDFYSPITRARFEELNMDLFRKCMEPVEKCLRDAKMDKSTVHDVVLVGGSTRIPKVQQLLQDFFNGKELCKSINPDEAVAYGASVQAAILSGEGNEKVQDLLLLDVTPLSLGLETAGGVMTVLIPRNTTIPTKKEQVFSTYSDNQPGVLIQVYEGERTRTRDNNLLGKFELSGIPPAPRGVPQITVCFDIDANGILNVSAEDKTTGQKNKITITNDKGRLSKEEIEKMVQEAEKYKSEDEEHKKKVEAKNTLENYAYNMRNTVKDEKIGEKLPAADKKKIEDAIEQAIQWLDSNQLAEADEFEDKMKELESICNPIIAKMYQGAGGGDMGGAGMDVWVVLVWMRMVLLLVEVVPVPRLRKWTKLLVFYLRCFFLFFCVFNI

SEQ ID NO: 11529 - protein, 594 aa, Picea sitchensis
MGVEGEGSVETALLEEGSISSVQTGKASEDEYTGDGSVDFWGRPSVKENTGNWRACPFILGNECCERLAYYGINTNLVTYLTKRLHQGNAAAAKSVTTWAGTCYLTPLFGAVLADAYWGRYWTIAAFSTIYFIGMATLTLSASVSSLKPPSCIGSDCPTANLAQYGVFFLGLYLIALGTGGIKPCVSSFGADQFDDTDPKEKKKKGSFFNWFYFSINVGALVSSSVLVWVQDNVGWGWGFGIPTLFMGLAIGSFFSGTPLYRLQKPGGSPVTRMCQVVVASLRKLRKTVPLDHSHLYEVQDRNSAIQGSRKLEHTDEFKCLDKSAIITDDDVRKGGFSNPWRLCTVTQVEEMKILLRMFPIWATGIVFAAVYSQISTMFVEQGMTLDTSIGSRFHIPPASLSVFDVVSVMIWVPVYDRVIVPIVSKYTKRERGFTELQRMGIGLFISILAMVAAALVEIRRLNIVKTYDLVYDKGTPVPMSIFWQIPQYFLVGASEVFTFVGQLEFFYDQSPDAMRSLCSALSLLTTALGNYLSSLIVTIVMFATTKGGNIGWIPDNLNEGHLDYYFWVLASLSVLNLLVYVSCAHRYKYKKAS

SEQ ID NO: 11530 - protein, 392 aa, Janusia anisandra; identical to SEQ ID NO: 8085

SEQ ID NO: 11531 - protein, 495 aa, Klebsiella pneumoniae subsp. pneumoniae MGH 78578
MADRNLRDLLAPWVPNAPERILREMTLDSRVAASGDLFIAVQGHQADGRRYIPQAIAQGVAAIIAEAQGEAKDGEIREMHGVPVIYLSQLNERLSALAGRFYHQPSQQLRLVGVTGTNGKTTTTQLLAQWAKLLGETSAVMGTVGNGLLDKVVPTENTTGSAVDVQHVLSSLVGQGATFGAMEVSSHGLVQHRVAALQFAASVFTNLSRDHLDYHGDMEHYEAAKWLLYSTHHCGQAIVNADDEVGRRWLAKLPDAVAVSMEDHINPNCHGRWLKATAVNYHDSGATIQFDSSWGKGEIESRLMGAFNVSNLLLALATLLALGYPLADLLKSAARLQPVCGRMEVFSAPGKPAVVVDYAHTPDALEKALQAARLHCSGKLWCVFGCGGDRDKGKRPLMGAIAEEFADIVVVTDDNPRTEEPRAIINDILAGMLDAGQAKVMEGRAEAVTNAVMQAKENDVVLVAGKGHEDYQIVGNRRLDYSDRVTVARLLGAVA

SEQ ID NO: 11532 - protein, 446 aa, Staphylococcus aureus subsp. aureus MW2
MPKRTFTKDDIRKFAEEENVRYLRLQFTDILGTIKNVEVPVSQLEKVLDNEMMFDGSSIEGFVRIEESDMYLHPDLDTWVIFPWTAGQGKVARLICDVYKTDGTPFEGDPRANLKRVLKEMEDLGFTDFNLGPEPEFFLFKLDEKGEPTLELNDDGGYFDLAPTDLGENCRRDIVLELEDMGFDIEASHHEVAPGQHEIDFKYADAVTACDNIQTFKLVVKTIARKHNLHATFMPKPLFGVNGSGMHFNVSLFKGKENAFFDPNTEMGLTETAYQFTAGVLKNARGFTAVCNPLVNSYKRLVPGYEAPCYIAWSGKNRSPLIRVPSSRGLSTRIEVRSVDPAANPYMALAAILEAGLDGIKNKLKVPEPVNQNIYEMNREEREAVGIQDLPSTLYTALKAMRENEVIKKALGNHIYNQFINSKSIEWDYYRTQVSEWERDQYMKQY

SEQ ID NO: 11533 - protein, 454 aa, Rhizophlyctis rosea
NDQGNRTTPSYVAFSDTERLIGDAAKNQVAMNPTNTVFDAKRLIGRRFADAEVQSDMKHWPFKVIDRNTKPYIQIEFKGETKTFTPEEISSMVLLKMKETAEAYLGSTVKDAVVTVPAYFNDSQRQATKDAGVIAGLNVLRIINEPTAAAIAYGLDKKATGERNVLIFDLGGGTFDVSLLTIEDGIFEVKATAGDTHLGGEDFDNRLVSHFCEEFKRKFKKDLSSNPRSLRRLRTACERAKRTLSSAAQTSIEIDSLYEGVDFYTSITRARFEELCADLFRSTLDPVEKVLRDAKMDKNSVHDIVLVGGSTRIPKVQKLVSDFFNGKEPNKSINPDEAVAYGAAVQAAILTGDTSEKTQDLLLLDVAPLSLGIETAGGVMTALIKRNTTVPTKKSETFSTYADNQPGVLIQVFEGERARTKDNNLLGKFELTGIPPAPRGVPQIEVTFDVDANG

SEQ ID NO: 11534 - protein, 635 aa, Wolbachia endosymbiont strain TRS of Brugia malayi
MGRAIGIDLGTTNSCVAIQGKIIENKEGARTTPSVVAFTSSGERLIGAPAKRQATTNASNTFFATKRLIGRQYGDPEMKDLNVPYKVFAAKNGDAWIKTTDGKEYSPSQIGAFILQNLKEAAEAYLGEEVKDAVITVPAYFNDSQRQATKDAGKIAGLNVLRIVNEPTAAALAYGLDKKHGHTIVVYDLGGGTFDVSILEIGDGVFEVKATNGDTHLGGEDFDNAIVSYLLDEFKKSNGIGLKNDPMAMQRIKEAAEKAKIELSSAMETEINLPFITADANGPKHLNMKLTRAKLESLVNDLIERTMTPCKKALEDTGLSANQIGEVVLVGGMTRMPRVIEKVKEFFGKDPHRGVNPDEVVAIGAAIQAGIVQGDVRDVLLLDVTPLSLGIETLGGVFTPLIERNTTIPTKKSQVFSTAEDNQTAVTIKVHQGERKLAVDNKLLGQFSLEGIPPAPRGIPQIEVTFDIDANGIVHVSAKDKATGKEQKIRIQSSGGLSESEINRMIREAEEKAQEDEKRKKFVEVKNQADSLVHSTEKSLKEYGDKVSPEDKSAIENAVNELKEASKSDNIDDVDSIQQKITNLSQLSMKLGETIYKESQQQQGKESSAGSSTTNEEEKVVDSDYQDIDNKEENK

SEQ ID NO: 11535 - protein, 474 aa, Chytriomyces confervae
NDQGNRTTPSYVGFTDSERLIGDAAKNQVAMNPINTVFDAKRLIGRRFADQEVQSDMKHWPFKVVDKGTKPMIEVEFKGETKTFSPEEISSMVLLKMKETAEAYLGTTVNNAVVTVPAYFNDSQRQATKDAGVISGLNVLRIINEPTAAAIAYGLDKKTAGEKNVLIFDLGGGTFDVSLLTIEDGIFEVKGTAGDTHLGGEDFDNRLVSHFVQEFKRKHKKDLSSNPRALRRLRTACERAKRTLSSAAQTTIEIDSLFDGVDFYTSITRARFEELCQDLFRATVDPVDKVLRDAKMDKSTVDEIVLVGGSTRIPKVQKLVSDFFNGKEPNKSINPDEAVAYGAAVQAAILSGDTSEKTQDLLLLDVAPLSLGIETAGGVMTALIKRNTTVPTKKSETFSTYADNQPGVLIQVYEGERTRTKDNNLLGKFELSGIPPAPRGVPQIDVTFDVDANGILNVSAVDKSTGKQNKITIT

SEQ ID NO: 11536 - protein, 1063 aa, Coprinopsis cinerea okayama7#130
MSASQGPESEIEDEPMEEDELESENEDAGPSNKKQDKKQKRQKRKADEEGLQAKRQQMDKAKIADAVKRYSYLLGQTELFKHFVDMQRARDPEYAAIMDAQPKPKGRGRKKAPEPGARHRKSEKEEDEELLKEGEMEADEPYVFESSPSFINGTMRPYQLQGLNWMVSLHHNGLNGILADEMGLGKTLQTISFLSYLKHVRGITGPHLVVVPKSTLQNWAREFEKWTPDFNVALLTGSKEERAEIIATRLLPQDFEVCITSYEICLIEKGALKKFSFEYIVIDEAHRIKNVDSILSQIVRSFMSRGRLLITGTPLQNNLKELFALLNFICPEIFVNYADLDAFLHKDDSGAENEEDKSKKVVEALHKILRPFLLRRVKSDVEKSLLPKKEINIYVGLSEMQRKWYRSVLEKDIDAVNGLTGKKEGKTRLMNIVMQLRKVTCHPYLFDGAEPGPPYTTDEHLIQNSGKMVILDKLLKMMYQKGSRVLIFSQMSRVLDILEDYCLFRGYKYCRIDGGTAHEDRIAAIDEYNKPGSDKFIFLLTTRAGGLGINLTTADIVVLYDSDWNPQADLQAMDRAHRIGQTKQVYVYRFITEGSVEERMLERAAQKLRLDQLVIQQGRAQQQAKSAANKEELLEMITHGADKIINSSEQMLVDDDIDAIIQRGEERTAELNSKYEQLNLEDLSNFKSDASVQQWEGEDFRSGQRKPLHLNILSLSKRERKSNYSVDSYFKDTLRAGTSKTDKAPKMPKAPKQIAIQDFQFFHPRLAELQEREIAVHKRLNNIPATPRDPLPDDTPEKIEEDLKAAQAFIDTAEPLTEEELAEKEQYISEGFPDWSRRDFQQFVRALESYGWDEDIDVYANEIGDKTPEEVERYYAAFKENWTSLPEYPRIEARLKEGEAKRSKRQNLENLLIAKIKSVRYPMQELELNYPTTKGKVYSEEEDRYLLCRLHHYGMQADDVYERIKRDINEFPVFRFDWFFKSRSPQELQRRCNTLLSMIEKEAEQAKAEEAKVKGTKGKKRGIEEVQKADSKSVDESRPSTPAGNASTASASAKGTKKKKTGK

SEQ ID NO: 11537 - protein, 469 aa, Escherichia coli
MSAEHVLTMLNEHEVKFVDLRFTDTKGKEQHVTIPAHQVNAEFFEEGKMFDGSSIGGWKGINESDMVLMPDASTAVIDPFFADSTLIIRSDILEPGTLQGYDRDPRSMSKRAEDYLRSTGIADTVLFGPEPEFFLFDDIRFGSSISGSHVAIDDIEGAWNSSTQYEGGNKGHRPAVKGGYFPVPPVDSAQDIRSEMSLVMEQMGLVVEAHHHEVATAGQNEVATRFNTMTKKADEIQIYKYVVHNVAHRFGKTATFMPKPMFGDNGSGMHCHMSLSKNGVNLFAGDKYAGLSEQALYYIGGVIKHAKAINALANPTTNSYKRLVPGYEAPVMLAYSARNRSASIRIPVVSSPKARRIEVRFPDPAANPYLCFAALLMAGLDGIKNKIHPGEAMDKNLYDLPPEEAKEIPQVAGSLEEALNELDLDREFLKAGGVFTDEAIDAYIALRREEDDRVRMTPHPVEFELYYSV

SEQ ID NO: 11538 - protein, 689 aa, Oryza sativa Japonica Group
MAASRLVAAAAIVVVVLVLAGAGAAGAAGAGEVRALLDLAAGLDPTGRLLPSWAPGRDPCGREGGGGFEGVACDGATGAVANVSLQGKGLAGTLPPAVAGLTALTGLYLHYNRLTGALPRELAALSRLTDLYLNVNNFSGPIPPEIAAMPSLQVVQLCYNQLTGGVPTQLGLLKRLTVLELQSNHLSGAIPASLGDLPQLVRLDLSFNNLFGSIPVRLALLPRLLALDVRNNTLTGSVPSELAKLQGGFQYANNTDLCGTGLPALRPCTPADLISPDMPQPFSAGISPQITPGSSSDGHGHCTGTHCPPSTKALAAVVVVAVILLAVTGAGMFALSWYRWRKQRVVAGSPAAVGGRCSTDAAGKDSFRKSASSTLVSLEYSNGWDPLADGRGGIGFSQEVAQSFRFNMEDVESATQYFSELNILGKNGNFAATYRGTLRDGTSVVVKRLGKTCCKQEEAEFLKGLKLLAELQHENIVGLRGFCCSRARGECFLVYDFVPNGSLSQFLDIDADDVARSNGRVLEWSTRISIIRGIAKGIEYLHSTRANKPPLVHQNISADKVLVDYTYRPLISGSGLHKLLVDDLVFSTLKASAAMGYLAPEYTTTGRFSEKSDVYAFGVIVFQILTGKSKIMQLPLESSNDEDLIDGNLRGCYSAAEAAKLAKIASACTSENPDHRPTMEELIQELCTF

SEQ ID NO: 11539 - protein, 267 aa, Triticum aestivum
  misc_feature (224)..(224): Xaa can be any naturally occurring amino acid
WYACRYRSGIPGSTHASGNKMDSGRFESVYKVQCPLCGSDISDLSEELQLAHTNNCLDEDEPAKESNPNHERGPCDGENIENTCVVEWLRNLGLSKYEEIFTKEEVDWETLQWLTEEDLLGMGITSLGPRKKIIHALGELRRKNDNANDTEADVLISENTKRTKGPMSGNKLITEFFRCSSSDQKQRDHKVQKPSNLNNQKNSSAKVASSRSRTRKAKVKDTPXWCCIPGTPFRVDAFRYLRGDCCHWFLTHFHLDHYQGLTKSFCH

SEQ ID NO: 11540 - protein, 1060 aa, Ustilago maydis 521
MDTNAHHAAQPKPARPRGTLGLKRASHSALASAGFASPSRIARATSTDSVVTPAKRARLVLPTQQEHDDHLDSESIPAATVGANDTPPSHAFLLSRNSSNQASSSSNAASPSSNSFGPFYLCTWRKPQQKKHKTWDGDAILVVKDAGERCTLICSQTGKQLVASARFAFNRLSFGDELALGGKEIEIDREIDLLEYRKLIAFTRGELSPLRNAPPPTATRTLKPFAIPTRRSTIKPVDLNQITPARAETFYGKPAPKLIRKLPDLDHDPSASRNTSPSRVSGLNNPGNGQTPHPRFDPNEPGAIVMKRPDERHQRAHNPKRRPVVDVVLDPQLTKALRPHQVEGVKFLYERVMGMHADGTKGKGAILADEMGLGKTLQTIALILTLIKQSCYYTSKSSTIERAMIVCPLTLVKNWKREFRKWIGSNSLNVLCIDEDCGREHVERFARSKAYHVMVIGYEKLRSCIDIVKTAQPPVDLIVCDEGHRLKSKDAQTTKMFDELSTERKIILSGTPIQNNLSELYAMIDFVIPDLLGKPESFKTLFEEPILRSRAKHASKHAKAVGQARLGALMTVTKDIILRRTADILTKFLPPKHEMVLFCSPSEEQLRIYQAILGSSQVRSLLQGAPGNGLLQIGVLRKLCNSPELLLKDTEADADSPTKALVGDLTRFFPPNFVRNEARFGGKLICVMNLLQTVRAQTDDKVVLVSNFTSTLDIIEAMMRKKRYPYLRLDGKTPQDERMAMVNQFNREGVDKSFVFLLSAKSGGVGLNLIGANRLVLIDSDWNPSTDLQAMARIHRDGQKKPCYIYRLLLSGTMDEKIYQRQISKLGLSDSLMNAEKKTTSDTFSQEELRDIFTLHLDSTCISHRQLLCDCDGKGGSATLDKPEQTSSGTWTDSQSSTNSDDDEQLPGFVAASQHAVDKTAQDKLERRKKLLALYKWAHYDCVLHPNHFDHDEIAAAIIRNARHERRANKVATSLVKTEPDDEWSRNMKHRDDDLVFSSADDDDQEDEVDDPALSGLGGSSDFRLDEVEAGRILFVFAKNSDAATDKAASPTLTTPPALD

SEQ ID NO: 11541 - protein, 166 aa, Oryza sativa
  misc_feature (131)..(131): Xaa can be any naturally occurring amino acid
  misc_feature (138)..(138): Xaa can be any naturally occurring amino acid
MEGGGAKDGSAAAAQTRGSGDDGSHKPLPPCCLKAKAAAAESEAKCHATVVSGWFTEPRSHSGKTSKVQYFNNPMWPGEAHSLKVENILYQGKSPYQEILVFESSTYGNVLVLDGIVQVTEKDECAYQEMXTQLPMCXIPSPKNVRMSEVVMWCVREIYRHGSRKK

SEQ ID NO: 11542 - protein, 490 aa, Leuconostoc mesenteroides subsp. mesenteroides ATCC 8293
MRLTTETIQNLLVDHNLLLDAPDVDMTFDFLHYDTREVQKNTLFVIKGAFKRAYLDNVHGITGLITETKIDVDLPQWQVTNVQKALSLLSMAFFDYPQEQLWIGAFTGTKGKTTAAYFAYTMLKEATNNHTALFSTVDRITGPQASDKKKSDLTTPESYELFKDMRQVVDNGMTHLVMEVSSQAYLKNRVYGLRYDVGAFLNISPDHIGPNEHPTFEDYLAHKLMLLDHSDEVIVNAETDHFDTIYTYAKKAHHKVYTYSRQMFTSEESAIHESRFTVVKSEFNEMLGSYRLNVPGDFNESNAMAAMMLVSFAGVKHQAMVKGLDEVFIPGRMLSLPINGHGVAFVDYAHNFVSMQALLSFAQAQYPNGRVLVVVGSPGNKGVSRRADFGHVVSDLADVVYLTADDPQFENPLDIAHEIAAHINNDKLEVHYEMNRIAAIHEAISAANENDIVIVAGKGEDPYQKIDGVDVPYIGDYAVVKQFRDQIKNP

SEQ ID NO: 11543 - protein, 641 aa, Xanthomonas campestris pv. vesicatoria str. 85-10
MGKIIGIDLGTTNSCVSIMDGGKARVIENSEGDRTTPSIVAYTKDGEVLVGASAKRQAVTNPKNTFYAVKRLIGRKFTDGEVQKDISHVPYGILAHDNGDAWVQTSDAKRMAPQEISARVLEKMKKTAEDFLGEKVTEAVITVPAYFNDSQRQATKDAGRIAGLDVKRIINEPTAAALAYGLDKNGGDRKIAVYDLGGGTFDVSIIEIAEVDGEKQFEVLATNGDTFLGGEDFDNRVIEYLVDEFNKDQGIDLRKDPLALQRLKDAAERAKIELSSSQQTEVNLPYVTADASGPKHLNIKLTRAKLEALVEDLVKKSIEPCRTALNDAGLRASDINEVILVGGQTRMPKVQQAVADFFGKEPRKDVNPDEAVAVGAAIQGGVLAGDVKDVLLLDVTPLSLGIETMGGVFTKIIEKNTTIPTKASQTFSTAEDNQSAVTVHVLQGEREQARFNKSLAKFDLSGIEPAPRGMPQVEVSFDIDANGILHVSAKDKKTNKEQKVEIKAGSGLSDEEIQRMVADAEANREEDKKFQELVQARNQADGLIHATRTAITEHGSKVGGDVIGKVEAALSDLETAMKGDDKAQIEARTKTLEEAGQSLYAAAAAAEQGGNADAASGNAQASKAADDVVDAEFTEVKDDKK

SEQ ID NO: 11544 - protein, 611 aa, Bacillus cereus ATCC 14579
MSKIIGIDLGTTNSCVAVMEGGEPKVIPNPEGNRTTPSVVAFKNEERQVGEVAKRQAITNPNTIMSVKRHMGTDYKVEVEGKDYTPQEISAIILQNLKASAEAYLGETVTKAVITVPAYFNDAERQATKDAGRIAGLEVERIINEPTAAALAYGLEKQDEEQKILVYDLGGGTFDVSILELADGTFEVISTAGDNRLGGDDFDQVIIDHLVAEFKKENNIDLSQDKMALQRLKDAAEKAKKDLSGVTQTQISLPFISAGAAGPLHLELTLTRAKFEELSAGLVERTLEPTRRALKDAGFAPSELDKVILVGGSTRIPAVQEAIKRETGKEPYKGVNPDEVVALGAAVQGGVLTGDVEGVLLLDVTPLSLGIETMGGVFTKLIERNTTIPTSKSQVFSTAADNQPAVDIHVLQGERPMSADNKTLGRFQLTDLPPAPRGIPQIEVTFDIDANGIVNVRAKDLGTSKEQAITIQSSSGLSDEEVERMVQEAEANADADQKRKEEVELRNEADQLVFQTDKVVKDLEGKVDAAEVAKATEAKEALQAAIEKNELEEIRAKKDALQEIVQQLTVKLYEQAQAAAGQAEGAQGAQDAGAKKDNVVDAEFEEVKEDK

SEQ ID NO: 11545 - protein, 195 aa, Rhodospirillum rubrum ATCC 11170
MEQASKGSGGGDWLIRGVFSLGLALASFGGPASAQAAGAHDYSFPAIDGGTLPLAAWAGHPVLVVNTASECGFTAQYEGLEALWKAYRAKGLIVLGVPSNDFGGQEPGSAAEIKDFCESTFAVDFPLTDKTAVSGARAHPFYAWAKASRPDLSAPRWNFHKYLIAPDGSLAASFSALTDPKDRDLTDAIDKLLEK

SEQ ID NO: 11546 - protein, 560 aa, Pneumocystis carinii
MEHSFYERKGNEQLTSWGLLILMVLLIMALWVSYYLQDKRVRSMHETVISILLGMIVGVLIKEIKNTDIQKIVTFNYGYFFNLLLPPIILNSGYELHQELFFKNAGAIFTFAFVGTFVSAVITGLLIYLWALTGLEQIGISWIEALKFGATISATDPVTILSIFRTYNVDPTLYTIIFGESLLNDSVSIVMFETLQRFYNKEMSIIDVFIGIGRFFIIFIISLTIGIIAGISIALLLKYSHLRRFPYIESCIITLIAYSSYLFSNGCHMSGIVSLLFCAITLKHYAFYNMSIQTQFSTKFLFKILSQLSENFIFVYLGISLFTQENLVYKPLLILVTMLFVCIARYISIFSISKLINMIIESYNIVFYEKLPTSYQFMLFWSGLRGAVGVALIQALEGKEANTFKATILVVVVLTVIIFGGTTPQMLEITGIRMGITNYQDDYHMESFYNENPSLEETIYDRFQYRKSGQLDSFNVLYPFWIGSSETQGNEEDNTNRESFDSNLFFPTVTEPAKLEDISYTSYEMTNEDISTDKDKLSTSNNHIKWFKNFDSKVLMPFRC

SEQ ID NO: 11547 - protein, 272 aa, Arabidopsis thaliana
MQSKPGRENEEEVNNHHAVQQPMMYAEPWWKNNSFGVVPQARPSGIPSNSSSLDCPNGSESNDVHSASEDGALNGENDGTWKDSQAATSSRSVDNHGMEGNDPALSIRNMHDQPLVQPPELVGHYIACVPNPYQDPYYGGLMGAYGHQQLGFRPYLGMPRERTALPLDMAQEPVYVNAKQYEGILRRRKARAKAELERKVIRDRKPYLHESRHKHAMRRARASGGRFAKKSEVEAGEDAGGRDRERGSATNSSGSEQVETDSNETLNSSGAP

SEQ ID NO: 11548 - protein, 258 aa, Trichodesmium erythraeum IMS101
FGPEAEFFVFEDARFDQTENKAYYYVDSIEGRWNSGREEDGGNKAYKPDYKGGYFPVPPTDTMQDLRTEMLLTMAKCGVPIEKHHHEVATGGQNELGFRFGKLVEAADNLMIYKYVIKNVGRKYGKTITFMPKPIFNDNGSGMHVHQSIWKDGEPLFWGDGYANLSKMALHYIGGILKHAPAILGFSNPSTNSYKRLVPGFEAPVNLAYSQGNRSASVRIPLTGTNPKAERLEFRCPDATCNPYLAFAAMLCAGIDGI

SEQ ID NO: 11549 - protein, 499 aa, Dechloromonas aromatica RCB
MRHALLFSVFVIASCGLAYELIAGALSSYLLGDSVTQFSTVIGTYLFAMGAGSWLSKYITRDLIGRFIQIELMVGLLGGFSAVGLFLVFTWLSAPFKLVLYLAVFGVGVLVGLEIPLVMRILKRELAFKDLVSQVLTFDYLGALAVSILFPLVLAPQLGMVRTGLLFGVLNVAVALWALHLFREQLPSRRWLAMQSWGVFGLLAIGFAGAGQLTTFAEAHLYADEIVHAETTPYQRIVVTRWRDDLRLFLNNNLQFSSHDEYRYHEALVHPGLASLPGAKRVLVLGGGDGLAVREILKYPNVESVTLVDLDPAMTDLFATAPALVALNQGALKSERVTVVNADALQWLEDSKEYFDFIVIDFPDPANFALGKLYTSAFYRLIEKRLSARGLLVVQSTSPLYARQSFWCVVATLESAGFKTAPYHALVPSFGEWGYIIAGRQAFSMPAFASDKTRFLTSETLAGMFNFPADMARVPAEVNQLNNQVLVRYFETEWRKVIR

SEQ ID NO: 11550 - protein, 441 aa, Methylococcus capsulatus str. Bath
MVKVTGMRALKIGLLVGVVSAASWAEDKPTSAGAVNIPFEGLKTFSEVYGRIQQDYVEPVPDDKLLEDAIRGMLSGLDPHSTYLDQEQYNELKVGTTGQFGGLGIEVGMENGFVKVIAPIDDTPAFHAGIKAGDLIIRLDDKPVKGMSLNDAVKMMRGEPGSPIVLTVVREGVEQPLKITITRDIIKIKSVKSRILEDGYGYLRITSFQSKTGDNVIEAIDEMKKKGALKGLVLDLRNNPGGVLNAAVAVSDAFLESGLIVYTDGRVEDAKMRFSATPNDVIGGAPMVVLINGGSASASEIVAGALQDHKRAVIMGEKTFGKGSVQTILPTSNGGAVKLTTARYYTPSGRSIQAEGITPDVPISRVKLEMAAKSEFAPIKEADLTGHLSNDKAKKGGEAKDAKDKESDKVDDTLALQDYPLNEALNLLKGINIVHKNGVKN

SEQ ID NO: 11551 - protein, 209 aa, Brassica napus
MGKKCDLCEGVARMYCDSDQASLCWDCDGKVHGANFLVAKHTRCLLCSACQSPTPWKAAGLRLGPTFSVCDSCVALKTAAGGRDGVSSTERILTENPGQKINGFDNDDGDGAESYDDDEDEDEDEEYSDEDENEEDEAENQVVPWAAAAAAQPPFVMSSSSADGGGGGPVAKRTRDCSDVRICLFLVQFCLNNLKFFPFWFFLIMFFFF

SEQ ID NO: 11552 - protein, 208 aa, Brassica napus
MTEESPEEDHKSPEGAETNLGSSSLKNNNINNKEQDRFLPIANVGRIMKKVLPGNGKISKDAKETVQECVSEFISFVTGEASDKCQREKRKTINGDDIIWAITTLGFEDYVAPLKIYLGKYRETEGEKVNSPKQRHQQQQPQHNHHFQFQEQDHNNISCTSYISQHHPSPFLPADHQPFPNLPFSPKSLQNQFPQQNDNTDSMGQWSV

SEQ ID NO: 11553 - protein, 107 aa, Escherichia coli
DPAANPYLCFAALLMAGLDGIKNKIHPGEAMDKNLYDLPPEEAKEIPQVAGSLEEALNELDLDREFLKAGGVFTDEAIDAYIALRREEDDRVRMTPHPVEFELYYSV

SEQ ID NO: 11554 - protein, 1310 aa, Arabidopsis thaliana
MFEKNGRTLLAKRKTQGTIKTRASKKIRKMEGTLERHSLLQFGQLSKISFENRPSSNVASSAFQGLLDSDSSELRNQLGSADSDANCGEKDFILSQDFFCTPDYITPDNQNLMSGLDISKDHSPCPRSPVKLNTVKSKRCRQESFTGNHSNSTWSSKHRVDEQENDDIDTDEVMGDKLQANQTERTGYVSQAAVALRCRAMPPPCLKNPYVLNQSETATDPFGHQRSKCASFLPVSTSGDGLSRYLTDFHEIRQIGAGHFSRVFKVLKRMDGCLYAVKHSTRKLYLDSERRKAMMEVQALAALGFHENIVGYYSSWFENEQLYIQLELCDHSLSALPKKSSLKVSEREILVIMHQIAKALHFVHEKGIAHLDVKPDNIYIKNGVCKLGDFGCATRLDKSLPVEEGDARYMPQEILNEDYEHLDKVDIFSLGVTVYELIKGSPLTESRNQSLNIKEGKLPLLPGHSLQLQQLLKTMMDRDPKRRPSARELLDHPMFDRIRGFKTPTSRFSELFQIPVKSDSSNTLGTFCLSLISSVFVTVSQYLLEGYVPFLYERFRNLVHLIMAKKDSVLEAGWSVMEAGVAKLQKILEEVPDEPPFDPVQRMQLYTTVHNLCTQKPPNDYSQQIYDRYGGVYVDYNKQTVLPAIREKHGEYMLRELVKRWANQKILVRWLSHFFEYLDRFYTRRGSHPTLSAVGFISFRDLVYQELQSKAKDAVLALIHKEREGEQIDRALLKNVIDVYCGNGMGELVKYEEDFESFLLEDSASYYSRNASRWNQENSCPDYMIKAEESLRLEKERVTNYLHSTTEPKLVAKVQNELLVVVAKQLIENEHSGCRALLRDDKMDDLARMYRLYHPIPQGLDPVADLFKQHITVEGSALIKQATEAATDKNYVLPQAASTSGLKVQDQVLIRQLIDLHDKFMVYVDECFQKHSLFHKALKEAFEVFCNKTVAGVSSAEILATYCDNILKTGGGIEKLENEDLELTLEKVVKLLVYISDKDLFAEFFRKKQARRLLFDRNGNDYHERSLLTKFKELLGAQFTSKMEGMLTDMTLAKEHQTNFVEFLSVNKTKKLGMDFTVTVLTTGFWPSYKTTDLNLPIEMVNCVEAFKAYYGTKTNSRRLSWIYSLGTCQLAGKFDKKTIEIVVTTYQAAVLLLFNNTERLSYTEILEQLNLGHEDLARLLHSLSCLKYKILIKEPMSRNISNTDTFEFNSKFTDKMRRIRVPLPPMDERKKIVEDVDKDRRYAIDAALVRIMKSRKVLGHQQLVSECVEHLSKMFKPDIKMIKKRIEDLISRDYLERDTDNPNTFKYLA

SEQ ID NO: 11555 - protein, 145 aa, Casuarina glauca
EALLKQSWEVLKQNIPGHSLCLFALIIEAAPESKYVFSFLKDSNEIPENNPKLKAHAAVIFKTICESATELRQKGQAVWDNNTLKRLGSIHLKNKITDPHFEVMKGALLGTIKEAVKENWSDEMCCAWTEAYNQLVATIKAEMKE

SEQ ID NO: 11556 - protein, 469 aa, Burkholderia cenocepacia J2315
MPAAPPPSPCPPDWEPQICELKAAVDVLKQQHLTDVDIGALLDAATHDGIKTLPYARFFNAKEEQERRDDERRARDGTPGIGIVFETRPDGLHIIDVVPDAPAEKAGVRPDDLVVAMNDRSVVGIDGGELMKLAKGDAGVPLKLTVQRGPKHAVLTFAPVRAIVKPRPATVKRLDGDILYTRLSSFPEPAVGDYIDAVQAARRAGPPVKQMILDLRINGGGALNAAIGITALFAGRDRTAMVTVERGDTHRRRYTTNWPDYELPVMHGQDPLAPLQADDWWRTVPLVVLVDGQSASAAEATAAALKDLGRAKLLGMPTYGKGLAQTGVDLIDGTRLNFTFARNLRPNGCPMDGYGVVPDWLVPPRRDADVDGVLLWYREVDLARAPYADRQAPDPFAQVRKARQKLRDERVRAKVDTARSAALPQRAFGTAADWQLRQALDALAGRPVQTIAAPAQLMPAQPVCERGGN

SEQ ID NO: 11557 - protein, 469 aa, Shewanella sp. MR-4
MSVESVLKQLEELEVKFVDLRFTDTKGKEQHVSIPAHQVDADFFEDGKMFDGSSIAGWKGINESDMVLMPDPTTFVLDPFTEETTALIRCDILEPGTMTGYDRDPRSIAKKAEEYLRSTGIADTVLVGPEPEFFLFDDVRFGTDMSGCFVKIDAKEAAWNSGTSYEGGNTGHRPFVKGGYFPVAPVDSSQDLRSAMCLVLEEMGQVVEAHHHEVATAGQNEIATRFNTLTKKADEIQILKYVVHNMAHAYGKTATFMPKPIVGDNGSGMHVHQSLSKDGVNLFAGDKYAGLSETALYYIGGIIKHARALNAFTNPSTNSYKRLVPHFEAPVMLAYSARNRSASIRIPVVPSPKGRRIETRFPDPHANPYLGFAALLMAGLDGIQNKIHPGEAMDKDLYDLPAEEAAEIPQVATSLENALENLQADHEFLTRGGVFSEDFIQSYIALKSAEAERVSRTTHPLEFEMYYSL

SEQ ID NO: 11558 - protein, 146 aa, Pisum sativum
MGFTDKQEALVNSSWELFKQNPGYSVLFYNIILKKAPATKGMFSFLKDSAGVVDSPKLQAHAEKVFGMVHDSAVQLRVSGEVVLGDATLGAIHIQKGVVDSHFVVVKEALLETIKEASGEKWSEELSTAWEVAYEGLASAIKKAMS

SEQ ID NO: 11559 - protein, 214 aa, Zingiber officinale
GSVAQQVDGDNPNLYFRKEGVLLCVLPLFHIYSLNSVLLCGLRVGAAILLMRRFEISAMLELVQLHRVTVAPFVPPIVLEFVKSSLVDGYDLSSIRIVMSGAAPMGKELEDKFMGKLPNATLSQVDTSLIECMQNPSPCSDLLMNNVGLNRGTGYRKQGRCWRLCLAFAREPFPVKSGACGTVVRNAELKIVDPDTGRPLGRNKSGEICIRGRH

SEQ ID NO: 11560 - protein, 146 aa, Pisum sativum
MGFTEKQEALVNSSWELFKQNPSYSVLFYTIILKKAPAAKGMFSFLKDSAEVVDSPKLQAHAEKVFGMVHDSAIQLRASGEVVVGDATLGAIHIQKGVVDPHFVVVKEALLETIKEASGEKWSEELSTAWEVAYEGLASAIKKAMN

SEQ ID NO: 11561 - protein, 423 aa, Oryza sativa Japonica Group; identical to SEQ ID NO: 11393

SEQ ID NO: 11562 - protein, 647 aa, Oryza sativa Japonica Group
MALKESLDPAGRVLGSWARSGEPCGGSFVGVTCDSGGRVTAISLQGRGLSGTLPPAIAGLRRLTGLYLHYNGIKGAIPREIGSLSELTDLYLDVNHLTGPLPVEIAAMENLQVLQLGYNQLTGSIPPQLGKLNKLAVLALQSNQLTGAIPATLGDLTQLARLDLSFNSLFGSIPSKIAEVPLLEVFDVRNNSLSGSVPAGLRRLNGGFQYVNNKGLCGVGFSLLDLCLSSEDGLKPSKPEPFGPDGTVKTRQVPQSANTDNHCEGSGCSKSSNASVGVLVVGVVAVVIGAAFCGIFAFSYYRRQKQKIGSSLEVSDSRLSTDHYQQKEVCRRSASPLISVEYSNGWDPLSGGGVGSSGEVGDSFRFNLEEVECATQYFSEVNLLGKSGFAATYKGILRDGSVVAVKSLNKTSCKQEESDFLRGLKMLTVLRHENLVGLRGFCCSRGRGECFLVYDYMVNGCLSQYLDVKEGSGANVLDWPTRVSIIRGIAKGVEYMHSKKANKPSVVHQNISAEKILLDHHLTPRLSVPGLHKLLADDVVFSTLKASAAMGYLAPEYATTGRFTEKSDVFAFGIVVLQVITGRRAVSQLKVSTVANDLDSLIDENLNGVFSRTEAAKLAAIAALCTSETASQRPTMEAVVQQLSNCH

SEQ ID NO: 11563 - protein, 188 aa, Carmichaelia sp. 'Lavin 6201'
YDRVMAYKFHEDDHGEVVSEIRRSDLEPYLGLHYPSTDIPQAARFLFKQNRVRMICDCHAKPVKVIQSEELRQPLCLVNSTLRSPHDCHTQYMANMGSIASLVMAVIVNGNDSTRLWGLLVCHHSSPRYVPFPVRYACEFLMQAFGLQLYMEIQLASQMAEKRILKTQTLLCDMLLRDAPFGIVTQSQ

SEQ ID NO: 11564 - protein, 70 aa, Glycine max
  misc_feature (39)..(39): Xaa can be any naturally occurring amino acid
  misc_feature (50)..(50): Xaa can be any naturally occurring amino acid
DYSLGIGFQSSTYGILMMLCGVLQLTKLHACAYQKLSTXMPLCSIANPKXVLVIDIGDGGVIKKYTPIFN

SEQ ID NO: 11565 - protein, 151 aa, Cryptococcus neoformans var. neoformans JEC21
MSDIYSYSVEFPKSTLPLSDLKGKTLLFVNVASKCGLTPQYKDLQALHEKYGDKGLAIIGFPCNQFKAQEPGTDDEVLQFCQVNYGVTFPIAKKGDVNGENTQPIWKYLKENAEPPVSDIDWNFSKFLVKDGKITWFPARSTKVSDVEAAL

SEQ ID NO: 11566 - protein, 157 aa, Glycine max
MQPTSGGGGLARFRSAPASWLESVLLKEEEEEEDPLSFTQLLSTIDDAPSHSQHQLYGAALSNKDKTPEIFMLEDSVPCRVRAKRGCATHPRSIAERVRRTRISDRIRKLQELVPNMDKQTNTADMLDEAVAYVKFLQKQIEELSEHQRRCKCVVQE

SEQ ID NO: 11567 - protein, 127 aa, Oryza sativa
  misc_feature (69)..(69): Xaa can be any naturally occurring amino acid
  misc_feature (89)..(89): Xaa can be any naturally occurring amino acid
  misc_feature (102)..(102): Xaa can be any naturally occurring amino acid
GEGWHVGEGIFVINGDTSMEDGQLAMDQFNGSADAKVLFGSIKAFGEGISLVGASRVGGVDVHLNPSVXRQAIGSTFRPGQNKKVFVSXLVAAASPEEMAHXTAFSLEVLPLLWFLWRGLCSSFFFL

SEQ ID NO: 11568 - protein, 97 aa, Brassica napus
MASSMLSSAAVVTSPAQATMVAPFTGLKSSSAFPVTRKANNDITSIASNGGRVSCMKVWPPVGKKKFETLSYLPDLTEVELGKEVDYLLRNKWIPCG

SEQ ID NO: 11569 - protein, 476 aa, Campylobacter jejuni RM1221
MGKFVNNIDDFFKFCKQNEVLFVDFRFTDMIGTWHHITYNLHAINEETFQTGIPFDGSSIHGWQPIEKSDMILKPDAQSAFLDPFTADPTIIVFCDVYDIYKGQMYEKCPRSIAKKAMEHLKNSGIADTAYFGPENEFFVFDSVKIVDTAHCSKYEVDTEEGEWNDDREFTDSYNTGHRPRNKGGYFPVQPIDSLVDIRSEMVQTLEKVGLKTFVHHHEVAQGQAEIGVNFGTLVEAADNVQIYKYVVKMVAHLNGKTATFMPKPLYGDNGNGMHVHMSLWKNGVNLFYDKDGYSGLSQTAINYIGGILKNARSVAAFTNPSSNSYKRIVPGFEAPCILTYSCQNRSASCRVPYGIGKNSARIEIRFPDSTANPYLAFVSLLMAGLDGIKNKTIPVGPMDENLFDLTLDEIREKGIEQLPHTLRGSLEALIRHNSYLKPVMSDIFIDDYQHLKFETQVWPVEARPTAYEFKTCYSC

SEQ ID NO: 11570 - protein, 680 aa, Staphylococcus aureus subsp. aureus Mu50
MEIFETILIFIAVVILSSFVHTFIPKVPLAFIQIFLGMLLFITPIPVQFNFDSELFMVTMIAPLLFVEGVNVSRVHLRKYIKPVMMMALGLVITTVIGVGLFIHWIWPDLPIGAAFAIAAILCPTDAVAVQAITKGKVLPKGAMTILEGESLLNDAAGIISFKIAVGVLVTGAFSLVDAVQLFLIASIGGAVVGLLIGMALVRFRLTLMRRGYENINMFTIIQLLTPFVTYLIAELFHASGIIAAVVAGLVHGFERDRIMQVRTQLQMSYNHTWNILGYVLNGFVFSILGFLVPEVIIKIIKTEPHNLIFLIGITIVVALAVYLFRFVWVYVLYPYFYLAISPFQKMMTKNDDDNPTTEKPPKRSLYALIMTLCGVHGTISLAIALTLPYFLAGHHAFTYRNDLLFIASGMVIISLVVAQVLLPLLTKPAPKTVIGNMSFKVARIYILEQVIDYLNQKSTFETSFKYGNVIKEYHDKLAFLKTVEKDDENSKELERLQKIAFNVETKTLESLVDEGQITNSVLENYMRYAERTQVYRQASLIRRMIVLLRGALLKRRVQTRVNSASSLSVTDNLMELNKINKLVHYNVVSRLSKETTKDNTLEIGMVCDGYLMRIENLTPSNFFNSASEDTITKIKLNALREQRRILRELIDTDEVSEGTALKLREAINYDEMVIVDSMT

SEQ ID NO: 11571 - protein, 1097 aa, Vitis vinifera
MDCNASEDDGNIRKIRSVSGFDSLESDSLHAFRQCNNDPDAALNFDRDAPPVTVKRTITSTGARILTQIKQEKSDEVEGAEFLHGLKTKIKVKEEPDLNVDGIFEKEVGSNPPQVDRTWALVPHKEIMKMSFDEFLRATDAHVERKDLERSEEAQGHHGLKDKIKVKEELDVGLLGSDSIRSLVKRPPDGFLESYDDFVKPKRTKDEHRKENSQWHPGLKEKIQIKEELDATLLGTDSARNENSGMRGDSFVQSRNGKVISDGNGRNTQSVPYHNPQKPFNVKKETAQFLPYGNPQKNFNVKQGKIEDRPVTSVLVEDGDFPEEPDWFLVGRTPIIGLSTTKGRKLVDNEIVHFSFPSADLRNKCNSKWVAKAASAASAIVRFSTKRSGEIGRLPMEWTKCIIPLVNSSKVKVLGRCVAAPIILRLMQEIVLYVSFYIHQSVFTEGNKSSWRLDAAPNIDSTVYPLPTLFKLLQIKPFQEAEFTPEELDSRKRKLNLEVHMGDTDEAPSMLPIVKQKKGCQQYPEQNNDEQALSESSLNKLVGAADQYNLEEMESPSTLMCDLRPYQKQALYWMSELEKGSDAEQAPKTLHPCWAAYQICDEYAFISFLRASAIYVNIFSGEATTQLPTAIHMARGGILADAMGLGKTVMTIALILARPGRRSSGGTLIVCPMALLSQWKDELETHSKPESISIFIHYGGDRTNDPKVISEHDVVLTTYGVLTSAYKNVRITDENSSIFHRVEWYRVVLDEAHTIKSSKTLSAQAAFALPSHCRWCLTGTPLQNNLEDLYSLLCFLHVEPWCNWAWWYKLIQKPYECGDQRGLRLIKAILRPLMLRRTKDTKDKEGRPILVLPPTDIQVIECEQSEAEHDFYDALFKRSKVRFDQFVEQGRVLHNYASILELLLRLRQCCNHPFLVMRIDVEKNWKESSKISELLHCLERISQSRIGEKSIVFSQWTSFLDLLEIPLRRRGIGFLRYDGKVVQKQRERILKEFSETEEKTVLLMSLKAGGVGLNLTAASNVFLMDPWWNPAVEEQAIMRIHRIGQERTVRVRRFIVKDTVEERMQQVQARKQRMITGALTDEEVRTARIEELKMLFR

SEQ ID NO: 11572 - protein, 651 aa, Thellungiella halophila
MSGKGEGPAIGIDLGTTYSCVGVWQHDRVEIIANDQGNRTTPSYVAFTDSERLIGDAAKNQVAMNPINTVFDAKRLIGRRFSDSSVQSDMKLWPFKIIPGPADKPMIIVNYKGEEKQFAAEEISSMVLIKMREIAEAYLGVSIKNAVVTVPAYFNDSQRQATKDAGVIAGLNVMRIINEPTAAAIAYGLDKKATSVGEKNVLIFDLGGGTFDVSLLTIEEGIFEVKATAGDTHLGGEDFDNRMVNHFVQEFKRKSKKDITGNPRALRRLRTACERAKRTLSSTAQTTIEIDSLYEGIDFYSTITRARFEELNMDLFRKCMEPVEKCLRDAKMDKSTVHDVVLVGGSTRIPKVQQLLQDFFNGKELCKSINPDEAVAYGAAVQGAILSGEGNEKVQDLLLLDVTPLSLGLETAGGVMTTLIPRNTTIPSQKEQVFLTYSDDQPGVLIQVYEERGQEPRTTTLLGKFELSGIPPAPRGVPQITVCFDIDANGILNVSAEDKTTGQKNKITITNDKGRLSKDEIEKMVQEAEKYKSEDEEHKKKVEAKNALENYAYNMRNTIQDEKIGEKLPAANKKKIEDSIEQAIQWLEGNQLAEADEFEAKMKELESICNPIIAKIVQGAGGEAGGPGAAGMDDDAPPFSGGAGPKIEEVD

SEQ ID NO: 11573 - protein, 823 aa, Coprinopsis cinerea okayama7#130
MLRRPPTTSDGKVVDRLSESTRVNKPFKPPTVAKPVERVQPQRKRKRVSYAGQQNEDSDSDDDGNSKKKKKSDGGKDKDGIYHNEDELWAMHKKYPVYKPKPFDQITRRFSLPTMRSKDGSIVPLVPTGASLGTRPPAKIIPRPLHDPMEDHAIVLYDPTIDDRETDEERQERLKQEAKEKAEQEAKEKTAGLYNPHKSLKKLLGETEKDKAKVDKVPVVIDPRLSKVLRPHQVEGVKFLYRCTTGMVEENQYGCIMADEMGLGKTLQCIALMWTLLKQSPHPGRPTIEKCIIACPSSLVKNWANELTKWLGKDTVTPLAIDGKGGKAELLEKVARWVAARGRNVTQPVMIVSYETLRTLTVYLAGCKIGLLLCDEGHRLKNSESLTFQALNSLDVNRRVILTGTPIQNDLSEYFSLLNFANPNFLGSKNDFRKNFENAIIRGRDSDASDAVKAASEAKLKELGGLVMKFIIRRTNDLLSKYLPVKYEQVVFCGLSDFQLALYRLFITSPEIKALLRGTESQPLKAINILKKLCNHPELLDLPKDLKGSDHLIPEGFVGAGQQQQGRGAGRNVGVRCDWSGKFLVLERFLHQIHTQTNDKIVLISNYTQTLDLFEKLLRSKKYGYFRLDGTMSITKRQKLVDQFNDPNGKEFIFLLSSKAGGCGINLIGANRLILFDPDWNPAADQQALARVWRDGQKKECFVYRFISTGTIEEKIFQRQASKQALSSAVVDEKEDTERHFSLDSLRQLFTFNEKTLCDTHETFKCKRCKDGKQMVKSPALLYGDASTWNHFTNPELKNNHDDLLRAEVGLPEVSFVFQYISH

SEQ ID NO: 11574 - protein, 818 aa, Coccidioides immitis RS
MSISRFASRLSRKLAYLKSRIPWINTLKFNFIFIHYAYIIGVTIIGSVYLYPGGNLTYTDALFLAAGSSTQSGLNTIDLDRLPTYQQVGLWLGSMIANPIVIHSSVVFIRLRWFEKRFQHVVQEAKMMRRTRTRTRSRAPSAGSAGSDMNRLEMGVRARKITVLRDNEGQALGHFIEPKSKSQEANSIADSSGASNGGDAQMGPENDSDRSKTTEVPAGISTDSHIRSPMEHGSDHYITFIENQRRPTQALRIPSPREFDRGGVPETIDDFGDEPSRSRTVQSDQEPEISPLKQQRSRGQHITIDEPNIARSRRATTFPRTADVGEPAPDHRRKQRRGTLASILFFGTRDEAREAPYLSWQPTLGRNSAFVDLTEEQKNELGGIEYRALKALAYVLIAYFVFFHVLGIVSLVPWILHTRWGIFPIRAAVGRPWWAVFIAGSAFNNQGFSLTPNSLASFYDAIFPLLLMTFLIIIGNTGFPCMLRFIIWFFWKIFPKRTAVWEEFHFLLDHPRRCFTLLFPSSATWLLFWVLVVLNVIDLVLFIILDLNNPAVTSIPGGLRFVDALFQAAATRTAGLSIISLSELHPGVQVSYMIMMYISIYPIAISLRKTNVYEEKSLGIYYGDEEDELISDKHPSYVVAHLRRQLGFDIWYIFLGLFIISIVEGSRVANDPQFTMFGILFEVVSAYGTVGLSQGYPGTNTSLSAQFKVISKLVIIAMMIRGRHRGLPYQLDRAILLPSEALHEKELRDATMRMRRRGSTISAMAGTARCASRASRDGYGTSTGWQQGPSGSPWTLGSRSPQANTNARLPIHHEERSS

SEQ ID NO: 11575 - protein, 149 aa, Canavalia lineata
MGAFSEKQESLVKSSWEAFKQNVPHHSAVFYTLILEKAPAAQNMFSFLSNGVDPNNPKLKAHAEKVFKMTVDSAVQLRAKGEVVLADPTLGSVHVQKGVLDPHFLVVKEALLKTFKEAVGDKWNDELGNAWEVAYDELAAAIKKAMGSA

SEQ ID NO: 11576 - protein, 682 aa, Shigella flexneri 2a str. 301
MNMFFRLTALAGLLAIAGQTFAVEDITRADQIPVLKEETQHATVSERVTSRFTRSHYRQFDLDQAFSAKIFDRYLNLLDYSHNVLLASDVEQFAKKKTELGDELRSGKLDVFYDLYNLAQKRRFERYQYALSVLEKPMDFTGNDTYNLDRSKAPWPKNEAELNAQWDSKVKFDELSLKLTGKTDKEIRETLTRRYKFAIRRLAQTNSEDVFSLAMTAFAREIDPHTNYLSRRNTEQFNTEMSLSLEGIGAVLQMDDDYTVINSMVAGGPAAKSKAISVGAKIVGVGQTGKPMVDVIGWRLDDVVALIKGPKGSKVRLEILPAGKGTKTRTVTLTRERIRLEDRAVKMSVKTVGKEKVGVLDIPGFYVGLTDDVKVQLQKLEKQNVSSVIIDLRSNGGGALTEAVSLSGLFIPAGPIVQVRDNNGKVREDSDTDGQVFYKGPLVVLVDRFSASASEIFAAAMQDYGRALVVGEPTFGKGTVQQYRSLNRIYDQMLRPEWPALGSVQYTIQKFYRVNGGSTQRKGVTPDIIMPTGNEETETGEKFEDNALPWDSIDAATYVKSGDLTAFEPELLKEHNARIAKDPEFQNIMKDIARFNAMKDKRNIVSLNYAVREKENNEDDATRLARLNERFKREGKPELKKLDDLSKDYQEPDPYLDETVNIALDLAKLEKARPAEQPAPVK

SEQ ID NO: 11577 - protein, 146 aa, Pisum sativum
MGFTEKQEALVNSSWELFKQNPSYSVLFYTIILKKAPAAKGMFSFLKDSAEVVDSPKLQAHAEKVFGMVHDSAIQLRASGEVVLGDATLGAIHIQKGVVDPHFVVVKEALLETIKEASGEKWSEELSTAWEVAYEGLASAIKKAMN

SEQ ID NO: 11578 - protein, 161 aa, Bacillus cereus ATCC 10987
MTVYDFSAKTITGEEKSLKDYEGKALLIVNVASKCGFTPQYKGLQEVYDKYKEQGLEILGFPCNQFGGQEPGTEADITSFCELNYGVNFPMFAKIDVKGDKAHPLYTYMTEQAPGLLGMKAVKWNFTKFLIGKDGKVVGRFAPQTKPVDLEVEIEKVLGNN

SEQ ID NO: 11579 - protein, 178 aa, Clostridium perfringens str. 13
MLYDFKVKDIEGNEVSLGEYKGKVLLIVNTATGCGFTPQYEGLEVLYKKYHDKGFEILDFPCNQFFEQAPGSNEEIVGFCKLNYGTTFKTFAKVEVNGENACELYKFLKKEAPMAKEDETSLGFYDKLKGLGFTTEGEEIKWNFTKFLIDKNGEVVARFAPTFEPEKLDELIEELLEE

SEQ ID NO: 11580 - protein, 146 aa, Pisum sativum
MGFTEKQEALVNSSWELFKQNPSYSVLFYTIILKKAPAAKGMFSFLKDSAEVVDSPKLQAHAEKVFGMVHDSAIQLRASGEVVLGDVTLGAIHIQKGVIDPHFVVVKEALLDTIKEASGEKWSEELSTAWEIAYEGLASAIKKAMN

SEQ ID NO: 11581 - protein, 161 aa, Glycine max
MTTTLERGFSEEQEALVVKSWNVMKKNSGELGLKFFLKIFEIAPSAQKLFSFLRDSTVPLEQNPKLKPHAVSVFVMTCDSAVQLRKAGKVTVRESNLKKLGATHFRTGVANEHFEVTKFALLETIKEAVPEMWSPAMKNAWGEAYDQLVDAIKSEMKPPSS

SEQ ID NO: 11582 - protein, 110 aa, Salmonella enterica
MSLAKNGTNLFSGDKYAGLSEQALYYIGGVIKHAKAINALANPTTNSYKRLVPGYEAPVMLAYSARNRSASIRIPVVASPKARRIEVRFPDPAANPYMCFAALLMAGLDG

SEQ ID NO: 11583 - protein, 557 aa, Magnaporthe grisea 70-15
MPFNSPYEPIQVPETDIWNLCFSRRSKAFLDGKTVYTDGATGDRLDWGGLRSASIEFGKGLKALWGWRRGEVMAFFAPNGIDTPVVTMGLLWAGGVASPANPLYTADELAFQLRDSGARALVTQVQHLDVAVRAAAAAGIADDRIILVGAHMSDGAGGSRFKHYSSIRSTFYCSKYAQTLVEPRKDLAFLVYSSGTTGLPKGVCLSHYNMVANLMQVAQTEGHYLQPVGGLDGQGDRMLGVTPFFHVYGLLSCVLSSAYFGWELVIMSRFDMEQACALIEKHRITYIYVPPPIVLAFAKSPICDRYDLSSLKMLHSGAAPLTRELTEELWNRLKLPVKQGYGLSETSPVVSVQAPDEWAKFMGSVGKLVPNMTAKLVAADGQEVPEGDEMAEGELWVKGPQLFLGYLNNPDKTRETMSEDGYFKTGDVFRKDRFGNLYCVDRLKELIKYKGFQVAPAELEGLLLGHPEVADVGVVGVQDDELASEVPRAYVVLKDQRAGGEAKAREIVDWMASRVAPHKKLRGGVVLVDAIPKSPSGKILRRVLRDVAKKERRGAKL

SEQ ID NO: 11584 - protein, 140 aa, Salmonella enterica
PKPMFGDNGSGMHCHMSLAKNGTNLFSGDKYAGLSEQALYYIGGVIKHAKAINALANPTTNSYKRLVPGYEAPVMLAYSARNRSASIRIPVVASPKARRIEVRFPDPAANPYLCFAALLMAGLDGIKNKIHPGEAMDKNL

SEQ ID NO: 11585 - protein, 546 aa, Azoarcus sp. BH72
MQSIEVVLAMLLAVVASGYLVRVVPVSLPLPLVQIALGAGIAAISGHGVRLDPEIFFLLFLPPLLFLDGWRIPKVGLFRDKGTILELAFGLVVFTVLGAGLLIHWMIPAMPLAVAFALAAIVSPTDPVAVSSIAARVPIPKRLMHILEGESLLNDASGLVCFRFAVAAVMTGGFSLAAASLTFLWVAFAGLAVGVIVTWVISLAQRWLSRHLGEEAGSPILVNLLIPFGAYLVAEHLDASGILAAVAAGVTMSYVELSGRALATTRVQRAAVWDTVQFSLNGIMFVLLGEQLPGIVQRAAAAVEDSGHVSRWWLLVYALAISAILAALRFAWVWVSLRVTLFKAREAGEPLQRPDWRIVAAVSLAGVRGAITLAGVLTLPLLLPDGRDFPARDLVIFLAAAVILVSLLLASLGLPRLLRGLALPDEPAERREEDRARREAAAAAIAAIEKARHALSEPGAADADLYTNAAVRVMANYQRRLADSAMPGSVAADRLRAADRAEMALWLAALQAEREAIFRLARDYELSDETSRKLVRQIDLMEARYR

SEQ ID NO: 11586 - protein, 117 aa, Salmonella enterica
GSGMHCHMSLAKNGTNLFSGDKYAGLSEQALYYIGGVIKHAKAINALANPTTNSYKRLVPGYEAPVMLAYSARNRSASIRIPVVASPKARRIEVRFPDPAANPYLCFAALLMAGLDG

SEQ ID NO: 11587 - protein, 445 aa, Lactobacillus acidophilus NCFM
MSKQYTAEEIKTEVEDKNVRFLRLCFTDINGTEKAVEVPTSQLDKVLTNDIRFDGSSIDGFVRLEESDMVLYPDFSTWSVLPWGDEHGGKIGRLICSVHTTDGKAFAGDPRNNLKRVIGEMENAGFDAFDIGFEMEFHLFKLDDNGNWTTEVPDHASYFDMTSDDEGARCRREIVETLEDMGFEVEAAHHEVGDGQQEIDFRFDNALATADRCQTFKMVARTIARKHGLFATFMAKPLEGQAGNGMHNNMSLFKGKKNVFYDKDGEFHLSDTALYFLNGILEHARAITAIGNPTVNSYKRLIPGYEAPCYIAWAAKNRSPLVRIPSAGEINTRLEMRSADPTANPYLLLAACLTAGLNGIKEQKMPMKPVEENIFEMTEEERAKKGIKPLPTTLHNAVKAFKEDDLIKSALGDHLTRSFIESKELEWSKYSQSVSDWERQRYMNW

SEQ ID NO: 11588 - protein, 755 aa, Arabidopsis thaliana
MTSIIGAALPYKSPEKAIASSSYSAENDSSPVDAVIFAGTSLVLGTACRYLFNGTRVPYTVVLLVIGIFLGSLEYGTKHNLGKLGHGIRIWNGINPDLLLAVFLPVLLFESSFSMDVHQIKRCMGQMVLLAGPGVLISTFCLGALIKLTFPYNWDWKTSLLLGGLLGATDPVAVVALLKELGASKKMTTLIDGESLMNDGVSVVVFQLFFKMVMGHNSDWGSIIKFLVQNSFGAVGIGLAFGIASVFWLKFIFNDTVAQITVTLSASYFAYYTAQEWAGVSGILTVMILGMFFAAFARTAFKGDSHQSLHHFWEMAAYIANTLVFMLSGVIIAESVLSGQTISYKVLYPLLCRSGYGLDWKESIILTWSGLRAIKWKFISQFRYGNKAVLQFLFLTGGIVFLTLVVNGSTTQLLLHLLRMDTLTATKKRILEYTKFEMMKTALKAFENLGDDEELGSADWPTVIRHISSLKDLEGRQVNPHDGYEAGSLDPTNIMDIRIRFLNGISQCVVNSSHCQTSVVPKVAIDSRLLPVSGVQAAYWEMLDDGRITQCTANVLMQSVDEALDLVSTSSLSDWRGLEPRVHFPNYYKFLQSKIIPHKLVTHLIVERLESACYISSAFLRAHRIARQQLHIFLGNSNIASTVINESEVEGEEAKQFLEDVRDSFPQVLSVLKTRQVTHYVLNHLNGYIKNLEKVGLLEGKEVSHLHDVVQSDLKKLLRHPPSLKLPNVDDLITSNPLLKDRSSFRSLAIGETDA

SEQ ID NO: 11589 - protein, 297 aa, Oryza sativa Japonica Group
MKSRKSYGHLLSPVGSPPLDNESGEAAAAAAAGGGGCGSSAGYVVYGGGGGGDSPAKEQDRFLPIANVSRIMKRSLPANAKISKESKETVQECVSEFISFVTGEASDKCQREKRKTINGDDLLWAMTTLGFEAYVGPLKSYLNRYREAEGEKADVLGGAGGAAAARHGEGGCCGGGGGGADGVVIDGHYPLAGGLSHSHHGHQQQDGGGDVGLMMGGGDAGVGYNAGAGSTTTAFYAPAATAASGNKAYCGGDGSRVMEFEGIGGEEESGGGGGGGERGFAGHLHGVQWFRLKRNTN

SEQ ID NO: 11590 - protein, 140 aa, Salmonella enterica
KPMFGDNGSGMHCHMSLAKNGTNLFSGDKYAGLSEQALYYIGGVIKHAKAINALANPTTNSYKRLVPGYEAPVMLAYSARNRSASIRIPVVASPKARRIEVRFPDPAANPYLCFAALLMAGLDGIKNKIHPGEAMDKNLY

SEQ ID NO: 11591 - protein, 161 aa, Prochlorococcus marinus str. MIT 9313
MSMAINISQIVVRTPEGAEKSLSEYSGTVLLIVNVASRCGFTKQYKGLQALQNTYGPQGLKVLGFPCNDFGAQEPGTLEEIKSFCSTTYGASFELFDKVHAMGKTTEPYTTLNQTEPAGDVAWNFEKFLVGKDGTVLKRFKSGVEPESTELKAAIDQALMA

SEQ ID NO: 11592 - protein, 130 aa, Salmonella enterica
MSLAKNGTNLFSGDKYAGLSEQALYYIGGVIKHAKAINALANPTTNSYKRLVPGYEAPVMLAYSARNRSASIRIPVVASPKARRIEVRFPDPAANPYLCFAALLMAGLDGIKNKIHPGEAMDKNLYDLPP

SEQ ID NO: 11593 - protein, 185 aa, Xanthomonas axonopodis pv. citri str. 306
MLLNRLLALVLTGFFATPAFAAGTPVLDVEYRPLAGKTPINLNRTYGGKVVMVVNTASKCGFTPQYEGLEALNHRFGSRGFTVLGFPSNDFQGQEPGSEKQIQEFCTLTYGVKFPMFEKVHVLGAEATPLYQRLTQATGVAPGWNFHKYLIGRDGRVVAQFPSKIKPDDPSVLAAIERELKAPAR

SEQ ID NO: 11594 - protein, 161 aa, Lactobacillus plantarum WCFS1
MAESVYDFTETEMSGAPLDLSQYRGQVLLIVNTASNCGLAPQFKGLEELYQKYQQEGLVVLGLPSNQFHQEKADDDETHDYCQRHYGVTFPMTKRVMVNGDDADPLFTYLKQAAGHGRIKWNFTKFLIGRDGRVLERYAPTTRPATFEAAIRDALADRSED

SEQ ID NO: 11595 - protein, 662 aa, Physcomitrella patens subsp. patens
MGRHLLLVLGLVLAAGVVGSFGAAEEAAKLGTVIGIDLGTTYSCVGVYKNGHVEIIANDQGNRITPSWVAFTDSERLIGEAAKNQAAVNPERTVFDVKRLIGRKFEDKEVQKDIKLFPYKIINKDGKPHIQVQVKDDEAKVFTPEEISAMVLLKMKETAEAYLGKKIKDAVVTVPAYFNDAQRQATKDAGVIAGLNVARIINEPTAAAIAYGLDKKGGEKNILVFDLGGGTFDVSVLTIDNGVFEVLSTNSDTHLGGEDFDQRIMEYFIKLIKKKYNRDIGNDKKAIGKLRREAERAKRALSNQNQIRVEIESLFDGVDFSEPLTRARFEELNNDLFRKTMGPVKKAMDDAGLKKTDIDEVVLVGGSTRIPKVQQLLKDYFDGKEPNKGVNPDEAVAYGAAVQGGILSGEGGQETKDVILLDVTPLTLGIETAGGVMTKLIPRNTMIPTKKSQVFTTYQDQQTTVSILVFEGERSLTKDCRELGRFELTGVPGAPRGVPQIEVTFEVDANGILNVKAEDKGTGKSEKIVITNDKGRLSQEDIDRMVKEAEEFAEEDKKMKERIDARNSLETYVYNMKNQVGDKLGEKMSVEDKETIETATKEALEWLDENQSAEKEDFAEKLKEVEGICNPIVSKVYQAAGGAGKGGAVEEGESDNESHEDL

SEQ ID NO: 11596 - protein, 469 aa, Vibrio salmonicida LFI1238
MSVENVFALIQENEVKFIDLRFTDTKGKEQHISIPSHQVDADFFEDGKMFDGSSVAGWKGINESDMVMMPDAASAVLDPFTADATLNIRCDILEPTTMQGYDRDPRSIAKRSEDYLRSTGLADTVLVGPEPEFFLFDDVRFSTDMSGSFFKIDDIEAAWNSGTEYEGGNKGHRPGVKGGYFPVAPVDSSQDIRSAMCLIMEEMGLVVEAHHHEVATAGQNEIATRFNTLTNKADETQIYKYVVHNVAHAYGKTATFMPKPLVGDNGSGMHVHMSLNKDGQNLFAGDKYGGLSEMAIFFIGGIIKHARAINAFANPTTNSYKRLVPGFEAPVMLAYSARNRSASIRIPVVPSPKARRIEVRFGDPAANPYLSYSAMLMAGLDGIKNKIHPGEAMDKDLYDLPAEEAAEIPKVAESLDIALQALDSDREFLTAGGVFSSDFIDSYITLKSQDVAAINTAVHPLEFEMYYSV

SEQ ID NO: 11597 - protein, 764 aa, Arabidopsis arenosa
MVSLRSKKITPASEMVSDGKTEKDASGDSPTSVLNEEENCEEKSVTVVEEEILLAKNGDSSLISEAMAQEEEKLLKIREDEEKANNAGSAVAPDLNESQFTKLDELLTQTQLYSEFLLEKMEDITINGIEGESQKAEPEKTGRGRKRKAASQYNNTKAKRAVAAMISRSKEDGDTTNSDLTEEERVMKELSELCPLLTGGQLKSYQLKGVKWLISLWQNGLNGILVDQMGLGKTIQTIGFLSHLKGNGLDGPYLVIAPLSTLSNWFNEIARFTPSINAIIYHGDKKQRDELRRKHMPKTVGPKFPIVITSYEVAMNDAKRNLRHYPWKYVVIDEGHRLKNHKCKLLRELKHLKMDNKLLLTGTPLQNNLSELWSLLNFILPDIFTSHDEFESWFDFSEKNKNEATKEEEEKRRARVVSKLHGILRPFILRRMKCDVELSLPRKKEIIMYATMTDHQKKFQDHLVNHTLEAHLGENAIRGQGWKGKLNNLMIQLRKNCNHPDLLQGQIDGSYLYPPVEEIVGQCGKFRLLERLLVRLFANNHKVLIFSQWTKLLDIMDYYFSEKGFEVCRIDGQVKLDERRRQIKDFSDEKSSCSIFLLSTRAGGLGINLTAADTCILYDSDWNPQMDLQAMDRCHRIGQTKPVHVYRLSTAQSVETRVLKRAYSKLKLEHVVIGKGQFHQERAKSSTPLEEEDILALLKEDETAEDKLIQTDISDADLDRLLDRSDLTITAPGETQAAEAFPVKGPGWEVVLPSSGGMLSSLNS

SEQ ID NO: 11598 - protein, 185 aa, Xanthomonas campestris pv. vesicatoria str. 85-10
MLLNRLLALVLTGFFATSAFAAGTPVLDVEYRPLAGKTPINLNRTYGGKVVMVVNTASKCGFTPQYEGLEALNQRFGSRGFTVLGFPSNDFQGQEPGSEKQIQEFCTLTYGVKFPMFEKVHVLGAQATPLYQRLTQATGVAPGWNFHKYLISRDGRVVAQFPSKIKPDDPSVLAAIERELKAPAH

SEQ ID NO: 11599 - protein, 383 aa, Oryza sativa Indica Group
MVAAAAAAVAAAPAPPHDAVAAVAVGMVGAAGTVDEQKAAGVGILLQISMLVVSFVLGHVLRRRKVYYIPEASASLLIGMIVGGLAKISNTQRSISLAPKPFFSNFGAIITFAILGTFIASIVTGLLVYVGGLIYIVYKLPLVECMMFGALVSATDPVTVLSIFQELGTDVNLYALVFGESVLNDASLILSNLFKYAALGVENLHNLESCLFVLFPYFSYMLAEGFGLSGIVSILFTGIVMKRYTFYNLSEDSQRFTARFFHLLSSLAEAFVSLYYLQGLRGAMAFALALQSIHDLPEGHGETIFTATTSIVVLTVLLIGGSTGTMLESLQHNFDGNNAAYPGQRYGEETSTSSNFTMKLKELQRRYSSSHLILKLYLLIALL

SEQ ID NO: 11600 - protein, 666 aa, Thalassiosira pseudonana CCMP1335
MDPVRYLSHHRRRRRPLIDVAVMRLCGGTTTLLHITHLRQHPADEDNLSIALSDEAQPNTIVSSLTERADHYVSVFRTALIGFVVGVLLTLGSVFSVQYSNPCLIFGSSVSKEEETERAATLYKSILGSLDDSYVDQVDINQLFELSVRGMLQSLDDPYTEYISSRDMLNRRDLVGIGAFVMEGEDGFHVILSLEGYAFDAGLRVGDRLLAVDGKPITNDQKLGDVRDLLVGKPGSKVLVSFHRPGVDGTQTIEIERKPVKFPDVRYSGMLDSEGGCIGYIQLAQFGMDVGDSMKKSIQSLQEESYRKTGSLDLTGIVLDLRNNSGGKLQSAIKVASLFVPKGTYLGSSVGNGRLDKLYPDESYYASVADTSSLGNADSFDDYTQLIDTDKTHVVILTDHKTASASEFLTGVFQDLDLGLVVGIDATTLGKGIGQRELPVGDGALKLTYHEFHTPSGRCVQLRAKNDDATYGGRAKKVLRTANGRDIVDRNGISVDYKITTPKNSILSALLSKNGVYFEFATQWDQRWKSTPDESTFQVDDTIYNEFCSFVEQRQRDGSLHLESMFDDQSNLDTIESMLLSSSSSSFSSESGHVSSLSTAIINELLDAFVTDKEEVMRELEKNILSRHIPDSKLLARGLKKGDDVLVKEAMELLEDNTMFNHLIRR

SEQ ID NO: 11601 - protein, 503 aa, Ralstonia eutropha JMP134
MRDRTLVISVLIVASCGLGYELIAGALSSYLLGDSILQFSSIIGCYLFAMGVGSWLSRYVKDEDVLARFIDIEILVGLLGGISAALLFVVFAWLSAPFRTALYALVFLTGVLVGMEIPLVMRILNARRAAFSDLVSRVLTFDYLGALAVSLVFPLVLAPRLGLSRTGFLFGMLNAAVALYTTRLFRDELPQVPLRTMRALVVIALLGAGFAGSDRLTHWAERGLFGDEIIHSESTPYQRLVITRWKDDLRLYINGNLQFSSRDEHRYHEALVHPVMQALPWARRVLVIGGGDGLALREILRHRNIEHVTLVDLDPAMTTLFSQSAPLRALNRDSLRDARVTVFNADAAQWMEQNAEVFDAIIVDLPDPSNFGLGKLYSVPMYRLLSRHLAEKGYAVVQSTSPYYAPRSFWGIDATLHEAGLHTWPYHAYVPSFGEWGFILAGKRSDYTPPTRYDMPMKFLDADSTALMFRFPPDMAPRAGHANRLNEQSLVHDFEQDWGNVIR

SEQ ID NO: 11602 - protein, 196 aa, Azoarcus sp. BH72
MRTTALALTLLALATAAVVYAASEAPVPAATQAAAPASPLLDHSFRRLHGAETLNLRERYAGQPLLIVNTASHCGYTGQFKELEAIHQRYRAQGLKVLGFSSDDFNQEADNEAKAANVCFVNFGVTFDMFAPIHVRGGDAHPLFRELARQSQAPRWNFHKYVVDRQGKVVASFESAVKPDAPEVLAALERAIAGAR

SEQ ID NO: 11603 - protein, 193 aa, Enterolobium cyclocarpum
YDRVMAYKFHEDDHGEVVSEIRRSDLEPFFGLHYPATDIPQAARFLFKQNRVRMICDCHANPVKVIQSEESRQPLCLVNSTLRSPHQCHAQYMENMGSIASLVMAVIVNGNDTTKLWGLLVCHHTSPRHVPFPLRYACEFLMQAFGLQLYMEMQLASQMAEKRTLKTQTLLCDMLLRDALFSIVTQSPNIMDL

SEQ ID NO: 11604 - protein, 608 aa, Streptococcus pyogenes M49 591
MSKIIGIDLGTTNSAVAVLEGTESKIIANPEGNRTTPSVVSFKNGEIIVGDAAKRQAVTNPETVISIKSKMGTSEKVSANGKEYTPQEISAMILQYLKGYAEDYLGEKVEKAVITVPAYFNDAQRQATKDAGKIAGLEVERIVNEPTAAALAYGMDKTDKDEKILVFDLGGGTFDVSILELGDGVFDVLATAGDNKLGGDDFDQKIIDFLVEEFKKENGIDLSQDKMALQRLKDAAEKAKKDLSGVTQTQISLPFITAGSAGPLHLEMSLSRAKFDDLTRDLVERTKTPVRQALSDAGLSLSEIDEVILVGGSTRIPAVVEAVKAETGKEPNKSVNPDEVVAMGAAIQGGVITGDVKDVVLLDVTPLSLGIETMGGVFTKLIDRNTTIPTSKSQVFSTAADNQPAVDIHVLQGERPMAADNKTLGRFQLTDIPAAPRGIPQIEVTFDIDKNGIVSVKAKDLGTQKEQHIVIKSNDGLSEEEIDRMMKDAEANAEADAKRKEEVDLKNEVDQAIFATEKTIKETEGKGFDTERDAAQSALDELKAAQESGNLDDMKAKLEALNEKAQALAVKMYEQAAAAQQAAQGAEGAQANDSANNDDVVDGEFTEK

SEQ ID NO: 11605 - protein, 472 aa, Anaplasma phagocytophilum HZ
MFLFTKDLLDYVEKHGIKFIDWRFTDLLGRWYHITHSTNFLDPGVFTAGVAFDSSSVPGWQPIEASDMLLVPDISTAFVDPFSAQATLSVICNVVCPGDRTDYSRDPRYTARKAHHYLVSKSIADKCFFGPEVEFFVFDRVRFAAESHNSFFKLTSVESSSGASKRFDSSHGYGLKERGGYLCSSPMDSSHDMRSEVLSMLDEVGVKPLLHHHEVASSQCEVGFHHNELVAAADSVQKCKYVLRNVVGSYGKSVTFMPKPVVGDNGSGMHCHQSLWKDGNNIFAGDNGTAGLSDTCLYYIGGILAHGKALNAFANPSTNSYKRLVPNFEAPTWLAYSHGNRSAAVRVPFVPSNSVAARRIEVRFPDPLANPYLCFASQLMAGLDGIKNKIMPPEVQGRSLYDMSEDEVRGLSSVCFSLEEALEALDKDRGFLVEGGVFTNDQIDAYIKLKRQEAHELRIHPHPVEFSNYYAL

SEQ ID NO: 11606 - protein, 756 aa, Enterococcus faecalis V583
MNYRELMQKKNVRPYVLMARFGLEKENQRSTREGLLATTEHPTVFGNRSYHPYIQTDFSETQLELITPVANSGTEMLRFLDAIHDVARRSIPEDEMLWPLSMPPQLPTKDEEIKIAKLDQYDAVLYRRYLAKEYGKRKQMVSGIHFNFEYDQALIQQLYDEQSEVTDCKQFKTKVYMKVARNFLRYRWLITYLFGASPVSEDRYFRVYDDQPQEPVRSIRNSTYGYRNHDNVKVSYASLERYLEDIHRMVENGLLSEEKEFYAPVRLRGGKQMSDLPKTGIRYIELRNLDLNPFSRLGIVEDTVDFLHYFMLYLLWTDEKEEADEWVKTGDIFNEQVALGHPHETIKLIAEGDRIFSEMIDMLDALGIRKGKEVVGKYYQQLRNPQDTVSGKMWTIIQENSNSELGNIFGNQYQSMAFERPYQLAGFREMELSTQIFLFDAIQKGLEIEILDEQEQFLKLQHGEHIEYVKNANMTSKDNYVVPLIMENKTVTKKILSAAGFHVPGGEEFSSFIEAQEAHLRYANKAFVVKPKSTNYGLGITIFKEGASLEDFTEALRIAFKEDTAVLIEEFLPGTEYRFFVLDNDVKAIMLRVPANVTGDGKHTVEELVAAKNSDPLRGTNHRAPLELIQLNDLEKLMLKEQGLTIYSVPEKEQIVYLRENSNVSTGGDSIDMTDVIDDSYKQIAIEAVAALGAKICGIDLIIPDKDVKGTRDSLTYGIIEANFNPAMHMHVYPYAGQGRRLTMDVLKLLYPEVVQ

SEQ ID NO: 11607 - protein, 279 aa, Arabidopsis thaliana
MEHQGWSFEENYSLSTNRRSIRPQDELVELLWRDGQVVLQSQTHREQTQTQKQDHHEEALRSSTFLEDQETVSWIQYPPDEDPFEPDDFSSHFFSTMDPLQRPTSETVKPKSSPEPPQVMVKPKACPDPPPQVMPPPKFRLTNSSSGIRETEMEQYSVTTVGPSHCGSNPSQNDLDVSMSHDRSKNIEEKLNPNASSSSGGSSSCSFGKDIKEMASGRCITTDRKRKRINHTDESVSLSDAIGNKSNQRSGSNRRSRAAEVHNLSERVLHRFVYIIYNI

SEQ ID NO: 11608 - protein, 498 aa, Acidobacteria bacterium Ellin345
MAILLFISVLLISACGLIYELIAGTLASYLIGDSVFQFSTIIGSYLFAMGIGSALSRYIRSGLVHRFIWIELMVGLIGGFSSALLFLAFAYTQAFGLLMYTLVIVIGVLLGLEIPLLMRIVREKYDFRDTVAHVLTFDYIGALGASLLFPVLLVPKLGLVRSAMLFGIVNALVALWSTFLFGSELAKRTMLRAMSAIVLIALCAGMVNARKITAAAEDNIYADEIVFARDTRYQHIVLTRFKDDLRLFLNSHLQFSSRDEYRYHEALIHPGLSAVPVPRHVLVLGGGDGLAVREILKYPQVESITLVDLDPEMTKLFSTNPMLTALNKKSFLDPKVKVINADAFPWIDQSTESFDFIVIDFPDPTSYSLGKLYTTTFYRAVARHLSEQGFMVVQSTSPMFARDSFWCIAETLKQTGLKTYPYHVYVPSFGEWGFVLAGTHEYEAPTSLPQGLRFVSTATLPTLFQFPPDMAPMNVPANHLNDQVLVRMYDNDWKDISH

SEQ ID NO: 11609 - protein, 143 aa, Salmonella enterica
MPKPMFGDNGSGMHCHMSLAKNGTNLFSGDKYAGLSEQALYYIGGVIKHAKAINALANPTTNSYKRLVPGYEAPVMLAYSARNRSASIRIPVVASPKARRIEVRFPDPAANPYLCFAALLMAGLDGIKNKIHPGEAMDKNLYD

SEQ ID NO: 11610 - protein, 650 aa, Listeria monocytogenes str. 1/2a F6854
MEIFELILLMLSAVFLSNVLSRFLPSIAVPLIQVVLGIILAIPLGDHTMDLNPELFLLLFMAPILFNDGASTDKKSLWKNRKAILSLSIGLVFVTVGVLGAFIHYLIPAIPFAAAFALAAALAPTDAVAVGALAEKVRVPHKIMHILEGESLINDASGLVSFQFAVLALVTGTFSFMSAGTSFLLLSLGGIALGAILSLLKIMLMRGLRQLGIENMTSFMLMEILLPFLIFMVAEKVGVNGILAVVSGGMVHSFSYKGLNPEIAQLNLLSKNTWSVIIFSLNGLVFILLGTQLPQILMTIWQDANIQKGMLFVYIIGITFLLLGLRFLWILFFRNYEENPKVDLVSRLKNTFLYTVAGVRGTITLVSALSLPFVLGNGNAFPERDLLIFIAAGVIITTLLLANFTLPLFADKKDKVTADHTTDIVLLRDIVQQLQAYKTDENAVEMNKVLNMYNNRIFSLMEHKEVNATEKELRRLTQEWQLENTRRLVFERKIDTGVGLSHMMRLGKRLYVQTRAEKYRARMRYRQLLSHRFRDFRFVPLTFEERRKEIAKLQNENNLFVIQKLQELDSNEYNPEIISLYLMNFERALGRGKNKKESNDEALQTTIDLASQIERETIQRYFEKGTITRKEMKVYRDNLLAIEANMQLEF

SEQ ID NO: 11611 - protein, 1093 aa, Myxococcus xanthus DK 1622
MRAWRGVLRWAAAGLSLSAARSPTGHLPVFSGFSVATDGVGLFAGLSVRALVHQGPGGGPLRAPHGQPGRPAAHGAGNPVQGRSQACLRVPLARTEFTFAAMPLVFLPDAETLFLWGPDRLPRELAGLPETGDRASALLVTPEGLRECEGHGLPLAATVERLAVVQTSEAESFPGSIALWTLASKLALELVARERVVPTLLRRGERIEARWAAALSATEDAGRVAALARSMPPGAHAVPAGARPGRAVWAPDALLRAFLDATVDAFVRAARGAPSLPARRAASWDERWREALTGARRDFAPEGFAERSVVDELTRWSEPALGARDKLRACFRLEPPTEEREPFVLSFHLQSPDDPSLLVPAADVWKTRGRSLEKLGRAFRDPQESLLEALGRAARLFPPLALVLESPRPQALLLEPDTAWTFLSEGARVLSDAGFGVIVPGELTTSGRRRLRLRMRVGASTKAAGAVGGTAGLGLDALLRVDWDAVLGDQPLSAQELALLAQRKAPLVRFRGEWVAVDPLELDAIQRHLAQGPGRMALSEAVRVSLLGETRHGQLPVTVLATGALEERLRLLREGGATAQDAPRALRATLRPYQSRGLHWLDTLASLGLGACLADDMGLGKTVQVLAFLLRRLEQAPDEARPTLLVAPTSVVGNWERELARFAPTLRLTRHYGAERARAANRFPRAPGAVVLTTYGLLRRDAALLARVDWGAVVLDEAQNIKNAASATARAARALRASQRFALTGTPVENRLAELWSILEFANPGLLGPLETFRRELALPIERHGNQEASARLRRLVSPFVLRRLKSDPTIITDLPAKNEMKVVCTLTREQASLYKAVVDEELRRIEEADGMERRGRVLALLLYTKQIANHPAQYLGESGPLPGRSGKLARVVEMLEESLAAGDKALVFTQFREMGDKLVAHLSEYLGHEVLFLHGGTPRKARDEMVRRFQEDVHGPRVFVLSVKAGGTGLNLTAASHVFHYDRWWNPAVEDQATDRAYRIGQTRAVQVHKLVCAGTVEEKVDRLLEQKRQLAEKVVGAGEHWVTELDTTALRELFSLSEGAVADDGDAEGEDDARVRAPRRRGRASAKAVSR

SEQ ID NO: 11612 - protein, 141 aa, Salmonella enterica
PKPMFGDNGSGMHCHMSLAKNGTNLFSGDKYAGLSEQALYYIGGVIKHAKAINALANPTTNSYKRLVPGYEAPVMLAYSARNRSASIRIPVVASPKARRIEVRFPDPAANPYLCFAALLMAGLDGIKNKIHPGEAMDKNLY

SEQ ID NO: 11613 - protein, 159 aa, Burkholderia sp. 383
MSTLYSFSAETLAGAPASLDAYRGKVLLIVNTASECGFTPQYAGLQKLYDQYAARGFYVLGFPCNQFGKQEPGDAAQIGAFCERNYGVTFPMFAKIDVKGDHAHPLYRYLTDEAPGILGLKAIKWNFTKFLVDREGRIVKRYAPSTKPDEIAADIDKLL

SEQ ID NO: 11614 - protein, 469 aa, Caulobacter crescentus CB15
MSTAKDILNLIKEKDVKYVDVRFTDVRGKMQHVTFDIDLVDDDFLNDGTMFDGSSIAGWKAINESDMKLRPDLSSAIIDPFYQQTTLALFCDVVNPDTGTPYNRDPRSIAKAALNYLKSAGVGDTVYFGPEAEFFIFDDVRWSTAPHDTSYSFDSTELPVNSNKQYAEGNMGHRPGPKGGYFPVNPVDSCQDLRGEMLAVMGELGMKPEKHHHEVAPAQHELGLKFDTMVTMADRMQLYKYVIHNVAAAYGKTATFMAKPMFADNGSGMHVHQSIWQDGKPLFAGDKYAGLSQECLWYIGGIIKHAKAINAFSNSTTNSYKRLVPGYEAPVKLAYSSRNRSASIRIPHVDSPKAKRLEARFPDPMGNPYLTFVALLMAGLDGIINKIDPGAPADKNLYDLPPREQKKIPEVCGSLREALENLDKDRAFLKAGGVMDDDFIDSYIELKMEEVMRLQLHPHPVEFEMYYKC

SEQ ID NO: 11615 - protein, 535 aa, Oryza sativa Japonica Group
MALELSLVSASPPGGLAASPPPPAAIPGKEQQVAGVGILLQISMLVLSFVLGHVLRRHRFYYLPEASASLLIGLVVGGLANISNTETNTRMWFNFHDEFFFLFLLPPIIFQSGFSLSPKPFFANFGAIVTFAILGTFIASVVTGVLVYLGGLTFLMYKLPFVECLMFGALISATDPVTVLSIFQELGTDVNLYALVFGESVLNDAMAISLYRTMSLVRSQAAAGENFFMMVFQFLETFVGSLSSGVGVGFISALLFKYAGLDIDNLQNLECCLFVLFPYFSYMLAEGLGLSGIVSILFTGMVMKHYTFSNLSNNSQRFVSAFFHLLSSLAETFVFIYMGFDIAMEEHSWSHVGFIFFSIIFIIIARAVNVFSCAYLVNMSRPEHRRIPLKHQKALWFSGLRGAMAFALALQSANELPGGHGKTIFTTTTAIVVLTVLLIGGSTGTMLEALDVIGDENRSIENYDDNNGYIPPTYEEGSSSGGGLRMKLKEFHKSTTSFTALDRNYLTPFFTSQTDEDDDVFGEQPQNQRRGFYDQ

SEQ ID NO: 11616 - protein, 529 aa, Arabidopsis thaliana; identical to SEQ ID NO: 11280

SEQ ID NO: 11617 - protein, 129 aa, Salmonella enterica
NGSGMHCHMSLAKNGTNLFSGDKYAGLSEQALYYIGGVIKHAKAINALANPTTNSYKRLVPGYEAPVMLAYSARNRSASIRIPVVASPKARRIEVRFPDPAANPYLCFAALLMAGLDGIKNKIHPGEAM

SEQ ID NO: 11618 - protein, 144 aa, Salmonella enterica
MPKPMFGDNGSGMHCHMSLAKNGTNLFSGDKYAGLSEQALYYIGGVIKHAKAINALANPTTNSYKRLVPGYEAPVMLAYSARNRSASIRIPVVASPKARRIEVRFPDPAANPYLCFAALLMAGLDGIKNKIHPGEAMDKNLYDL

SEQ ID NO: 11619 - protein, 142 aa, Zea mays
MDKGVIVYICDSQGVRDIYEADGADTIAASEPLVVLVNKGTASASEILAGALKDNKRAVVYGEPTYGKGKIQSVFGLSDGSGLAVTVARYETPAHTDIDKVGVIPDRPLPASFPTDEDAFCSCLRDSTAACNLNAAQLFAKS

SEQ ID NO: 11620 - protein, 153 aa, Zea mays
MVRALDRYSSGKDVAYSCGYCGFALNLSSSTRNTANIGSKYGKHIRKGVVSFFAIDESRFTQADEVSCTPYFRSSRSWGFFRNRTRLLCRKCGGHTGYAYEDEGPALRDEGPADDLDMSSSSRGSSTSPRKKYVIKISALRPLSDDSGALLSP

SEQ ID NO: 11621 - protein, 501 aa, Dehalococcoides sp. VS
MANDSIALNPNPVTLHLGKPPEEFTKKDLIKFIEDNNIKAVNFRHLGGDGRLKTLNFVISSKPQLDRVLSAGERVDGSSLFSYIDSASSDLYIVPRYKTAFVNPFSTTPTLELLCSYYTKDGTPLPSAPENILKKANQSLLKSTGLTFQAMGELEYYVIANKQSQYPATTQKGYQESAPFCKWETLRYEAMQAIAKAGGRIKYGHSEVGHIFNEEHEMEQNEIEFLPVPVEDAADQLVIAKWILRMMGHKHGVVVTFAPKILVGHAGSGLHVHTKLMNNGTNALINGGGLSETARKAIAGYLRLAPSLTALGNTVPLSFLRLVPHQESPTNICWGDRNRSVLVRVPLGWLNVGNMAKDANPQETDEPAAFSDSQTVEFRCPDGSANIHLLMAGLAVAARHGLEMENALELAKKLYVDVNIFADENTQIQQALPQLPSSCWDSAECLIRDRQIYEKDNVFPPAVIDGLAKILKSYNDNDLSQRFYGKNDEIQKLVDHYLHFA

SEQ ID NO: 11622 - protein, 143 aa, Salmonella enterica
FMPKPMFGDNGSGMHCHMSLAKNGTNLFSGDKYAGLSEQALHYIGGVIKHAKAINALANPTTNSYKRLVPGYEAPVMLAYSARNRSASIRIPVVASPKARRIEVRFPDPAANPYLCFAALLMAGLDGIKNKIHPGEAMDKNLY

SEQ ID NO: 11623 - protein, 440 aa, Rhodospirillum rubrum ATCC 11170
MTWKTWISASAIAFTAFTAGQLYHTEQAEAARGEETYQLLDLFADVFERVKRDYVEEVGDDQLIEAAINGMLTSLDPHSSYLNAKHFEDMQVQTKGEFGGLGIEVTQEDGFIKVVSPIDETPAALAGLQPGDFITHLDGESVLGLSLADAVEKMRGPVGKEIRLTIQRVGKEPFDVTLKRDTIKIQSVKSRMEGDVGYVRITSFSEQTEKSLREALDDLRSKGGDSIKGYVLDLRNNPGGLLEQAIAVSDVFLDKGEIVSTRARDAKDTQRFNARPGDLTKGMPVVVLINSGSASASEIVAGALQDHHRALIVGTKSFGKGSVQTIMPLPGHGAMRLTTARYYTPSGRSIQALGIDPDIQVEPARIEAISAQNEMRSEAELRNALKNDTLKPSLGVKPANGLPPSQVRNDQTPQADTDYQLARAVDLIRGLAIYRSKSIQ

SEQ ID NO: 11624 - protein, 385 aa, Lactobacillus plantarum WCFS1
MLDVHFGAGNIGRGFIGETLADNGFKITFVDVNDTLIDELNKRNGYTIELAAEGQKHIEVHDVKGINNGKDPKAVAEEIAQADMVTTAIGPKILKFIAPLIADGLKLRQANNNTTPIDIIACENMIGGSQSLKKSVYESLNEDEQAWADQNAGFPNAAVDRIVPLQKHDDPLFVSVEPFKEWVIDKSQMKNPKIQLKGVDYADDLEPYIERKLFSVNTGHATVAYTGNMKGYKTIGEAVKDDSVVDQAKHVLGETGDLLIQKWGFDPEVHHAYQKKILSRFENPYISDDIERVGRTPIRKLGFNERFIRPIRELKERGRDYSALVDTVGEMFFFNYPNDSESVKLQQLLKDEPIEQVIRETTDLKDEDLVNEIKAAYEKHLAAAK

SEQ ID NO: 11625 - protein, 384 aa, Brachylophon curtisii; identical to SEQ ID NO: 8169

SEQ ID NO: 11626 - protein, 291 aa, Geobacillus kaustophilus HTA426
MKHEGSALPPYLHMDNGELWLTEDDRDNLKISYRIKEVIFAEPSEYQHVMILDSYDFGRMLVLDGVVQTTSIDGHIYNEMISHVPLQFHPEAKRVLIIGGGDCGAARETAKYAHLEAIDMVEIDEKVVRACKEHLPAVSGNLSDPRVRFVYDDGVVFVQEKENVYDVIMIDSSDPVGPAEALFSPEFYANVHRALKADGLMVCQSQSPIFHLDILKRTYRNIRELFPHVLVYTAVVPTYPGGLWSFTIGSKRPLDFPAQTTIPNDTKYVNDAVFRQCFALPEFLRSALEVE

SEQ ID NO: 11627 - protein, 389 aa, Triticum aestivum
ALTEENLLFLEAWRAVDRAYYDKSFNGQSWFRYRERALRDDPMNTRQETYAAIKKMLATLDDPFTRLLEPEKFKSLRSGTQGALTGVGLSIGYPLALKGSPAGLSVMSAAPGGPAEKAGIVSGDVILAIDDTSAQDMDIYDAADRLQGPEGSSIDLTILSGADTRHVVLKRERYTLNPVRSRMCEIPGSEDSSKIGYIKLTTFNQNAAGSVKEAIKKLREKNVKAFVLDLRNNSGGLFPEGIEIAKIWMDKGVIVYICDSRGVRDIYEADGASTIAASEPLVVLVNKGTASASEILAGALKDNKRAVVYGEPTYGKGKIQSVFALSDGSGLAVTVARYETPAHTDIDKVGVTPDRPLPASFPTDEDGFCSCLRDPASCNLNAARLFVRS

SEQ ID NO: 11628 - protein, 79 aa, Vitis vinifera
MKKNVGELGLKFFLKIFEIAPLTQKLFSFLKDSKVPLDKNPKLKSHAMTFFYFLFLFFMVVYSSPLPPNGLLKMTIYKI

SEQ ID NO: 11629 - protein, 468 aa, Colwellia psychrerythraea 34H
MSQAVFDLIKEHDVKFIDLRFTDSKGKEQHISIPHHQVTEDFFEDGKMFDGSSIEGWKGIDESDMVMMPDASTAILDPFTDAVTLNIRCDILEPSTMQGYSRDPRSVANRAEEYLRSTGIADDVLVGPEPEFFVFDDVRFHTDMSGSFYKIDDKEASWNSGTEYEEGNMGHRPGVKGGYFPTAPVDSSQDLRSAMCLVMEDMGLIVEAHHHEVATCGQNEIACRFNTLVKKADEVQIYKYVVHNVAHAYGKTATFMPKPLVGDNGTGMHVHMSLAKDGVNLFAGDKYGGLSETALYYIGGIIKHAKALNAFTNPATNSYKRLVPHFEAPVMLAYSARNRSASIRIPLVPSPKAMRIEARFPDPACNPYLAFSALLMAGLDGIKNKTHPGDAMDKDLYDLPAEEAASIPQVATSLDDALDNLEADFEFLTAGGVMDKDMIDAYIAIKREESRRVNMTTHPLEFELYYSV

SEQ ID NO: 11630 - protein, 639 aa, Methanosarcina acetivorans C2A
MDGYNIFIVLLAVYIAGLVAIGWYFNKKQKSVTDFWLAGRRIGPSALGFSAAASWLTAGGILAVIGYYMLQGMGSIWAFVAPNILALLIIALLVGKIKNLPAITQPELLEQRYGSAVRWPIALIITVVMILFAVADVTGFSLVLQVFYGVDPLYAAAIVAIAVSLYVTMGGLSAVVWTDVVQFAFLSIFTIAMAFAAVGTVADGGLNTPAISSSELFGNVSYDWWNPLSIGIPMVLIFVFAIIPGWITEQDPWQKVWAAKDAKSARLGMVFGSLMITVVFAACAVIAIAFNNIYPDIAGMGFPAGMAQAEPALLAFVSERFVSAPLIVALSAIGLAAASMSCADTFATSGASCISRDIFQRYIKPDATMKEMLVVNRISVLIIVLAATAGSFVIPNIIDAIHIATFIASASYFFPLMGGLYWKRATKEGAFAGMVVGFVVQVTLVSLDLIKTPPMAANYLESVHPALMSHGVIVGMGLSAIAFFGVSLMTKPSSRINLAPFFEEEAEELAHYEAREIDEKDPTYGAFLKNVDEKVAGERAHLQLNLRASGALSWHELVEKLKSSSPAWVTPTGLDSVYRLTHGDMLACVTVTRGSEERDIWLKAEPRLETVGRQKKELFTAYEELKKVLGQKGVNLDFY

SEQ ID NO: 11631 - protein, 471 aa, Dechloromonas aromatica RCB
MATPQDVIKMIKENDAKFVDFRFTDTRGKEQHVTVPVSAFSEDKFENGHAFDGSSIAGWKGIQASDMQLNPDPATAYIDPFFDETTVVLTCDVVDPADGRGYDRDPRSIAKRAEAYLKSSGIGDTAYFGPEPEFFIFDGVEWNVDMSGCSLKIHSAEAAWGSGEKNDGNGSTGHRPTVKGGYFPVPPVDSLHDIRSAMVLTLEALGCPVEVHHHEVATAGQCEIGTVFNTLVKRADQTQILKYVVHNVAHQYGKTATFMPKPIVGDNGSGMHVHQSIWKDGKNLFAGDGYAGLSELALFYIGGIIKHAKALNAITNPGTNSYKRLVPHYEAPVKLAYSAKNRSASIRIPYVASTKARRIETRFPDPIANPYLCFAALLMAGLDGIQNKIHPGDPADKNLYDLPPEEDAKIPTVCASLEEALAALDKDREFLTRGGVFSNDWIDAFISLKMDEVNKVRMTTHPVEFDLYYSC

SEQ ID NO: 11632 - protein, 473 aa, Nicotiana plumbaginifolia
MCRNKMFSQPNWRHSKLFIDKQSFLVTQNGLAFLPRKFRTILRKTVKHSEIFRNIVPDIFVRSCIGLMLVMALNAAVAKAPSFALTEQNLLFLEAWRTIDRAYIDKTFNGQSWFRYREDALRKEPMNTRQETYAAIKKMIATLDDPFTRFLEPEKFKSLRSGTQNALTGVGLSIGYPTGKTESAPGLVVVSASPGGPADRAGISSGDIILEIDNSSTENMGIYDAAERLQGPEGSGVELTVRRGSETRNLPLIREKVLLNPVKSRICKLPTGGDDAPQIGYIKLSTFNQNASGAVREAIEALRKNNVNAFVLDLRDNSGGLFPEGVEIAKIWLNKGVIVYICDSRGVRDIYDTDGSNVVAASEPLAVLVNKGTASASEILAGALKDNTRAQLFGEPTYGKGKIQSVFQLSDGSGLAVTVARYETPAHNDIDKVGVIPDHPLPASFPKDDESFCNCLLNPASACHLNRVELFSK

SEQ ID NO: 11633 - protein, 750 aa, Coprinopsis cinerea okayama7#130
MAPLSHPTIVDGWFREISPQWQGQAMTLKVNKILHVEKSLYQDVLVFESETYGNVLVLDGVIQATERDEFSYQEMIAHLPLAAHPNPKKVLVIGGGDGGVVREVLKHETVEQVVLCDIDEAVIRVAKIFLPHMSKLLESPRVTVHIGDGFKFLAEHEGTYDVIITDSSDPVGPAEALFEKPYFQLLHDALTPGGHISTQGECMWLHLQLIKDMLKFTKEIFTNVEYAYTMIPTYPSGQIGHILAAKSPGRDLKTPVRDVPNCRYYNKGIHASAFVLPEFVDALLYQDRDIRPVFGRELKALDNKPAKKVLLLGSGFVARPCAEYIVRQPENKLTIACRTLSSAQALAENLPDTTPISLDVTNTAALEAAVAEHDLVISLIPYTYHADVIKAAIKGKTHVVTTSYVSPAMRALDEEAKAAGIVVLNEIGLDPGIDHLYAVKTIDEVHEKGGKIKQFLSYCGGLPAPECSDNPLGYKFSWSSRGVLLALLNSASYISGGQRLDITGTELMAHAKPYYITPAYAFVCYPNRDSVPFKEYYNIPEAETVVRGTLRYQGFPEFIKTLVDIGFLDATPKEWLNDNLTWAEVTQKAVSANDAEEATLVERIKAIAKFPNDSEANRIISGLRWIGLFSKDKVTPRAGNLLDTLCAQLEKLMKYEENERDLVMLQHKFFVEWADGSEQILTSTLEAYGAPGGHSAMALTVGLPCGIAVQLVLDGVITKTGVYAPYTKEICDPIREVLEKEGLGMIERVL

SEQ ID NO: 11634 - protein, 540 aa, Synechococcus sp. PCC 7002
MPNPPLIIVRHIFLFGQAVSLPANAFTGLVNTLILLLLVATVVALVTRWLRIPYVIGLVLAGLLIPKQILSDAIGLNPEVILNLFLPILIFEAAINTDISRLRSTIKPIALLAGPGVLLAATITAFFLKVSLDLAWLTACAVGVILTITDTVSVIAAFRTVPVPGRLATIVEGESLFNDGIALVLLNIVTTIHLQGSFSVGEGVEQILIAFVGGGLLGLGLGYLCIGLFRQLDDPLSNILLTVAVSLGTFQIGQALGVSSAIAVLIAGLLIGNVALRECSGSVTITLLNFWEYAGFGVNTFIFLFVGIEVAPLSLLQTIPAALLAVVAYQVGRICSIYPLLSVLKFFDRPLPLRWQHVLIFGNVKGSLSMALALGLPLTLQGRSQVITLVFSTVLVSLIGQGLSLPWFVKKLQLAKPSPVRQHLENLQLNLIAAKSAQEELKELLQSGSLPKFLYEELFASYQARIANAEEELRGLYNQRLTQKLSQFENQAYLEGLRHRLFLAEKSAINEAILKGLISDETARPYLQELNQKILALRDP

SEQ ID NO: 11635 - protein, 853 aa, Saccharomyces cerevisiae YJM789
MSRCSNAALMTVVEDAVGARVAARTRNMSNGVNYREKEVNDLTADISNSDSDLDSEDNKHGKGDNDTAPIWLQDDVHSDEDIQLDSEDDSDTEAVQAQVVDKLAKDTKSEQKSLDDELSEMDTKTVSLKLKKLNEFVRQSQVYSSIIADTLLQRSNEVANANTKDNSNSNDEEHSSKKRKTKKKSITDFFKKQKKNEDTTTQNGAPDDAAIKQPRLLKNCILKPYQLEGLNWLITLYENGLNGILADEMGLGKTVQSIALLAFIYEMDTKGPFLVTAPLSTLDNWMNEFAKFAPDLPVLKYYGTNGYKERSAKLKNFFKQHGGTGIVITSYEIILRDTDLIMSQNWKFLIVDEGHRLKNINCRLIKELKKINTSNRLLLTGTPLQNNLAELWSLLNFIMPDIFADFEIFNKWFDFDSLNLGSGSNSEALNKLINDELQKNLISNLHTILKPFLLRRLKKVVLANILPPKREYIINCPMTSAQEKFYKAGLNGKLKKTMFKELIKDFFTLNDEYIGHVSNRSIRDFINYKLSGNETSNTDNKINPTLLQMDKLYKKNLQMEISNKKLQNMMMQLRQIIDSTFLFYFPYLHPEDLTLETLLKTSGKLQILQKLIPPLISEGHKVLIYSQFVNMLDLIEDWCDLNSFATFRIDGSVNNETRKDQLEKFNSSKDKHNIFLLSTRAAGLGINLVGADTVVLFDSDWNPQVDLQAMDRCHRIGQESPVIVYRLCCDNTIEHVILTRAANKRNLERMVIQMGKFNNLKKLALNEGSFLKANKAGVNVTNKDLVQELSMLLMSDESSIGFENGGQKENKATEGQLTDKEVEELTNRSLEAYKANRVVDLPHVKLFETTSGL

SEQ ID NO: 11636 - protein, 629 aa, Pavlova lutheri
MAKVVGIDLGTTNSVVAVMEGGKPTVITNSEGGTTTPSVVAYAKNGDLLVGQIAKRQAVINSENTFYSVKRFIGRPSKEVSDELRQTPYKIEDSEGKIRLKCPNLNKNFAAEEISAQVLRKLVNDANKYLGEKVEKAVITVPAYFNDSQRQATKDAGKIAGLEVLRIINEPTAASLAYGLDKKDNETILVFDLGGGTFDVSILEVGDGVFEVLSTSGDTRLGGDDFDEKIVKWLLNEFEKEEKFSLKGDSQALQRLTEAAEKAKIELSSLSQTEINLPFITANENGAKHIEKTLTGEKFESLCSDLFDRCRIPVENALKDAKLKPNQIDEVVLVGGSTRIPAVKKLVKDILGKEPNETVNPDEVVAIGAAIQAGVLSGEVKDILLLDVTPLSLGVETLGGVTTKIIPRNTTVPTKKSEIFSTAVDNQPNVEIHVLQGEREFARDNKSLGTFRLDGILPAPRGIPQIEVTFDIDANGILSVTAQDKGTSKQQSITISGASTLPKEEVEKMVKEAEQNAAADKEKGENIRVKNEADLYCYQAEKQISELPEALVNENQSLIKESKETVEMLKENIKKEDYDKIKENLKKLQEKLMEIGQKAYAKKEPLKDEDSNKAGSQDDFIDADFTESK

SEQ ID NO: 11637 - protein, 232 aa, Populus trichocarpa x Populus deltoides
MASLPFSCSSVPGLKIHPNPTKMASFVISIKSSLGPSKSAFLQRGFSLQSPNLPGFASKARSFGVFARAATEKSVHDFTVKDINGKDVALSKFKGKALLIVNVASKCGLTSSNYSELTHIYEKYKTQGFEILAFPCNQFGGQEPGSNPEIKQFACTRYKAEFPIFDKVDVNGPSTAPVYQFLKSSAGGFLGDLIKWNFEKFLVDKNGKVVERYQPTTSPFQIEKDIQKLLAA

SEQ ID NO: 11638 - protein, 158 aa, Staphylococcus aureus subsp. aureus Mu50
METIYDFVVETNKGVTYKLDAYKGDVMLIVNTASECGFTSQFEGLQSLYEKYKDQGFVILGFPCNQFGGQEPGSGEEAAQNCKLNYGVTFPMHQKIDVKGEHQLPLFRYLTAAQHGFFNEKIKWNFTKFLVDREGNVVKRFAPQKKPVQIEREIEKLL

SEQ ID NO: 11639 - protein, 1141 aa, Alkaliphilus metalliredigens QYMF
MGIMKGIKGNFKFFDLDGLIIVSKLRLMIYYSDKEKIGFILLVYLTKIKSSNNHSVREMRESMLRINRELLEDIVSHPNAYYNGVEYHKKNRVVDLKFRRDKKHFIAKVKGSNHYDIEVNFNQQGEMGEATCTCPAYDRFWGYCKHIVAVLLSIKEIDERGGLYKKNGNQQIDSILEYFHNQQLNERISVKLQIYYEVERHSMDETVESYLTLKVGEERMYVVRNIKEFIENVYNVKPQYFGKQFTFEPEIHGFGEGDQRVLDLIYEIHENETLSDSSFLGKSGNTLFDGKRVQLGDQALKRFLNLIREEKLQTEDRVKVCILDREPQNILVYEGDLPVDFQLEKQGEETILKLNYQGDVIRLVADGEYFLTHHGICRVTEQQRSGFMPFYRTMVVNQTNKLVIPKEKEEQFISEIYPIMKAVGKVEISPELSKTIYSPPLKAEVYFDQVDQLVKAEIRWVYGNMTLRPFEESKKEAGQILLRDIKKEEEIIGFFERNQFKIKNKQIYLEEEAAIFQLIYKELDKLQKISEVYYSETFKGMELKSAASFRGGIQLNREEDLLEFQFDIDGIEDHELTDLMESLRKKKKYYRLKDGSFIPLEEERLIAIDELMKQLDLSGENIHGKVIEIPKFKGIFVDEFLKQRDLGFVKKNKAYRQFIEDIKEFEEVEYDEPQELKEILRNYQRLGFRWLKSLTRYGLGGILADDMGLGKTLQILTYLVDEKEKRGQGTALIVSPTSLVYNWIAEVEKFTPELRIKAIVGSKNEREEIMKEIDEYDIIITSYPLIRRDAELYETRSFRCCILDEAQHIKNPVSQNAKAVKAIRATHRFALTGTPIENSLTELWSIFDFVMPGYLLSHHKFKGRFEKPIVKDRDSEALASLGKLIRPFVLRRMKRDVLQELPEKIESKMVAELTEDQKKLYLAYLKQIKGQIQEEIEQNGFERSQMKILAGLTRLRQICCHPSLFVENYEGGSGKLDLLEEVVAASLEAGHRILLFSQFTSMLKMIREKLDQQGIEYAYLDGSTPMEARGEIVKEFNEGKGSIFLISLKAGGTGLNLTGADTVIHFDPWWNPAVEDQATDRAYRIGQKNKVHVMKFIAQGTIEEKIFKLQERKKEMINAVIQPGETFLAKMNSQELMELLK

SEQ ID NO: 11640 - protein, 476 aa, Arabidopsis thaliana
MDAKRKLSQEKDMYQNDDKRKKVVALENQEAGGSCIDGNVAHWFSKTKFNGLVNVPIVYLALEENIVKNDLTLRSSLKHVIFGGSSGGSNSGKGLAKDLYLDGNELVEVHVRSDREINMMKDKGKAIFDLNEAVWPRDEAVSNTFEDHPLPPGFGSNICKDIKMRVPKDGFSGTGIFPHPLHKMIMKPHHFEIFNFLCKNLVVENSNGCIIAQTPLSEKTFLMISFIYGYLEKHPNSKPLFVLPKWVLNFWKTKFGELKVNDLVLLDFYSAKASTRSQQLEVLNRWIKTRSIIFLGAKQFSNIISDNSGAEASDSCRDILLNIPSVVVFDRGTDPRNEMMSFLKVVARIKTPHKVLLTGSLYQNNIKEVFNILDVVFPEFLKHNRIGKNIRKFLNVEADGPSTNLKMPLFDKLEEALLSQDSDHGDKISYLTELRMLTNKFIYNHKEEFLLEVPGLMDFTVVLKPTLSQKSAWEIE

SEQ ID NO: 11641 - protein, 1690 aa, Candida albicans SC5314
MNRQPTREDIQRAIQRWHQMKQQYGDQVQLNPEFVKLTKFLNTLKMQQQRFQQQYQQQQQQQQQQQQQQQQQQQQQQQQQQQQQQSLNHSQQSPLLQNAQGQTPQQPPTPQQFSNFNQNGYNGQQFSSQVHSPAIGGSLSTSGHGTPLVTNANLMTGKKNTRTPNAQFGNQTAAGTPLQQQQQQPFPHGNNSNPMLNQTAQQPPQSQQRQQNQPPSPQSAFTNQQFQLLKSQLQAFKYFVRAPGQGQGQIPQNLIAYVSNPSSAMANDMYLPAVNRPQTNGMDRTMQMPQSIPSQPQQYALQQQNDLSNSNPKSTGGTPEIPEKKKGKRGPKPKNPKKPTKKQLREEEQRLALEKQRQELEQNRLKSSAPQAFPPQAGLQGQAPFPPQPPQQSQQHVPQPPPASTSSIPPGGLPQSQPQPQQQQQQPSRPITKPATPQPLFPDPSPPVNIKSVVPDKANNKKVIIPVTKPNIEVDTFELFDIISDEVKDIPFNTLYAPQSRFQIPSFLPDGINMEDIYVNREGYMQITIEQEKERLRKQIDSLNEKDTEKKLELETQLSQLELIPYQKDLRGKVLIQSWFGKSLLPNSHPNFLARFSSLSMDSVHMTTDLYRLQLESMMREQNKKHGKTIEEIISFSDRSSIKAVKKSDRLSRFMTKINNFHNQTAKEEQKKLEKMAKQRLQALKSNDEEAYLKLLDHTKDTRITHLLEQTNQFLDSLALAVQSQQKEAQDNLAYSGRAIEPASVEPLDDEKREKIDYYNVAHRIKEEVTKQPSILVGGTLKEYQLKGLQWMVSLFNNHLNGILADEMGLGKTIQTISLLTYLVEVKKIPGPFLVIVPLSTVTNWNLEFEKWAPSIKKITYKGTPNQRKVMQHDIRTGNFQLVLTTFEYVIKDKGLLGRIKWVHMIIDEGHRMKNANSKLSETLTQNYHSDYRLILTGTPLQNNLPELWALLNFVLPKIFNSVKSFDEWFNTPFANTGGQDKIELTEEETLLVIRRLHKVLRPFLLRRLKKDVEKDLPNKVEKVVKCKSSALQSKLYQQMLRYNMLYAGDPANGSVPVTIKNANNQIMQLKKICNHPFVYEEVENLINPNIETNDQIWRVAGKFELLDKVLPKFKATGHKVLIFFQMTQIMNIMEDFLRFRGMKYMRLDGGTKADDRTDLLKSFNAPDSDYFCFLLSTRAGGLGLNLQTADTVIIFDTDWNPHQDLQAQDRAHRIGQKNEVRILRLITENSVEEMILERAHKKLEIDGKVIQAGKFDNKSTAEEQEAMLRALIEKEDERRQKGGTDEEEEDLDDDELNQIIARNENELVVFRKMDEERYLATKNAPYPSRLYTEEELPEIYKIDPEELFKKEDVASEEYGRGARERKILQYDDNLTEEQWLKKIEGMVSDDDDDNDDDDGNVDMSDSEMEAKPKKPKGRRGRKPKVARVEDEESQTESDVISVKRQFPEDADDFIPPKRQKSATPGGTTTSGRGRGRGRGRGRGRGRGRGRGSLLSRYTPSVDPLTADERSTLQNQIENILGLIINYKNEHDRVLSELFLVKPPKRFYPDYYVLIKHPIALDVIKKRTASKSYSKIREFLEDIHLMFTNAKIYNEEGSIVYQDAAFLERLSMDKFKELSANLSEDEINKILDFAEFDEMFSLKPLVPSTAIKHPIEAKLEKIDKGEAIDSPLLNASTTAGTEESTPANFD

SEQ ID NO: 11642 - protein, 1032 aa, Streptococcus pyogenes MGAS315
MMARLIPGRVRNEGIKLYEQGLVSFQDDNKGILQIEVETYQVQYGADDEDITCQCDTFHMKHYCKHIAAVEYFLKNDQKGKLFLKQLTNQTKIKETTKKMTSFGSLFLDSLAMNEDDSVKYRLSALGSRSPFSSDYWWSLKINRLPDDRSYVIRDIKGFLQLIKKEGFYQIGKNYFEQLSWLQFDPSSQDLIEFLWRLASDTDKGDNENIFPNHARHLRLPSGFFEEGVHYLTSLYDFTFEGPSQTYHHLFVRSLEAEAGLYEFKVEVHRKSIELQIAEKNVQYLFDNDYLLYQDTFYHLTLKQRKMVQAIRSLPIEADLAKHIHFDLDDHAKLAASLSDFKQIGLVEAPKSFAIRDFEVTFQFDLLNRDEISCQLMFDYGNYQVSDKASLEALPFASHLKKEEKINRSLLAFGFSPQFYSKKRLTSAKELYTFFEETVPCFERLGNVALSTAIQALQVKEMPKIAIKRNQGLLDISFDFSTIIENDIDQAVTALFQNNPYFVSQTGQLVVFDDETQKVSKSLQELRARQLKNGHLQLDGIRALQVSKLFEGMTSVHFSKELEELAYHLQHPETFSIKPLPVKAQMRDYQRNGVQWLSMLNHYGFGGILADDMGLGKTLQTLAFLASHLKSDSKVLILSPSSLIYNWFDECQKFTPQLDVVVSYGLKQTRDQIIEEGHQITITSYSSFRQDFETYQAFHYDYLILDEAQVIKNAQTKISHCLRAFNTANCFALSGTPIENKMLEIWSIFQIVLPGLLPTKKEFLKLTAEQVSRYIKPFVMRRKKEDVLPELPDLIETNYSNEMTDEQKAIYLAQLRQMQDQIRNSSDVDISRQKIEILSGITRLRQICDTPSLFMDYQGESGKLDSLRILLTQIKENGHRALIFSQFRGMLDLAKQEMTALGLTSYQMTGSTPANERQEMTRAFNNGSKDAFLISLKAGGVGINLTGADTVILIDLWWNPAVEMQAISRAYRIGQKENVEVYRLITRGTIEEKILELQESKRNLVTTVLDGNESRASMSIEEIKEILGLNTH

SEQ ID NO: 11643 - protein, 612 aa, Bacillus licheniformis ATCC 14580
MSKVIGIDLGTTNSCVAVLEGGEPKVIPNPEGARTTPSVVAFKNGERQVGEVAKRQSITNPNTIMSIKRHMGTDYTVEIEGKKYTPQEVSAIILQHLKSYAESYLGETVSKAVITVPAYFNDAERQATKDAGKIAGLEVERIINEPTAAALAYGLDKTEEDQTILVYDLGGGTFDVSILELGDGVFEVRSTAGDNRLGGDDFDQVIIDHLVSEFKKENGIDLSKDKMALQRLKDAAEKAKKDLSGVSSTQISLPFITAGEAGPLHLELTLTRAKFEELSSHLVERTMGPVRQALQDAGLSASEIDKVILVGGSTRIPAVQEAIKKETGKEAHKGVNPDEVVALGAAIQGGVITGDVKDVVLLDVTPLSLGIETMGGVFTKLIERNTTIPTSKSQVFSTAADNQTAVDIHVLQGERPMAADNKTLGRFQLTDIPPAPRGVPQIEVSFDIDKNGIVNVSAKDLGTGKEQNITIKSSSGLSDDEIERMVKEAEENAEADAKKKEEIELRNEADQLVFTTEKTLKDLEGKADEAQVKKANEAKDALKAAIEKNDLDEIKAKKDELQAIVQELSMKLYEEAAKQAQAQQDGGAGAKKADDNVVDAEYEEVNDDKDQK

SEQ ID NO: 11644 - protein, 278 aa, Zea mays
MDSSSFLPAAGAENGSAAGGANNGGAAQQHAAPAIREQDRLMPIANVIRIMRRVLPAHAKISDDAKETIQECVSEYISFITGEANERCQREQRKTITAEDVLWAMSRLGFDDYVEPLGAYLHRYREFEGDARGVGLVPGAAPSRGGDHHPHSMSPAAMLKSRGPVSGAAMLPHHHHHHDMQMHAAMYGGTAVPPPAGPPHHGGFLMPHPQGSSHYLPYAYEPTYGGEHAMAAYYGGAAYAPGNGGSGDGSGSGGGGGSASHTPQGSGGLEHPHPFAYK

SEQ ID NO: 11645 - protein, 649 aa, Pyrenomonas salina
MENKIEGVAIGIDLGTTYSCVGVWLHDRVEVIANDQGNRTTPSYVAFTETERLIGDSAKNQVAMNPDNTVFDAKRLIGRRFQDPAVQEDVKPFPFKVICKDGDKPAVEVKYKGETKIFAPEEISSMVLLKMKEIAESFLGKEVKNAVITVPAYFNDSQRQATKDAGAITGLNVLRIINEPTAAAIAYGLDKKTSGSKSERNVLIFDLGGGTFDVSLLTIEEGIFEVKATAGDTHLGGEDFDSRLVNFFVSEFKRKYKKDVTSNARSLRRLRTACERAKRTLSSGTQTTVEIDSLIDGIDYYASITRAKFEELCMDLFRGTSEPVEKVLRDSKISKSEIHDVVLVGGSTRIPKVQQLLIDYFNGKELCKNINPDEAVAYGAAVQAAILAGDTSEKMDLLLLDVSPLSLGLETAGGVMTVLIKRNTTIPTKKTQVFSTYADNQPGVLIQVFEGERSRTKDNNILGKFELTGIPPAPRGVPQIEVTFDIDANGILNVSASDKSTGKSNKITITNDKGRLSKEEIERMVEEAEKYKTEDEKLDKKLEAKNSLENYAYNIRNTVRDEKLKEKIQEEDKKSIEEKVKEVLEFIETNEDLEKEEYEEKEKELKNFANPIISKLYQQGSVPDMGNFSTGQNEQDDNANMGPKIEEVG

SEQ ID NO: 11646 - protein, 124 aa, Salmonella enterica
MSLAKNGTNLFSGDKYAGLSEQALHYIGGVIKHAKAINALANPTTNSYKRLVPGYEAPVMLAYSARNRSASIRIPVVASPKARRIEVRFPDPAANPYLCFAALLMAGLDGIKNKIHPGEAMDKN

SEQ ID NO: 11647 - protein, 340 aa, Legionella pneumophila str. Lens
MPVIPVEEFDGFILKLGKNNYHFCKNETPFNNSCSANIAIDKYCTSKLLEKAGIPVPKAISLNCSEFQRNLHKDKIAQLNFPLVIKPIDGSLGIGVLCNIKTWEELESHLTKYFSSYQCLIIEEFHGKLNSYRVLVFNNRILGIVKRYPAAVTGDRVHPIHELIKQENLNRKRINEALGEITLDEEAQIKLQELGITENYIPSFGEQIVLCYTSNATRGGSYVTINKKMCKQNRKLLLQAAKILDLQLVGIDVECSDIINIPIEQSNGVILEVNHKPSIRIHEFPMKGTPQKVTKKIMRSFITRHPLSYLYSIYNNQPTAFYVRSSILIIIMGLILLAVW

SEQ ID NO: 11648 - protein, 218 aa, Gossypioides kirkii
MIETILSCSCGSCGYELNLSSSSRNTATIGSKYGKSIKRGIISFFSIDESRFTQVDEFQCVPYFSRHSWGLFRHRTKLLCRKCGNHIGNAYDEKTSGYPLVLDKSNSSPSNEVSSHRKYNVRIRALQPSSAQELACFESFFVVCHEQVFLSLLTFFFFQKERPVETRIGHWRQLHREGNVQTWRDRASVNLFFAMHDSRGVKTMDSLLAIGICPWQCL

SEQ ID NO: 11649 - protein, 1435 aa, Zea mays
MDRATPRVCGRRGVSQAAVEAAPSSSRARRRDKAPAVVMDLGDDDCGGGGARKTVGGAAGRCEGSTKAPSPMLPPMMVPAGAVALRTRSRRRAMLAAAVVEEAPTKKKKKEGAIPDAAEATRGHGSKAAATSMATSSHKRRAGTSRSTSRDKRRARSGRASEPARVGRARKRKRNELEAPARRERVKAPCVSESDDNSGRGDDASHDGDAEPRGGVAIGTDLVNGDHPAAKEVVEGAGDEDTGDGGNSGLASTADVVAEEMAPFEDDYDDEMLEEQLVGDVIRAYSNGRNLDSDGVDWEAEDEMEFNDDADNSDFMDDADDSDFMDDAYEGGNSKPIQNHAKLEIQDWVNQKVVLSGGRCEVRGEGDLEEELGVGKEADEEDVEPKSEAAPGSDKRVLQLEILGSDEEIKVLENMSSAPSRKASVQSKLPTIPSCVAWRTRSSWGVNQDRLSYDTYFEELSDEPKEDDDDTEVELDEVEDDNNDDDSSDAYDKDDEEKEEEEEEAERRKLNNRICTSDEDMINITVPTSRYDMFKKKNSSRYDIEWVEDEDASVDMLQPVSFKKDSSWKPVAVGNDTFTEQQKRSRFTWELERRKKLKLEMKTNPLHERDLDSDPNSSGSDQIRKYGFKSDGSHKVDRKKKHTSPKSGKKPSSAIILKRQSLLKLLVDKMSGDKSLASFPFDQNPQLQFIFKEMHPLVFSFGDEDLVAADRPEQDVGLDMLWADFDFALESENIGTYYDDECQEGNQLDFSLASVTPCSRGKHEFVIDDQIGIRCKYCSLVNLEIKFMFPSLVSVFGEKSAWPNDKGVKNTLMFHDLYEQGVNDTEQSQDIHQYGTVWNLIPGVISTMYEHQREAFEFMWTNLVGDIRLDEIKHGAKPDVVGGCVICHAPGTGKTRLAIVFIQTYMKVFPDCRPVIIAPRGMLFAWDEEFKKWNVDVPFHILNTTDYTGKEDRDICKLIKKEHRTEKLTRLVKLLSWNKGHGILGISYGLYTKLTSEKPGCTEENKVRSILLDNPGLLVLDEGHTPRNERSVMWKTLGNVKTEKRIILSGTPFQNNFLELYNILCLVRPRFGEMFLTKSRVGRRHYVSKKQKDKFSDKYEKGVWASLTSNVTDDNAEKVRSILKPFVHIHNGNILRTLPGLRESVIILKPLPLQKSIIKKVENIGSGNNFEHEYVISLASTHPSLVTAINMSEEEASLIDKPMLAKVRSNPYEGVKTRFVIEVVRLSEALREKVLIFSQFIQPLELIKEHLRKFFKWREGKEILQMDGKILPRYRQASIEAFNNPNNDSRVLLASTRACCEGISLTGASRIVLLDVVWNPAVGRQAISRAFRIGQKKFVYTYNLITYGTGEGDKYDRQAEKDHLSKLVFSTEDEFNNVRNMLSKAEMEHCSKFISEDKVLEEMTSHDQLKGMFLKIHYPPTESNIVYSYNQIATE

SEQ ID NO: 11650 - protein, 132 aa, Salmonella enterica
FGDNGSGMHCHMSLAKNGTNLFSGDKYAGLSEQALYYIGGVIKHAKAINALANPTTNSYKRLVPGYEAPVMLAYSARNRSASIRIPVVASPKARRIEVRFPDPAANPYLCFAALLMAGLDGIKNKIHPGEAM

SEQ ID NO: 11651 - protein, 1435 aa, Zea mays
MDRATPRVCGRRGVSQAAVEAAPSSSRARRRDKAPAVVMDLGDDDCGGGGARKTVGGAAGRCEGSTKAPLPLLPPMMVPAGAVALRTRSRRRAMLAAAVVEEAPTKKKKKEGAIPDAAEAPRGHGSKAAATSMATSSHKRRAGTSRSTSRDKRRARSGRASEPARVGRARKRKRNELEAPARRERVKAPCVSESDDNSGRGDDASHDGDAEPRVGVAIGTDLVNGDHPAAKEVVEGAGDEDTGDGGNSGLASTADVFAEEMAPFEDDYDDEMLEEQLVGDVIRAYSNGRNFDSDGVDWEAEDEMEFNDDADNSDFMDDADDSDFMDDAYEGGNSKPIQNHAKLEIQDWVNQKVVLSGGRCEARGEGDLEEELDVGKEADEEDVEPKSEAAPGSDKRVLQLEILGSDEEIKVLENMSSAPSRKASVQSKLPTIPSCVAWRTRSSWGVNQDRLSYDTYFEELSDEPKEDDDDTEVELDEVEDDNNDDDSSDAYDKDDEEKEEEEEEAERRKLNNRICTSDEDMINITVPTSRYDMFKKKNSSRYDIEWVEDEDASVDMLQPVSFKKDSSWKPVAVGNDTFTEQQKRSRFTWELERRKKLKLEMKTNPLHERDLDSDPNSSGSDQIRKYGFKSDGSHKVDRKKKHTSPKSGKKPSSAIILKRQSLLKLLVDKMSGDKSLASFPFDQNPQLQFIFKEMHPLVFSFGDEDLVAADRPEQDVGLDMLWADFDFALESENIGTYYDDECQEGNQLDFSLAPVTPCSRGKHEFVIDDQIGIRCKYCSLVNLEIKFMFPSLVSVFAEKSAWPNDKGVKNTLMFHDLYEQGVNDTEQSQDIHQYGTVWNLIPGVISTMYEHQREAFEFMWTNLVGDIRLDEIKHGAKPDVVGGCVICHAPGTGKTRLAIVFIQTYMKVFPDCRPVIIAPRGMLFAWDEEFKKWNVDVPFHILNTTDYTGKEDREICKLIKKEHRTEKLTRLVKLLSWNKGHGILGISYGLYTKLTSEKPGCTEENKVRSILLDNPGLLVLDEGHTPRNERSVMWKTLGNVKTEKRIILSGTPFQNNFLELYNILCLVRPRFGEMFLTKSRVGRRHYVSKKQKDKFSDKYEKGVWASLTSNVTDDNAEKVRSILKPFVHIHNGNILRTLPGLRESVIILKPLPLQKSIIKKVENIGSGNNFEHEYVISLASTHPSLVTAINMSEEEASLIDKPMLAKVRSNPYEGVKTRFVIEVVRLSEALREKVLIFSQFIQPLELIKEHLRKFFKWREGKEILQMDGKILPRYRQASIEAFNNPNNDSRVLLASTRACCEGISLTGASRIVLLDVVWNPAVGRQAISRAFRIGQKKFVYTYNLITYGTGEGDKYDRQAEKDHLSKLVFSTEDEFNNVRNMLSKAEMEHCSKFISEDKVLEEMTSHDQLKGMFLKIHYPPTESNIVYSYNQIATE

SEQ ID NO: 11652 - protein, 682 aa, Solanum tuberosum
MATAALLRSLRRREFATSSISAYRTLASNTKPSWCPSLVGAKWAGLARPFSSKPAGNEIIGIDLGTTNSCVAVMEGKNPKVIENSEGARTTPSVVAFNQKGELLVGTPAKRQAVTNPTNTLSGTKRLIGRRFDDPQTQKEMKMVPYKIVRGSNGDAWVEANGQQYSPTQIGAFILTKMKETAEAYLGKSINKAVITVPAYFNDAQRQAIKDAGAIAGLDVQRIINEPTAAALSYGMNSKEGLVAVFDLGGGTFDVSILEISNGVFEVKATNGDTFLGGEDFDNALLEFLVSEFKRTEGIDLSKDKLALQRLREAAEKAKIELSSTSQTDINLPFITADASGAKHLNITLTRSKFETLVNHLIERTRNPCKNCLKDAGVSLKDVDEVLLVGGMTRVPKVQEIVSEIFGKSPSKGVNPDEAVAMGAALQGGILRGDVKELLLLDVTPLARGIETLGGIFTRLINRNTTIPTKKSQVFSTAADNQTQVGIKVLQGEREMASDNKLLGEFDLVGIPPAPKGYCPQIEVIFDIDANGMVTVSAKDKATSKEQQITIRSSGGLSEDEIDKMVREAEMHAQRIKNARHLLISGIVQSTTIYSIEKSLSEYKEKVPKEVVTEIETAISDLRAAMGTENIDDIKAKLDAANKAVSKIGEHMAGGSSGGASGGGGAQGGDQPPEAEYEEVKK

SEQ ID NO: 11653 - protein, 125 aa, Salmonella enterica
GSGMHCHMSLAKNGTNLFSGDKYAGLSEQALYYIGGVIKHAKAINALANPTTNSYKRLVPGYEAPVMLAYSARNRSASIRIPVVASPKARRIEVRFPDPAANPYLCFAALLMAGLDGIKNKIHPG

SEQ ID NO: 11654 - protein, 1060 aa, Pseudoalteromonas tunicata D2
MAKGFTKKDLLSLFDEIKTEQAREFPLTEIFLKRYFKPAVLENAKQYLTNKQIGQIDANNDFSQITSEVFNSLAEPSHQHIQIIRDNANITLNAHCSCKVQRKCKHIAAVLLKLKTEHSGEFGQNYLLHDWFNQLEKLKVNQKPLNKDVILFVIEPFKGSLIVTPKVASVAKNGKFGLGRLLTEKQLSSQVTPENLDEADFRLISWIRSQNTFGKLMLEGQWGAIALLKLIATERCFWQDSRDALSMTNSRPLEFNWHNEGNNLSLQANVTGCKSWQLFNTVPPYFIDVEQLVIGELVTPLQSDEIKHLLTMPVINTNMQTQVEQRFNQLFGMSVIKQNGEVSRKVKKLSIKPVISFEYFNQNPVVRLQFQYPNELLNSESELQDNSLGRNLSFENTCINRLKNAGFVDCKGPLQHVEYYSLAISAERPALWHCFVNEITQNLKKDGWQINGQALQQDEITEGQLMVHLSRDKKNKLVIEPYFFLADKRYAFADFLTISSLCNNTAQTFYYICLPNERWVAFAKVDVEILIAFYQEFYQGKKYPKRLNLPLAYARKLSGFQKSQITSDEASLLELTQLVAKDDFGAKLQVPKKLNATLRDYQIHGLHWLRFLKKFQLGGILADDMGLGKTLQTIAFLLAEQGKGKVKLPSLIICPTSLVNNWLQELQRFAPSLNVVVSFGSQRQKQFVKLSKADCVITTYPLLVRDEAIFNDIAFEHVILDEAQTIKNINAKVSRHVKALNSNFNLCLSGTPVENNLSELKSLLDFAMPGLLPSQTHFKEFYQTPIEKEHNQLRADQLKELVKPFLLRRTKAQVVTELPAKTEMVKMLELMPSQQKCYGEIRQKMEFKLKDLFAEIGIDKSRLAFLEALLKLRQICCSPQLLSDEGLQFSFADSTKLDWLAKHLPAMLQQGRKVIIFSQFTSMLSLIEQQLQALNLGYAILTGQTRDRQSAVDSFQQGDKSIFLISLKAGGTGLNLTAADTVIHFDPWWNPAVEQQATDRAYRIGQKKPVFVYKLICQDTIEERVYEMQQNKAALAESFFDAASKQFSVSSAEEILALLK

SEQ ID NO: 11655 - protein, 133 aa, Salmonella enterica
GSGMHCHMSLAKNGTNLFSGDKYAGLSEQALYYIGGVIKHAKAINALANPTTNSYKRLVPGYEAPVMLAYSARNRSASIRIPVVASPKARRIEVRFPDPAANPYLCFAALLMAGLDGIKNKIHPGEAMDKNLY

SEQ ID NO: 11656 - protein, 1166 aa, Zea mays
MASDSRPPKRSPSARRVAPRHAHHHHSQSSGGSTSRAGAGGGGGGAAATESVSKAVAQYNLDARLHAVFEQSGASGRSFDYSQSLRAPPTPSSEQQIAAYLSRIQRGGHIQPLGCTLAVADDSSFRLLAFSENAADLLDLSPHHSVPSLDSVALPPVSLGADARLYFSPSSAVLLERAFAAREISLLNPLWIHSRASSKPFYAILHRIDVGVVIDLEPARTEDPALSIAGAVQSQKLAVRAISRLQALPGGDVKLLCDTVVEHVRELTGYDRVMVYKFHEDEHGEVVAESRRDNLEPYLGLHYPATDIPQASRFLFQQNRVRMIADCHAIPVRVIQDPGLSQQLCLVGSTLRAPHGCHAQYMANMGSIASLVMAVIISSGGDDERTGRGAISSSMKLWGLVVCHHTSPRCIPFPLRYACEFLMQAFGLQLNMELQLAHQLSEKHILRTQTLLCDMLLRDSPAGIITQSPSVMDLVKCDGAALYYRGKYYPLGVTPTESQIKDIIEWLTVCHGDSTGLSTDSLADAGYLGAVALGDAVCGMAVAYITPSDYLFWFRSHTAKEIKWGGAKHHPEDKDDGQRMHPRSSFKAFLEVVKSRSLSWENAEMDAIHSLQLILRDSFRDAAEGTSNSKAIVNGQRQLGELELRGINELSSVAREMVRLIETATVPIFAVDTDGCINGWNAKIAELTGLSVEEAMGKSLVNDLIFKECDDIVEKLLSRALRGEEDKNVEIKLKTFGSEQSKGAIFVIVNACSSRDYTQNIVGVCFVGQDVTGQKVVMDKFINIQGDYKAIVHNPNPLLPPIFASDENTSCSEWNTAMEKLTGWSREEVVGKFLIGEVFGNCCRLKGPDALTKFMVVIHNAIEGHDSEKFPFSFFDKNGKYVQALLTANTRSKMDGKSIGAFCFLQIASAEIQQAFEIQRQQEKKCYARMKELAYICQEIKNPLSGIRFTNSLLQMTDLNDDQRQFLETSSACEKQMSKIVKDASLKSIEDGSLVLEKSEFSLGDVMNAVVSQTMSLLRERDLQLIRDIPDEIKDASAYGDQFRIQQVLADFLLSMAQSAPSENGWVEIQVRPNVKQNYDGTDTELFIFRFACPGEGLPADIVQDMFSNSQWSTQEGVGLSTCRKILKLMGGEVQYIRESERSFFLIVLELPQPRLAAGRENQLIC

SEQ ID NO: 11657 - protein, 333 aa, Zea mays
MEAEAAAKRAREGGEDATAPVAGAEAVVAGAGEQAGISAVIPGWFSEISPMWPGEAHSLKVEKVLFQGKSDYQNVMVFQSSTYGKVLVLDGVIQVTERDECAYQEMITHLPLCSIKDPKKVLVIGGGDGGVLREVSRHISVEQIDICEIDKMVVDVSKQFFPHLAVGFEDPRVSLHIGDGVAFLKNAPEGTYDAVIVDSSDPIGPAQELFEKPFFQSVARALRPGGVVCTQAESIWLHMHIIEDIFVNCRQVFKGSVNYAWTTVPTYPSGVIGFMLCSTEGPAVDFQHPVFNIEEDEHSTKSKGPLKFYNSEIHTASFCLPSFAKRVIESKAS

SEQ ID NO: 11658 - protein, 144 aa, Salmonella enterica
FMPKPMFGDNGSGMHCHMSLAKNGTNLFSGDKYAGLSEQALYYIGGVIKHAKAINALANPTTNSYKRLVPGYEAPVMLAYSARNRSASIRIPVVASPKARRIEVRFPDPAANPYLCFAALLMAGLDGIKNKIHPGEAMDKNLYD

SEQ ID NO: 11659 - protein, 611 aa, Bacillus subtilis subsp. subtilis str. 168
MSKVIGIDLGTTNSCVAVLEGGEPKVIANAEGNRTTPSVVAFKNGERQVGEVAKRQSITNPNTIMSIKRHMGTDYKVEIEGKDYTPQEVSAIILQHLKSYAESYLGETVSKAVITVPAYFNDAERQATKDAGKIAGLEVERIINEPTAAALAYGLDKTDEDQTILVYDLGGGTFDVSILELGDGVFEVRSTAGDNRLGGDDFDQVIIDHLVSEFKKENGIDLSKDKMALQRLKDAAEKAKKDLSGVSSTQISLPFITAGEAGPLHLELTLTRAKFEELSSHLVERTMGPVRQALQDAGLSASEIDKVILVGGSTRIPAVQEAIKKETGKEAHKGVNPDEVVALGAAIQGGVITGDVKDVVLLDVTPLSLGIETMGGVFTKLIDRNTTIPTSKSQVFSTAADNQTAVDIHVLQGERPMSADNKTLGRFQLTDIPPAPRGVPQIEVSFDIDKNGIVNVRAKDLGTGKEQNITIKSSSGLSDEEIERMVKEAEENADADAKKKEEIEVRNEADQLVFQTEKTLKDLEGKVDEEQVKKANDAKDALKAAIEKNEFEEIKAKKDELQTIVQELSMKLYEEAAKAQQAQGGANAEGKADDNVVDAEYEEVNDDQNKK

SEQ ID NO: 11660 - protein, 397 aa, Oryza sativa
MEGGGARNGSTTGAARTGGSGGDAAAGGGGGSAGNGKPLPPCCVKARAAAPESEAKCHATVVSGWFTEPRSRGGKTSKVQYYNNPMWPGEAHSLKVEKILYQGKSPYQEVLVFESSTYGKVLVLDGIVQLTDKDECAYQEMITHLPLCSIPSPKKVLVIGGGDGGVLREICRHGSVESIDICEIDQLVIDVCKDFFPDLSVGFKDPRVRLHVGDAVEFLRNAPEGTYDAIIVDSSDPIGPAQELVEKPFFDTIARALRPGGVLCNQAESMWLHTHLIQDMLSICRETFKGSVHYAWTSVPTYPSGVIGFLLCAKEGPPVNFLTPANPIEKLEGAMEAGRDIRFYNSEMHRAAFVLPTFARRELEAYCTTVEREQQEETTAEPLKMNIMPNSEILTAS

SEQ ID NO: 11661 - protein, 283 aa, Clostridium perfringens SM101
MELWYTEEHTDKVRFSIKVDEQLYSGKSDFQRIDVFKSQEFGTFFTLDGLMMVTEKDEFIYHDMIVHVPMATNPNIKNVLVIGAGDGGTVRELTRYETIEKIDMVEIDKLVVDVCREYLPQTANKLDDPRVSLFFEDGLKFVRSVENKYDLIIVDSTDPFGPGEGLFTREFYGNCFKALKEDGILVNQHESPYYEEYARGMKRAHKRIKECFPVCRVYQAHIPTYPSGHWLFGFASKKYDPLNANIEKWNDLGLKTKYYNTDLHKGCFALPNYVKEMLENVDE

SEQ ID NO: 11662 - protein, 204 aa, Triticum aestivum
PPIIFNAGFQVKKKQFLRNFATIILFGAAGTLISFVIITFGAMGLFSKLDVGPLELGDYLAIGAIFSATDSVCTLQVLNQDEAPLLYSLVFGEGVVNDATSVVLFNAIQNIDINHFDVFVLLQFIGKFLYLFFTSTVLGVAAGLLSAYIIKKLCFARHSTDREVAIMILMAYLSYMLSMLLDLSGILTVFFCGIVMSHYTWHNV

SEQ ID NO: 11663 - protein, 225 aa, Brassica napus
  misc_feature (123)..(123): Xaa can be any naturally occurring amino acid
  misc_feature (190)..(191): Xaa can be any naturally occurring amino acid
MGETTTDSEHGIMLGFEDPMRIDPRRDRFPCCIVWTPLPFITWLVPFIGHVGICREDGVILDFAGPNFVCVDNFAFGAVSRYIQINKAKESSLSSGSCLFNEEGDTHEKEPTWDDALRKGTQXYQHYSYNILTCNCHSFVANNLNRLAMRSGGWNVVNLAVLVFLKGRWVSKTAMVKSLLPTVIIYAIGXXLGGWTFIASCCVLACLLTGWFIMGTYCFKKLIQL

SEQ ID NO: 11664 - protein, 622 aa, Populus tomentosa
MEAGKKNSLFCCVASLICLWTTAYGELTAAGVNYEVEALMGFKNSLHDPHNILNWDEHAVDPCSWAMVTCSPDNFVTSLGAPSQRLSGTLSPYIGNLTNLQSLLLQDNNISGHIPSELGRLPKLKTIDLSSNNFSGQIPSALSNLNNLQYLRLNNNSLDGAIPASLVNMTQLTFLDLSYNDLSTPVPPVHAKTFNIVGNPQICGTEQGCAGTTPVPQSVALNNSQNSQPSGNNKSHKIALAFGSSLGCICLLVLGFGFILWWRQRHNQQIFFDVNEQHNEELSLGNLRSFQFKELQVATNNFSSKNLIGKGGFGNVYKGYLQDGTVVAVKRLKDGNAIGGVIQFQTEVEMISLAVHRNLLRLHGFCMTTTERLLVYPYMSNGSVATRLKAKPALDWGTRKRIALGAARGLLYLHEQCDPKIIHRDVKAANILLDDYCEAVVGDFGLAKLLDHRDSHVTTAVRGTVGHIAPEYLSTGQSSEKTDVFGFGILLLELISGLRALEFGKSTNQKGALLDWVKKIHLEKKLELLVDKDLKNNYDRIELEEIVQVALLCTQYLPSHRPKMSEVVRMLEGDGLAEKWEASQRAEESRSRANEFSSSERYSDLTDDSSLLVQAMELSGPR

SEQ ID NO: 11665 - protein, 491 aa, Bacillus cereus E33L
MKLHTLVSCLHDFPVVPKENPEITSIEADSRKVKEGSLFVCMKGYTVDSHDFAKQAAAQGAAAIVAERPIDVDVPVVLVKNTFRSLAVLADYFYGQPTHKLHLIGITGTNGKTTTSHIMDEIMRAHGHKTGLIGTINMKIGDETFEVKNTTPDALTLQQTFAKMVEHGVDSTVMEVSSHALDLGRVHGCDYDVAVFTNLTQDHLDYHKTMEEYKHAKGLLFAQLGNSYNHNREKYAVLNNDDAVTAEYMRSTAATVVTYGIDTTSDVMAKDIVMTSGGTTFTLVTPYESVNVTMKLIGKFNVYNVLAATAAGLVSGVSLETIIDVIKELAGVPGRFEVVDGGQNYTVIVDYAHTPDSLENVLKTAKQFAKGDVYCIVGCGGDRDRTKRPIMASVATKYATHAIYTSDNPRSEDPAAILDDMVHGVSGNNYEVIIDRKEAIHHAITKAKADDIIIIAGKGHETYQIIGKDVHHFDDREVAKEAITERLNNEE

SEQ ID NO: 11666 - protein, 874 aa, Candida albicans SC5314
MLYRVSGFYKRHTRNFTNIDYGYYIRNFIHHIASKIYPYAKVVLPNFRAAHYFYILTLVILGSILVYPVKTCAYIDVLFFTAGASTQAGLNTVNVNDLSLYQQIVLYLLATLATPIFIHGSLLFVRLYYFERHFDNIKERSLMDYRMRKSATLARLGSAPTMSSTRLNTFNNQVLGFQEREAEKGSSSSPQSSSSQTSQPVSTAYNDQGGNDIEHHSEPSDSDDDESGNGPVTFQEKIHFEEPQRPRSQRRHSRTDSGIKFSALPHPRRRKSIDPEDMYRSINMLQEHKKNQEAKSKGIQFLNIGSPVRRKSRSSNIEAFPEEDTNPSRGDEITPATNSVGTGNNDEDEDDILIIKPPIEIENSDEANPIFTKKKKLASQIQFKETPGKAKKWITTKTCKHYNPWTSKLKKTLSNSSKKGSLSVVPTDTEDDSEDEEYASIDSETSDISDNEHAADNAEGSDVDSVGSYEEDEDEDEHNSDDDDDGEGERRLGNGASLTKAQSHLVLPSKDETGGKKYTKRSNTLDTPQQNTSDGRKIRKKAPKRKTPRTQRNASFNQHSNVSIGDGSIENVDTNDSYQRLSRTMSGNYLSWTPTVGRNSTFIKLTDEQKEELGGIEYRAVKLLIKIIVVYYVGFNIIPGVMLSIWIYCMPHYKNLMISSSISPAWWAFFTSQSSFNDLGLTLTSNSMMSFNQNAFVQILCSFLIVIGNTGFPILLRFIIWVMFKTARPLSLYKESLGFLLDHPRRCFTLLFPSVPTWWLFFILVVLNGFDLVIFCILDLHDDTFKGVDMGYRVLNGLFQAFCTRTVGFSVMDLSQLHAATQVSYLIMMYISFCPIAISVRRTNVYEEQSWGYMPRRMQRVLMRVRHQTMLGRI

SEQ ID NO: 11667 - protein, 1120 aa, Saccharomyces cerevisiae
MTTQQEEQRSDTKNSKSESPSEVLVDTLDSKSNGSSDDDNIGQSEELSDKEIYTVEDRPPEYWAQRKKKFVLDVDPKYAKQKDKSDTYKRFKYLLGVTDLFRHFIGIKAKHDKNIQKLLKQLDSDANKLSKSHSTVSSSSRHHRKTEKEEDAELMADEEEEIVDTYQEDIFVSESPSFVKSGKLRDYQVQGLNWLISLHENKLSGILADEMGLGKTLQTISFLGYLRYVKQIEGPFLIIVPKSTLDNWRREFLKWTPNVNVLVLHGDKDTRADIVRNIILEARFDVLITSYEMVIREKNALKRLAWQYIVIDEAHRIKNEQSALSQIIRLFYSKNRLLITGTPLQNNLHELWALLNFLLPDIFGDSELFDEWFEQNNSEQDQEIVIQQLHSVLNPFLLRRVKADVEKSLLPKIETNVYVGMTDMQIQWYKSLLEKDIDAVNGAVGKREGKTRLLNIVMQLRKCCNHPYLFEGAEPGPPYTTDEHLIFNSGKMIILDKLLKRLKEKGSRVLIFSQMSRLLDILEDYCYFRDFEYCRIDGSTSHEERIEAIDEYNKPNSEKFVFLLTTRAGGLGINLVTADTVILFDSDWNPQADLQAMDRAHRIGQKKQVHVYRFVTENAIEEKVIERAAQKLRLDQLVIQQGTGKKTASLGNSKDDLLDMIQFGAKNMFEKKASKVTVDADIDDILKKGEQKTQELNAKYQSLGLDDLQKFNGIENQSAYEWNGKSFQKKSNDKVVEWINPSRRERRREQTTYSVDDYYKEIIGGGSKSASKQTPQPKAPRAPKVIHGQDFQFFPKELDALQEKEQLYFKKKVNYKVTSYDITGDIRNEGSDAEEEEGEYKNAANTEGHKGHEELKRRIEEEQEKINSAPDFTQEDELRKQELISKAFTNWNKRDFMAFINACAKYGRDDMENIKKSIDSKTPEEVEVYAKIFWERLKEINGWEKYLHNVELGEKKNEKLKFQETLLRQKIEQCKHPLHELIIQYPPNNARRTYNTLEDKFLLLAVNKYGLRADKLYEKLKQEIMMSDLFTFDWFIKTRTVHELSKRVHTLLTLIVREYEQPDANKKKRSRTSATREDTPLSQNESTRASTVPNLPTTMVTNQKDTNDHVDKRTKIDQEA

SEQ ID NO: 11668 - protein, 552 aa, Arabidopsis thaliana
MVIGLSTMLEKTEALFASDHASVVSMNLFVALLCACIVLGHLLEETRWMNESITALIIGSCTGIVILLISGGKSSRILVFSEDLFFIYLLPPIIFNAGFQVKKKQFFRNFMTIMLFGAIGTLISFVIISFGAKHLFEKMNIGDLTIADYLAIGAIFSATDSVCTLQVLNQDETPLLYSLVFGEGVVNDATSVVLFNAIQRFDLTNINSAIALEFAGNFFYLFILSTALGVAAGLLSAFVIKKLYIGRHSTDREVALMMLLAYLSYMLAELFHLSSILTVFFCGIVMSHYTWHNVTDKSKVTTKHTFAAMSFLAEIFIFLYVGMDALDIEKWDVVRNSPGQSIGVSSILLGLILLGRAAFVFPLSFLSNLTKSSPDEKIDLKKQVTIWWAGLMRGAVSMALAYNQFTTSGHTKVLGNAIMITSTITVVLFSTVVFGLLTKPLVKHLQPSSKQSSTTALQITLRSSFHDPILHEPLLSTQGQSEYDPEQHVSFRMFWKSPSRAIHHYWRKFDNAVMRRIFGGRGVSPVVPGSPIENSVPQWSEEVENKEQNGEP

SEQ ID NO: 11669 - protein, 539 aa, Zea mays; identical to SEQ ID NO: 10764

SEQ ID NO: 11670 - protein, 289 aa, Francisella tularensis subsp. holarctica
MIANINNKKIFHETLYHSYHQSIAISEILYEHKTDYQHLVIFNNPIFGNVMVLDGIVQTTEKDEFIYHEMLVHVPVIAHGNVKNILIIGGGDGGMLREALSHKAVEFVTLVEIDQAVIDMCQEYFPGHSKGAFDHPKAKIVIQDGCEFVKNPPRKYDLIICDSTDPIGPGEVLFTSKFYKDCKEALNPGGIMVTQNGVIYFQIDELKKTLERFEPLYKDVSFYTAAVPTYVGGSMAFGWGTDELSYRNHDIQVIAQRFLKSGIKTKYYNPAIHIAAFALPQYVIDTLKK

SEQ ID NO: 11671 - protein, 468 aa, Roseovarius nubinhibens ISM
MSATDLLKMIKDEDIEYVDVRFTDPRGKLQHVTLMSDQVDEDFLEEGFMFDGSSIAGWKSIEASDMKLMIDTDSAYVDPFYAEKTLCVHCSVVEPDTGEAYERDPRGTAEKAEAYLKASGIGDVAYMGPEAEFFLFDDVRFSNTINKVSYEVDAQDASWNSDTEYEMGNMGHRPGVKGGYFPVNPIDDAQDIRSEMLSTMKRLGMKVDKHHHEVASCQHELGLIFDSLTKQADELQKYKYVIHNVAHAYGKTATFMPKPIAGDNGTGMHVNMSIWKDGKPLFAGDKYADLSQEALYFIGGILKHAKSLNAFTNPATNSYKRLIPGFEAPVLRAYSARNRSGCVRIPWTESPKAKRVEARFPDPAANPYLAFAALLMAGLDGIKSKIDPGEAMDKNLYDLPAEELEGIPTVCGSLREAMEELKADHDYLLAGDVFTKDQIDGYIALKMEEIELYEHTPHPVEFGMYYSC

SEQ ID NO: 11672 - protein, 1417 aa, Oryza sativa
MDENRKLSDDMSKKMEPIHSNGEAGEDKTIIIEPESDANKLEVETDARHGICEAHKAHEYGTMENDLHEEASTTDDDSENDSYEYLLRESDNEQTSESDAGEGDNEAPLTDEEVETLITEFLDAESKAAQAQESLEKESLEKIESEVRLELSESLQGNELESAVSTEMKQYKKEWESELDDLETHIAVLLEQLDAAGVELPSLYKSIESQVPNVCETEAWKNRAHWAGYQVPEEANKSIRKADEYLQSCRPVRRKHGRLLEEGASGFLAGKIPVGDDGSAQCHEKSWNAFNELTKSKEYAESSFGSSNWASVYLASTPQEAAALGLQFPGVDEVEEIAEVEGAVSDIKGVDEIELSEVQRRKYRKVPEEDDAKMTKRLQRHLKERRTRHLHKENIGLASSSNGCCELPPKKLKTYENGVSVELAKRTREDDVEFDNKRSKTVIIESDDDMQTDSKPDSAPSENADEIIDLDIFPSQSPKLGDKVRPKPFKCTICTEMLNVPEVHRHPVLDVIICGSCRFLVIEKNRLEDPVSGGYCTWCVKSEQLQSCSSCKLLFCRNCLSKNFGEEGLSEARVAGWQCCCCLPSQLEHLISDCDKALGGVESSDPENDFAELSVLESNGPFSKHKMKKRIRRIMDDEELGEETKLKIAMEKARQEHLKSMQEQSASKLKSNNIGISLEAPSEVSEYVGDGHIVNLAREEDEAPVRIPSSISAKLKPHQVSGIRFMWENVIQSVKKVKSGDKGFGCILAHNMGLGKTFQVITFLYTVMRCIQLGLRTALIVTPVNVLHNWKKEFIKWCPAELKPLRVYMLEDVPRCRANIQYLLKKWRIKGGVLLIGYSSFRNLSLGRSARDKTVANEITNALQMWVLIQSIYICHNQCGPDILVCDEAHIIKNRRADTTQALKQMVDFVREGYLGSSHEFRNRFQNPIENGQHTNSTSDDVKIMNQRSHILYEQLKGFVQRMDMNVVKNDLPEKKVFVVTVKLSQLQRKLYRRFLDVNGFSSSAASEKSFQRSGFFAKYQTLALIWNHPGLLQMAKQKGNLRQEDVESFLMDESSSDDNIENYLPNGEKLRSRNDQLSKKSSDVVNEESNWWENLLDENAYKEADYSGKMVLLLDILSSCSELGDKALVFSQSLSTLDLVEFYLSKLQVNGKEGKYWKQGKDWYRIDGSTPSSERQNLVERYGQTKPVYAYRLMAHATMEEKIYKRQVTKEGLAARVVDRQQVSRTISKEEMLHLFEFGDEELLEQSGSTMNGHSKVGTEKPPTPNSSETTEHLPLDRLMVNLLHDHSRWIASYHEHETLLQENEEERLTKEEQDMAWLSYNKLLEVAPRKATHDAERKPSTVPTESSLIQPPKATSRSRQPQQPKITSNNQKKCNNLSHLLTLRSQGTKPGCSTSCKECGQDISWETLNRDGRSR

SEQ ID NO: 11673 - protein, 1126 aa, Sinorhizobium meliloti
MKYSENDIIGAVGVNAFSAGRAYQRQGRVIAFEWGDDGDITSQVRGSSPKPYRQRIFIDTNRKGRVAVEGNCSCPVAFSCKHVAASLLHGLIRVAEPASFPTLTAPGPMGNSVAPGTQVQTPLSLSSPVADWLNRLRQADAKSLRGAENLPQRLIYVLSPERTSTAMPRLRLEIRSGRVLKDGTMSPTSSAYSLDNWHSRSEAKFLRDADRKILQVITSIPRSAVHGSNYALTTERGAEVLDQILATGRARWMTIDGVDLSQGAAISGRIQWEPGKGGSLRAALRLEDPSQAEKRVCLNAMPPVYVDAAAGVVGRIETALAPMVVYEMLDGPDIPAAQVPLVAAHLRASGARLATTAPPQLAEVQIIKGPFQPVLQLMTVQMPLPYRPGLYTYGQTEAVGIARVAFCYGGWAVVATETAAIALHMDGLTPVEVHRNPKAEKVALNQLRLANFLPAPRVRDGVPAVNHKDFLPDEGESNWYDALYHDIPDLEQHGWRIEIAADFPCRLLRGDGAFEARLQGSGLDWFEFDLGVIVGGERLDLIGPLIRLLSMIQPETLDLLDDDDPLFLPLQHGQVLAVPVGRILPLIRTLFDLFNLTGEPGADGSLRLSSLDAASLADLEAAAGAGVLWQGGEGVRALGQKLRDHGGIPDVELPPWFSATLRPYQARGLAWLAFLKDAGLGGILSDDMGLGKTVQALGLIAIEKAAGRLSGPALVIAPTSLMVNWATEAEKFAPDLSILVLQGSDRKQRFDSLDTVDLVLTTYPLLARDQAILAERDWYMIFLDEAQVIKNANATTTKLVHALKSPHRFCLTGTPLENHLGEVWSLFHFIAPGFLGDLKTFTRNWRTPIEKKGDTARARLLAGRIKPFLLRRTKEEVASDLPPKTVITERVEFTSGQRTIYESIRLAMHTRVQAAIAEKGLARSHIVILDALLKLRQACCDPRLLKLTDTKKPSSVQAESAKLDRLMELVGELADEGRKVIVFSQFTSMLDLIRRRLDDADIAYALLTGDTVDRGTQVESFQHGTMPVFLISLKAGGVGLNLTAADTVILYDPWWNPAVEEQAIDRAHRIGQDKPVFVYRLVAADTIEEKMDVLKDKKRALAASLFDHDGQPTLAMTEADFDLLLG

SEQ ID NO: 11674 - protein, 493 aa, Shewanella sp. MR-4
MMLLRDLLAPWFPYAGEQTFLDLTLDSRAIRRGDVFLALPGHKVDGRQFIDKALAQGAIAVLVHTDSIEEQGKVIATEQGVQIYFYQLAKQVSAVAAVRYPVVQGQSMGIVGITGTNGKTSTSQLCAQLVTLLEGKAAVMGTLGNGLWGELVDSGNTTADAITLMRQLYEFADKGVNTCAMEVSSHGLVQGRVDAVPFDVAVFTNLTRDHLDYHGDMENYAAAKQMLFRFDALRHGLVNLDDPVGAAWLSELANVPAKMWGFSIEAHTEAAFYTKNAQFNDQGVQAKLVWPEGEIDIRSPLLGAFNLSNLLAALSALYLQGVDMRALAAKVPYLVPVAGRMERFTTADNITLVVDYAHTPDAIEQALNALRRHCAGELWCVFGCGGDRDKGKRPLMGQAAEQCADRIMVTSDNARSEDPNQIITDIIQGLTHPERALTEVDRVAAIKRVVAQAKPGDVILLAGKGHETYQEAAGVRHDYDERALARQLSEQSQ

SEQ ID NO: 11675 - protein, 255 aa, Oryza sativa Japonica Group
MESRPGGTNLVEPRGQGALPSGIPIQQPWWTTSAGVGAVSPAVVAPGSGAGISLSGRDGGGDDAAEESSDDSRRSGETKDGSTDQEKHHATSQMTALASDYLTPFSQLELNQPIASAAYQYPDSYYMGMVGPYGPQAMTHFQLPGLTHSRMPLPLEISEEPVYVNAKQYHGILRRRQSRAKAELEKKVVKSRKPYLHESRHQHAMRRARGTGGRFLNTKKNEDGAPSEKAEPNKGEQNSGYRRIPPDLQLLQKET

SEQ ID NO: 11676 - protein, 1435 aa, Zea mays
MDRATPRVCGRRGVSQAAVEAAPSSSRARRRDKAPAVVMDLGDDDCGGGGARKTVGGAAGRCEGSTKAPSPMLPPMMVPAGAVALRTRSRRRAMLAAAVVEEAPTKKKKKEGAIPDAAEATRGHGSKAAATSMATSSHKRRAGTSRSTSRDKRRARSGRASEPARVGRARKRKRNELEAPARRERVKAPCVSESDDNSGRGDDASHDGDAEPRGGVAIGTDLVNGDHPAAKEVVEGAGDEDTGDGGNSGLASTADVVAEEMAPFEDDYDDEMLEEQLVGDVIRAYSNGRNLDSDGVDWEAEDEMEFNDDADNSDFMDDADDSDFMDDAYEGGNSKPIQNHAKLEIQDWVNQKVVLSGGRCEVRGEGDLEEELGVGKEADEEDVEPKSEAAPGSDKRVLQLEILGSDEEIKVLENMSSAPSRKASVQSKLPTIPSCVAWRTRSSWGVNQDRLSYDTYFEELSDEPKEDDDDTEVELDEVEDDNNDDDSSDAYDKDDEEKEEEEEEAERRKLNNRICTSDEDMINITVPTSRYDMFKKKNSSRYDIEWVEDEDASVDMLQPVSFKKDSSWKPVAVGNDTFTEQQKRSRFTWELERRKKLKLEMKTNPLHERDLDSDPNSSGSDQIRKYGFKSDGSHKVDRKKKHTSPKSGKKPSSAIILKRQSLLKLLVDKMSGDKSLASFPFDQNPQLQFIFKEMHPLVFSFGDEDLVAADRPEQDVGLDMLWADFDFALESENIGTYYDDECQEGNQLDFSLASVTPCSRGKHEFVIDDQIGIRCKYCSLVNLEIKFMFPSLVSVFGEKSAWPNDKGVKNTLMFHDLYEQGVNDTEQSQDIHQYGTVWNLIPGVISTMYEHQREAFEFMWTNLVGDIRLDEIKHGAKPDVVGGCVICHAPGTGKTRLAIVFIQTYMKVFPDCRPVIIAPRGMLFAWDEEFKKWNVDVPFHILNTTDYTGKEDRDICKLIKKEHRTEKLTRLVKLLSWNKGHGILGISYGLYTKLTSEKPGCTEENKVRSILLDNPGLLVLDEGHTPRNERSVMWKTLGNVKTEKRIILSGTPFQNNFLELYNILCLVRPRFGEMFLTKSRVGRRHYVSKKQKDKFSDKYEKGVWASLTSNVTDDNAEKVRSILKPFVHIHNGNILRTLPGLRESVIILKPLPLQKSIIKKVENIGSGNNFEHEYVISLASTHPSLVTAINMSEEEASLIDKPMLAKVRSNPYEGVKTRFVIEVVRLSEALREKVLIFSQFIQPLELIKEHLRKFFKWREGKEILQMDGKILPRYRQASIEAFNNPNNDSRVLLASTRACCEGISLTGASRIVLLDVVWNPVVGRQAISRAFRIGQKKFVYTYNLITYGTGEGDKYDRQAEKDHLSKLVFSTEDEFNNVRNMLSKAEMEHCSKFISEDKVLEEMTSHDQLKGMFLKIHYPPTESNIVYSYNQIATE

SEQ ID NO: 11677 - protein, 1132 aa, Arabidopsis thaliana
MDMTSCVARRTRSRTESYLNSILNKSKGISGEEEDQSLGCVNSRTEKRRVNMRDACSPSPRKKKRRRRKDDDDDVVFVRTEYPEGKRDDENVGSTSGNLQSKSFDFGDRVCDFDADDRNLGCEEKASNFNPIDDDDDVVFVGTVQRENDHVEDDDNVGSASVISPRVCDFDEDDAKVSGKENPLSPDDDDDVVFLGTIAGENQHVEDVNAGSEVCDILLDDANLRGEEKTYVSDEVVSLSSSSDDEEDPLEELGTDSREEVSGEDRDSGESDMDEDANDSDSSDYVGESSDSSDVESSDSDFVCSEDEEGGTRDDATCEKNPSEKVYHHKKSRTFRRKHNFDVINLLAKSMLESKDVFKEDIFSWDKIAEVDSREDPVVRESSSEKVNEHGKPRERRSFHRVREKNHLNGESFYGGEKLCDGEETINYSTEDSPPLNLRFGCEEPVLIEKTEEEKELDSLWEDMNVALTLEGMHSSTPDKNGDMLCSKGTHDFVLDDEIGLKCVHCAYVAVEIKDISPAMDKYRPSVNDNKKCSDRKGDPLPNRLEFDASDPSSFVAPLDNIEGTVWQYVPGIKDTLYPHQQEGFEFIWKNLAGTTKINELNSVGVKGSGGCIISHKAGTGKTRLTVVFLQSYLKRFPNSHPMVIAPATLMRTWEDEVRKWNVNIPFYNMNSLQLSGYEDAEAVSRLEGNRHHNSIRMVKLVSWWKQKSILGISYPLYEKLAANKNTEGMQVFRRMLVELPGLLVLDEGHTPRNQSSLIWKVLTEVRTEKRIFLSGTLFQNNFKELSNVLCLARPADKDTISSRIHELSKCSQEGEHGRVNEENRIVDLKAMIAHFVHVHEGTILQESLPGLRDCVVVLNPPFQQKKILDRIDTSQNTFEFEHKLSAVSVHPSLYLCCNPTKKEDLVIGPATLGTLKRLRLKYEEGVKTKFLIDFIRISGTVKEKVLVYSQYIDTLKLIMEQLIAECDWTEGEQILLMHGKVEQRDRQHMIDNFNKPDSGSKVLLASTKACSEGISLVGASRVVILDVVWNPSVESQAISRAFRIGQKRAVFIYHLMVKDTSEWNKYCKQSEKHRISELVFSSTNEKDKPINNEVVSKDRILDEMVRHEKLKHIFEKILYHPKKSDMNTSFF

SEQ ID NO: 11678 - protein, 1435 aa, Zea mays
MDRATPRVCGRRGVSQAAVEAAPSSSRARRRDKAPAVVMDLGDDDCGGGGARKTVGGAAGRCEGSTKAPSPMLPPMMVPAGAVALRTRSRRRAMLAAAVVEEAPTKKKKKEGAIPDAAEATRGHGSKAAATSMATSSHKRRAGTSRSTSRDKRRARSGRASEPARVGRARKRKRNELEAPARRERVKAPCVSESDDNSGRGDDASHDGDAEPRGGVAIGTDLVNGDHPAAKEVVEGAGDEDTGDGGNSGLASTADVVAEEMAPFEDDYDDEMLEEQLVGDVIRAYSNGRNLDSDGVDWEAEDEMEFNDDADNSDFMDDADDSDFMDDAYEGGNSKPIQNHAKLEIQDWVNQKVVLSGGRCEVRGEGDLEEELGVGKEADEEDVEPKSEAAPGSDKRVLQLEILGSDEEIKVLENMSSAPSRKASVQSKLPTIPSCVAWRTRSSWGVNQDRLSYDTYFEELSDEPKEDDDDTEVELDEVEDDNNDDDSSDAYDKDDEEKEEEEEEAERRKLNNRICTSDEDMINITVPTSRYDMFKKKNSSRYDIEWVEDEDASVDMLQPVSFKKDSSWKPVAVGNDTFTEQQKRSRFTWELERRKKLKLEMKTNPLHERDLDSDPNSSGSDQIRKYGFKSDGSHKVDRKKKHTSPKSGKKPSSAIILKRQSLLKLLVDKMSGDKSLASFPFDQNPQLQFIFKEMHPLVFSFGDEDLVAADRPEQDVGLDMLWADFDFALESENIGTYYDDECQEGNQLDFSLASVTPCSRGKHEFVIDDQIGIRCKYCSLVNLEIKFMFPSLVSVFGEKSAWPNDKGVKNTLMFHDLYEQGVNDTEQSQDIHQYGTVWNLIPGVISTMYEHQREAFEFMWTNLVGDIRLDEIKHGAKPDVVGGCVICHAPGTGKTRLAIVFIQTYMKVFPDCRPVIIAPRGMLFAWDEEFKKWNVDVPFHILNTTDYTGKEDRDICKLIKKEHRTEKLTRLVKLLSWNKGHGILGISYGLYTKLTSEKPGCTEENKVRSILLDNPGLLVLDEGHTPRNERNVMWKTLGNVKTEKRIILSGTPFQNNFLELYNILCLVRPRFGEMFLTKSRVGRRHYVSKKQKDKFSDKYEKGVWASLTSNVTDDNAEKVRSILKPFVHIHNGNILRTLPGLRESVIILKPLPLQKSIIKKVENIGSGNNFEHEYVISLASTHPSLVTAINMSEEEASLIDKPMLAKVRSNPYEGVKTRFVIEVVRLSEALREKVLIFSQFIQPLELIKEHLRKFFKWREGKEILQMDGKILPRYRQASIEAFNNPNNDSRVLLASTRACCEGISLTGASRIVLLDVVWNPAVGRQAISRAFRIGQKKFVYTYNLITYGTGEGDKYDRQAEKDHLSKLVFSTEDEFNNVRNMLSKAEMEHCSKFISEDKVLEEMTSHDQLKGMFLKIHYPPTESNIVYSYNQIATE

SEQ ID NO: 11679 - protein, 1435 aa, Zea mays
MDRATPRVCGRRGVSQAAVEAAPSSSRARRRDKAPAVVMDLGDDDCGGGGARKTVGGAAGRCEGSTKAPSPMLPPMMVPAGAVALRTRSRRRAMLAAAVVEEAPTKKKKKEGAIPDAAEATRGHGSKAAATSMATSSHKRRAGTSRSTSRDKRRARSGRASEPARVGRARKRKRNELEAPARRERVKAPCVSESDDNSGRGDDASHDGDAEPRGGVAIGTDLVNGDHPAAKEVVEGAGDEDTGDGGNSGLASTADVVAEEMAPFEDDYDDEMLEEQLVGDVIRAYSNGRNLDSDGVDWEAEDEMEFNDDADNSDFMDDADDSDFMDDAYEGGNSKPIQNHAKLEIQDWVNQKVVLSGGRCEVRGEGDLEEELGVGKEADEEDVEPKSEAAPGSDKRVLQLEILGSDEEIKVLENMSSAPSRKASVQSKLPTIPSCVAWRTRSSWGVNQDRLSYDTYFEELSDEPKEDDDDTEVELDEVEDDNNDDDSSDAYDKDDEEKEEEEEEAERRKLNNRICTSDEDMINITVPTSRYDMFKKKNSSRYDIEWVEDEDASVDMLQPVSFKKDSSWKPVAVGNDTFTEQQKRSRFTWELERRKKLKLEMKTNPLHERDLDSDPNSSGSDQIRKYGFKSDGSHKVDRKKKHTSPKSGKKPSSAIILKRQSLLKLLVDKMSGDKSLASFPFDQNPQLQFIFKEMHPLVFSFGDEDLVAADRPEQDVGLDMLWADFDFALESENIGTYYDDECQEGNQLDFSLASVTPCSRGKHEFVIDDQIGIRCKYCSLVNLEIKFMFPSLVSVFGEKSAWPNDKGVKNTLMFHDLYEQGVNDTEQSQDIHQYGTVWNLIPGVISTMYEHQREAFEFMWTNLVGDIRLDEIKHGAKPDVVGGCVICHAPGTGKTRLAIVFIQTYMKVFPDCRPVIIAPRGMLFAWDEEFKKWNVDVPFHILNTTDYTGKEDRDICKLIKKEHRTEKLTRLVKLLSWNKGHGILGISYGLYTKLTSEKPGCTEENKVRSILLDNPGLLVLDEGHTPRNERSVMWKTLGNVKTEKRIILSRTPFQNNFLELYNILCLVRPRFGEMFLTKSRVGRRHYVSKKQKDKFSDKYEKGVWASLTSNVTDDNAEKVRSILKPFVHIHNGNILRTLPGLRESVIILKPLPLQKSIIKKVENIGSGNNFEHEYVISLASTHPSLVTAINMSEEEASLIDKPMLAKVRSNPYEGVKTRFVIEVVRLSEALREKVLIFSQFIQPLELIKEHLRKFFKWREGKEILQMDGKILPRYRQASIEAFNNPNNDSRVLLASTRACCEGISLTGASRIVLLDVVWNPAVGRQAISRAFRIGQKKFVYTYNLITYGTGEGDKYDRQAEKDHLSKLVFSTEDEFNNVRNMLSKAEMEHCSKFISEDKVLEEMTSHDQLKGMFLKIHYPPTESNIVYSYNQIATE

SEQ ID NO: 11680 - protein, 667 aa, Nicotiana tabacum
MAGGAWNRRTSLIVFGIVLFGCLFAFSIATEEATKLGTVIGIDLGTTYSCVGVYKNGHVEIIANDQGNRITPSWVAFTDGERLIGEAAKNLAAVNPERTVFDVKRLIGRKFDDKEVQRDMKLVPYKIVNKDGKPYIQVKIKDGETKIFSPEEISAMILTKMKETAEAYLGKKIKDAVVTVPAYFNDAQRQATKDAGVIAGLNVARIINEPTAAAIAYGLDKKGGEKNILVFDLGGGTFDVSILTIDNGVFEVLSTNGDTHLGGEDFDQRIMEYFIKLIKKKHGKDISKDNRALGKLRREAERAKRALSSQHQVRVEIESLFDGVDFSEPLTRARFEELNNDLFRKTMGPVKKAMDDAGLEKTQIDEIVLVGGSTRIPKVQQLLKDYFDGKEPNKGVNPDEAVAYGAAVQGGILSGEGGDETKDILLLDVAPLTLGIETVGGVMTKLIPRNTVIPTKKSQVFTTYQDQQTTVTIQVFEGERSLTKDCRLLGKFDLTGIAPAPRGTPQIEVTFEVDANGILNVKAEDKASGKSEKITITNDKGRLSQEEIERMVKEAEEFAEEDKKVKERIDARNSLETYVYNMRNQINDKDKLADKLESDEKEKIETATKEALEWLDDNQSAEKEDYEEKLKEVEAVCNPIITAVYQKSGGAPGGESGASEDDDHDEL

SEQ ID NO: 11681 - protein, 668 aa, Nicotiana tabacum
MAGAWKRRASLIVFAIVLFGSLFAFSIAKEEATKLGTVIGIDLGTTYSCVGVYKNGHVEIIANDQGNRITPSWVAFTDGERLIGEAAKNQAAVNPERTIFDVKRLIGRKFDDKEVQRDKKLVPYEIVNKDGKPYIQVKIKDGETKVFSPEEISAMILTKMKETAEAYLGKKIKDAVVTVPAYFNDAQRQATKDAGVIAGLNVARIINEPTAAAIAYGLDKKGGEKNILVFDLGGGTFDVSILTIDNGVFEVLATNGDTHLGGEDFDQRIMEYFIKLIKKKHGKDISKDNRALGKLRREAERAKRALSSQHQVRVEIESLFDGVDFSEPLTRARFEELNNDLFRKTMGPVKKAMEDAGLEKNQIDEIVLVGGSTRIPKVQQLLKDYFDGKEPNKGVNPDEAVAYGAAVQGGILSGEGGDETKDILLLDVAPLTLGIETVGGVMTKLIPRNTVIPTKKSQVFTTYQDQQTTVTISVFEGERSLTKDCRLLGKFDLTGIAPAPRGTPQIEVTFEVDANGILNVKAEDKASGKSEKITITNDKGRLSQEEIERMVKEAEEFAEEDKKVKERIDARNSLETYVYNMRNQINDKDKLADKLESDEKEKIETATKEALEWLDDNQSAEKEDYDEKLKEVEAVCNPIITAVYQRSGGAPGGASEESNEDDDSHDEL

SEQ ID NO: 11682 - protein, 128 aa, Salmonella enterica
FGDNGSGMHCHMSLAKNGTNLFSGDKYAGLSEQALYYIGGVIKHAKAINALANPTTNSYKRLVPGYEAPVMLAYSARNRSASIRIPVVASPKARRIEVRFPDPAANPYLCFAALLMAGLDGIKNKIHP

SEQ ID NO: 11683 - protein, 487 aa, Azoarcus sp. BH72
MLIGFVTAYLVLSIAIGLYAATRVKNSTDYVAAGRNLPLYIVTATVFATWFGSETVLGISATFIDEGLRGLWSDPFGASLCLILAGLFFARPLYRMNLLTLGDYYRTRYGRTVEVLCSLAIVVSYLGWVSAQISALGLVFNILSEGSISAETGMLVGAGIVLAYTLFGGMWSVALTDFMQMAIIIVGLAYIAWLVGDMAGGVGAVVAHANEAGKLNFLPAFDAKDIIAFTAGILTMGFGSIPQQDVFQRFNAARNERIAVQGTLLGGSGYFLFAFIPLFIAYSATLIDPALVANYQESDSQQILPQLILEHTPLFAQVLFFGALLSAIMSTASGTLLAPSVTFSENILRSTFRGMNDRQFLVMTRVVVVLFALLVTWYAIHTDESIHGMVENAYKVTLATAFVPLAFGLYWKRASTQGALVSIVAGLAVWVLLEIVAPEADVPPHFAGMLAGVVGMVVGSLAPQTLVRQSHGHSAHLNIGAHPQSRN

SEQ ID NO: 11684 - protein, 626 aa, Bifidobacterium longum DJO10A
MARAVGIDLGTTNSCIATLEGGEPTVIVNAEGARTTPSVVAFSKSGEILVGEVAKRQAVTNVDRTISSVKRHMGSDWTVDIDGKKWTPQEISAQILMKLKRDAEAYLGEPVTDAVITCPAYFNDAQRQATKDAGKIAGLNVLRIINEPTAAALAYGLEKGKEDERILVFDLGGGTFDVSLLEIGKDDDGFSTIQVQATNGDNHLGGDDWDQKIIDWLVSEVKNKYGVDLSKDKIALQRLKEAAEQAKKELSSSTSTSISMQYLAMTPDGTPVHLDETLTRAHFEEMTSDLLGRCRTPFNNVLHDAGISVSDIDHVVLVGGSTRMPAVKELVKELTGGKEANQSVNPDEVVAVGAAVQSGVIKGDRKDVLLIDVTPLSLGIETKGGIMTKLIDRNTAIPTKRSEVFSTAEDNQPSVLIQVYQGEREFARDNKPLGTFELTGIAPAPRGVPQIEVTFDIDANGIVHVSAKDKGTGKEQSMTITGGSGLPKDEIDRMVKEAEAHEAEDKKRKEDAETRNQAEAFAYSTEKLVNDNKDKLSDDIVKEVTDKVNALKEALKGDDTEKVKTAQTELMTAAQKIGQVLYAQQGAEGAAAGADGAGASAGSASGSDDDTVEAEVVDDDDDKDNK

SEQ ID NO: 11685 - protein, 1164 aa, Arabidopsis thaliana; identical to SEQ ID NO: 8224

SEQ ID NO: 11686 - protein, 392 aa, Physcomitrella patens subsp. patens
LTEENLLFLEAWRTVDRAYVDKSFNGQSWFRYREDALKKEPMKTREETYAAIRKMLATLDDPFTRFLEPEKFKSLQSGTNGAVTGVGLEVGFNTSDSSTSNTDLVVVSPVSGGPAARAGVLPGDVITAIDGVPTHGMGLYDAARRLQGPVQSQVELTLLKKDATTPSTITVLEKITLNPVTWRLCEMKQNDGSAPLKLGYIRLSTFNQNSSSAVKKAIETLQESGAAAFILDIRNNSGGLFPSGVEIAKMWLDKGVIVYIADSMGVRDIYDTDGDSAISTKEPLAVLVNKGTASASEILAGALKDNKRAVILGEPTFGKGRIQSVFQLSDGSGMAVTIARYETPAHINIDKVGITPDRPLPAVLPMDEEAFCRCIEDPNADCNVSFTSLFSR

SEQ ID NO: 11687 - protein, 178 aa, Oryza sativa Japonica Group
MMMMDLGFLEGGAGMADAGHDESGSPPRSGGVREQDRFLPIANISRIMKKAVPANGKIAKDAKETLQECVSEFISFVTSEASDKCQKEKRKTINGEDLLFAMGTLGFEEYVDPLKIYLHKYREVIGDSKLSSKAGDGSVKKDTIGPHSGASSSSAQGMVGAYTQGMGYMQPQYHNGDT

SEQ ID NO: 11688 - protein, 185 aa, Oryza sativa Japonica Group
MADGPGSPGGGGGSHESGSPRGGGGGGGGGGGGGGVREQDRFLPIANISRIMKKAIPANGKIAKDAKETVQECVSEFISFITSEASDKCQREKRKTINGDDLLWAMATLGFEDYIEPLKVYLQKYREMEGDSKLTAKAGDGSVKKDVLGSHGGSSSSAQGMGQQAAYNQGMGYMQPQYHNGDVSN

SEQ ID NO: 11689 - protein, 574 aa, Coccidioides immitis RS
MVFRAPAWVGELPPIPDDVAICDFMLDDKYGRYPLASSKDPFTCGMTGRTYSAAKVAERVDVLARALAKEFGWHPNKGTEWEKVVGIYSFNTIDFLVLCWAIHRCGGIASPANAVYSGPELTYQLKDSGAQSLFTCVPSLPIALEAAAKAGIPRNRIYILDLPTEFTGSTEAPQGMRTLEQFITEGYSLPKLEKLNFGPGQGARQTAFLCYSSGTSGLPKGVKIAHRNVIANTLQMMVYEAPHRNSLKPAGQSAFNDVALGLLPQSHIYSLVVMCHCGPYRGDQVIVLPKFELNHYLQTVEKYKIGTLYLVPPIIIAMLRNKELCDKRDLSAVRAIFTGAAPLGKETADELQQWKPSWLIKQGYGMTETCTVVCTTSSHDVWLGSSGSILPGIECVELTGYDEPGELVVKSPSVVLGYLNNEKATEETFIDGWMRTGDEAVVRVAPSGNEHIFIVDRIKELIKVKGLQVAPAELEAHILSHPDVADCAVIPVPDDSAGELPKAFVVKSSSAGSDDAATIRAIMKHVEDHKARHKWLKGGVEFLDVIPKSPSGKILRRLLRDKEREARRKAGAKI

SEQ ID NO: 11690 - protein, 231 aa, Glycine max
MEAELDTEQQQQMTEGSYSQTMQIDPKRARFPCSVVWSPLPVISWFIPCIGHIGICREDGVILDFAGPNFVCVDSFAFGAATRYLQIPKEKCCVPLVQSVYNGEEHYMQGETRGDLRTWDDALRKSTQEFQHLSYNLFTCNCHSFVANNLNKLGFLTGGWNVVNLAIFILFNGRWVSKASMLRSILPFVVVFFLGVTFWGFTFLKFWFFFTSILIGWFLLGTYCFKNLIQL

SEQ ID NO: 11691 - protein, 180 aa, Arabidopsis thaliana
MASSMLSSATMVASPAQATMVAPFNGLKSSAAFPATRKANNDITSITSNGGRVNCMQVWPPIGKKKFETLSYLPDLTDSELAKEVDYLIRNKWIPCVEFELEHGFVYREHGNSPRYYDGRYWTMWKLPLFGCTDSAQVLKEVEECKKEYPNAFIRIIGFDNTRQVQCISFIAYKPPSFTG

SEQ ID NO: 11692 - protein, 632 aa, Bordetella bronchiseptica RB50
MCLDACLTPGLADRDPVGRACDRAYVIDRPVFRSAMGNCRPSHFRGNGTHAAMNGESCAQRGKRTHKMQESEFFQLSGTTAVLLLVAFYGATFLMSLMIGQKKENVDGYMVSNSSVGFGLSAASMIATWIWAASFYASATSGFKYGLSGPIHYGFWGALMILFIYPFGKRFRQLAPKAHTLAEVIHARHGASSQMIMAVSNIVGSCISLMVNFTAAGALVSVLSPLSFIQGVLIAGLGVLSYTLWSGFRASVMTDFAQLVAMILAAVIIIPLIFFNAGGPDMLQANMWRLSSEQADFFSTTAILEQGAPYFVAVLAYAIGNQTIAQRLFAVREDLIKPTFLTATIGYGAVVIGLGMLGLLALFVGLEPVNGNMNNIIPQMASTYLPPVGIALFFILVVGSLSSTADSDLAALSAIVMTDIYAKNLAGGRPDPRRMLWWGRATMIVATMVGVIFASLRLDILVMLVFVGALWGAIVFPVIASFYWDRVSNSAFFWSVISAVVLFTIVRFELVPIEGAVAVFYEICAAIGGGVVIGLMSFAFFGRVTALTLGTLATLILLPCFVGTLREYIVLLGSLTAYGVSTVVCVALSLRNQERFDFSLLAERVTSFHYEKARMMGAKPAAPAAQPQPARG

SEQ ID NO: 11693 - protein, 469 aa, Xylella fastidiosa Dixon
MSLENVEKLVKDKKIEFVDLRFVDMRGVQQHVTFPVNILEPSLFKDGKMFDGSSIAGWKGINESDMVLLPDASTAYLDPFYADPTLVMTCDILDPATMHSYVRDPRGIAKRAEIYLNSLGIADQAFFGPEPEFFIFDSVRFANDMGHSFFQIASEEAAWNTGAEFERCNSGYRPAVKGGYFPVPPTDSLHDLRAEMVKTLEQVGIETEVHHHEVATAGQCEIGTKFDSLVKKADQLMTMKYILKNVAYRNGKTVTFMPKPIVGDNGSGMHVHQSLSKGGVNLFSGDDHAGLSQLALYYIGGIFKHAHAINAFSNSGTNSYKRLVPGFEAPVMLAYSARNRSASCRIPWVSSPKARRIEMRFPDPLQSGYLTFTALMMAGLDGIKNKIHPGPPNDKDLYHLPPEEEKLIPQVCSSLDQALEALDKDRDFLKAGGVMSDDFINGYIALKMQEVTQFRAATHPLEYQMYYAN

SEQ ID NO: 11694 - protein, 639 aa, Methanosarcina barkeri str. Fusaro
MNGYSIFLVMLTVYIAGLVAIGWYFNSRQKSITDFWLAGRRIGPSALGFSAAASWLTAGGILAVIGYYMLQGMGSIWAFVAPNIISLLFLAVLVKKIKNLPAITQPELLEQRYGSIVRLPIALIITVVMILFSVSDITGLSLVLQTFYGVDPLYAAAIVAIAVSLYVTLGGLYAVIWTDTIQFSFLALFAIVMAFATVGTVADGGLNTSAISVSQLFGNVSGDWWNPFSIGLPMVLIFSFALIPGWITEQDPWQKIWSAKDEKSASVGMVLGALMITVIFAVCAVIAIALNNIYPEIAGMGYPAGMASAEPALLSFVSERFASAPVVVAFSAIGLAAASMSCTDTFSTSGASCISRDIYQRYIKPDATMKEMMLVNRASVLFIILAATAGSFIIPNILDAIQIATFIASSSYFFPLMGGLYWKRATKEGAFAGMVIGFIVQVSLVALDLINTPPLAASYLESVHPILMGHGVIVGMSLSAIAFFGVSLMTKPSSKVNLAPFFEEEAKELSLSETKKINEKDPEYSAFLKNLNEKVTGERAHLQLNLHTSGNLSWQEVTENLKTMSPAWVTPTGIDSVYRLTHGDMLACVAVTRGTGERDIWLKAEPRLETLGTQKRELFTAYEELKKVFGQKNVKLDYI

SEQ ID NO: 11695 - protein, 347 aa, Solanum tuberosum
MADECAAFVKGTELPVKRPREEEAETEMEAANNSNNNNGCSTNEKEEPSPYISSVLPGWFSEISPLWPGEAHSLKVEKILFQGKSDYQNVLVFQSSTYGKVLVLDGVIQLTERDECAYQEMITHLPLCSIPNPKKVLVIGGGDGGVLREVSRHSSVEQIDICEIDKMVVEVAKQFFPDVAVGYEDPRVNLRIGDGVAFLKNVPAGTYDAVIVDSSDPIGPAQELFEKPFFESIAKALRPGGVVATQAESIWLHMHIIEEIVANCRQIFKGSVNYAWTTVPTYPSGMIGFMLCSTEGPAVDFKNPINPIDDESPVKTIEPLKFYNSEIHQASFCLPSFAKRVIETKGK

SEQ ID NO: 11696 - protein, 329 aa, Campylobacter coli RM2228
MKDGALTVISPIEGTPADKAGIKSGDIILKINDEATLGINLNDAVDKMRGKPKTQITLTIFRKGATKPFDVTLTRDIIKVESVYAKLIEDENILYLRVTNFDKNVVDMTSKELKKHPNVKGVILDLRNNPGGLLNQATGLVNLFVDKGVIVSQKGRVTSENQEYTANPKNKISDSSLVVLVNGGSASASEIVSGALQDLKRAIIVGENTFGKGSVQQIIPINETEALRLTIARYYLPSGRTIQAVGVKPDIEVFPGKVNTQEDGFNIKESDLKQHLESELEKLDKNEKKEDKKEQKNDKNIITQKQINDDAQLKSAIDTIKILNIKQGQ

SEQ ID NO: 11697 - protein, 261 aa, Zea mays
MGLGAAMALALGDPPADYASIAAVGLFVALMCVCIVVGHLLEENRWMNESITALFIGLGTGAVILFASSGKHSRVLVFSEDLFFIYLLPPIIFNAGFQVKKKQFFRNFITITLFGAVGTLISFTVISLGALGLISRLNIGALELGDYLALGAIFSATDSVCTLQNFDPGNISSAKLLNFIGSFLYLFGSSTILGVASGLLSAYTIKKLYFGRHSTDREVSIMMLMAYLSYMLAELLDLSGILTVFFCGIVMSHYTWHNVTE

SEQ ID NO: 11698 - protein, 585 aa, Mycobacterium avium subsp. paratuberculosis K-10
MLSGRPNGEQGRRVATVRSGTMRSMGAQTALTLLLAAIAVIVLVDWISERTRLPSATLLVLVGIGQALLPGPTIGLEPDVVMTCILPPLLYHAALESSLVGIRRNLRTVVSLSVVLVLLTAASVGVAFSLLVGGATLAVGMVLGAAVAPTDPVAALAVARKEGLPLNIVTLIEGEGLLNDATALTTLAVAVTVARGAAFSAPSAIREFVLAAVGGLVVGQVFAYARRLLRRWRHDVLTANAISLATPFLTYLVAEKLSASGVLAVVVCGLIVGHDSPRVESGASRLQTRAVWRLVNFLLEGVVFLLIGHQVPVILDELGGYALSTILVAVGVTVAVVLLVRPLWLLLTQALPRSLHTRLGNVDDSATDSAEPRPERTRERLSGREIVVLSWAGTRGVVSLAAIFAVPVLTEGNAPFPDRDLLLFCTLVVVLVTLIGQGVTFGPLVRALGLRAKTTDELRLRNRARAAALRAALDRLDSLDPEDGADVDPRVIDGVRQQLSAQLERYEHRLTLLSDVDELPAAPAYEAAVGLRRVAIDAQRDELVRWRDAGMLPDQSLRAIERELDHEESMLPMGLPRSPRRSQKR

SEQ ID NO: 11699 - protein, 507 aa, Pediococcus pentosaceus ATCC 25745
MDLEIATVKAILTEHDLLKEIKSTKTVANTGISYDSRTVKPGYMFFCKGNFKPEYLSVARQNGATTYVSENEYPEGTGMTAIIVTNVTRAMAVLSATYYNFPQNDLFIIGITGTKGKTSSAYFAHSILNQKYPNQVALFSTIDRIVGPKPEDQFKSDLTTPESMNLFHDMRVAVDNGMKYLVMEVSSQAYLRDRVYGLKFDCGIFLNITPDHIGRNEHKDFEDYLHCKLQLMVNSKRCIIDADTDRFDDVFGAAKATTDPEQIYLFSADVENGGVDFLIQDEEDDLTSNRFTLVESSSKAEAFHVAGDYDLNVAGDYNQSNATAAIIAAALADVTYQDAVLPLKSIVIPGRMEHLNVPGHGVVFVDYAHNYASLHALLKFLKHQYHDGKVIVVVGSPGDKGISRRAGFGQALSEQADIAYLTTDDPAFEDPEQIIQQIMDNIKPGTVEVRQVLDRHDAIEQAIMNSSEKDVVVLAGKGEDPYQKVGGVDTPWPTDMGVAEEVKRGLS

SEQ ID NO: 11700 - protein, 756 aa, Zea mays
MGAENGKGNDVSAESPTSVLEDEEKCKEEITKLEEETVLDAKNGDTSLLSEAMVEEEEKLREARLKEEIKQGEPEESVHLNDTQFTRLDELLTQTQMYSEFLLEKMEDITFVFRSHLSFACTFTILIGLSVPKPEAAQTKRGRGSKRRAANQYNNRKVKRAVAAMLTRSKEGETENAEDENLTEEEKNEKEQGELVPLLTGGKLKSYQLKGVKWLISLWQNGLNGILADQMGLGKTIQTIAFLAHLKGNGMNGPYLIIAPLSTLSNWMNEIARFTPSINAIIYHGTQKERDEIRRKHMPKVIGPSFPVVVTSYEMAMNDAKKFLRHYEWKYVVVDEGHRLKNFQCKLVKELKHLRAGNKLLLTGTPLQNNLAELWSLLNFILPDIFQSHEEFESWFDFSGKSNGEVSKEEMEEKRRAQVVAKLHAILRPFLLRRMKSDVEQMLPRKKEIILYASLTEYQRNFQDHLLNKTLESHLRDRGDSGRGMKGKLNNLMIQLRKNCNHPDLLEAAFDGSCTFLVLIFSQWTKVLDIMDYYFSEKGFNVCRIDGSVKLEERRRQIQEFNDVNSDYRIFILSTRAGGLGINLTAADTCILYDSDWNPQMDLQAMDRCHRIGQTKPVHVYRLATAQSVEVFTVSLFYMWTFLCRILKRAYSKLKLEHVVIGKGQFHQERKQSNDLVEEEDLLALLRDEETAEDKMIQTDISDEDLERILDRSDLIADTSDKEKAQASADAVPLKGPGWEVVLPTGTGGMLSTLNS

SEQ ID NO: 11701 - protein, 225 aa, Larix sukaczewii
HEIAKQAKAAGARIIVTQAAYVDKLADLQSDDMIVIAIDGAPKEGCQHISILTEADETQCPSVEIHPDDVVALPYSSGTTGFPKGVMLTHKSLVSSVAQQVDGENPNLYFHSEDVILCVLPLFHIYSLNSVLLCALRAGAATLIMQKFNLTTLLELIQRYKVTVAPIVPPIVLEISKNPIVSQYDVSSVRIIMSGAAPLGKELEDALRERFPKAIFGQGYGMTEA

SEQ ID NO: 11702 - protein, 536 aa, Xylella fastidiosa 9a5c
MKQNMRIKTGIKKALILMLSVVLVSLVAIAAIAAHRFYIRLPQSRLFYAWKKMDEVYYDRTFAGFDWPAVLATYKKQLPRFDSDGQKTSPIINDMLSLLEVSHLQHFPAFMVSEEKKKTAVLANYFPELRDISGMVMVMDMLPRISRVLSLETWSPLYTHGVRVGDRILLETLDTDISDKNKPVRLYCYHINTAGVKKEFEFDLPAPPLGTQQTAVPAGDHVLHITRFDQGEIQALKHVSEDRNSSITQLHYISLGAVTTALHLPKNKVIDVVKDSEADKAGVEIGSIIGNGTNIKAGPENIGGKKVIKTNSRYEVVLPDGRKVTFSINKIIPKLNDFEGIRSAQLIGQTLVIAFNEMSDENTQWALQQIKNTPATAIVLDLRSNTGGSGIAGEKLLAGFLPSGTRIATEIRGKKTNVINVPSGYTPTDKPMAVLISLLSSSGAELAARTLQFHHRARIYGAQSSGQLLASRFYKLTDGTYMQIADTNLLDPAGKPLEWYGVMPDVKKWKALSDVRAGRDPVLECALTDLSGGQCH

SEQ ID NO: 11703 - protein, 493 aa, Bacillus thuringiensis serovar konkukian str. 97-27
MVKIEIMVSLAIYMAGMLYIGYWSYKKTSDLSDYMLGGRGLGPAVTALSAGASDMSGWMLMGLPGAMYATGLSSVWIAIGLLIGAYANYLILAPRLRTYTEVANDSITIPDFLENRFKDRTKILRFVSAIVILVFFTFYASAGLVSGGRLFENSFNLDYKIGLFVTVGVVVAYTLFGGFLAVSWTDFVQGCIMFIALVLVPIVAFTDVGGVTETFNTIKQVDASHLDMFKGTTILGIISFLAWGLGYFGQPHIIVRFMAITSIKDLKTSRRIGIGWMTISIIGAMLTGLVGIAYYAKNNATLQDPEMVFVTFSNILFHPYITGFLLSAILASIMSSISSQLLVISSAVTEDFYKTFFRRKASDKELVFIGRLSVLVVAMIAVVLAYHPSDTILTLVGYAWAGFGSAFGPAILLSLYWKRTNKWGVLAGMIVGALVVITWVQIPSLKATMYEMVPGFFCSLLAVIIVSLVTKEPVKAIHREFNEMEAVLEEETK

SEQ ID NO: 11704 - protein, 680 aa, Shigella flexneri 2a str. 301
MFFRLTALAGLLAIAGQTFAVEDITRADQIPVLKEETQHATVSERVTSRFTRSHYRQFDLDQAFSAKIFDRYLNLLDYSHNVLLASDVEQFAKKKTELGDELRSGKLDVFYDLYNLAQKRRFERYQYALSVLEKPMDFTGNDTYNLDRSKAPWPKNEAELNAQWDSKVKFDELSLKLTGKTDKEIRETLTRRYKFAIRRLAQTNSEDVFSLAMTAFAREIDPHTNYLSRRNTEQFNTEMSLSLEGIGAVLQMDDDYTVINSMVAGGPAAKSKAISVGAKIVGVGQTGKPMVDVIGWRLDDVVALIKGPKGSKVRLEILPAGKGTKTRTVTLTRERIRLEDRAVKMSVKTVGKEKVGVLDIPGFYVGLTDDVKVQLQKLEKQNVSSVIIDLRSNGGGALTEAVSLSGLFIPAGPIVQVRDNNGKVREDSDTDGQVFYKGPLVVLVDRFSASASEIFAAAMQDYGRALVVGEPTFGKGTVQQYRSLNRIYDQMLRPEWPALGSVQYTIQKFYRVNGGSTQRKGVTPDIIMPTGNEETETGEKFEDNALPWDSIDAATYVKSGDLTAFEPELLKEHNARIAKDPEFQNIMKDIARFNAMKDKRNIVSLNYAVREKENNEDDATRLARLNERFKREGKPELKKLDDLSKDYQEPDPYLDETVNIALDLAKLEKARPAEQPAPVK

SEQ ID NO: 11705 - protein, 613 aa, Bacillus pumilus SAFR-032
MSKIIGIDLGTTNSCVAVLEGGEPKVIANAEGARTTPSVVAFKNGERQVGEVAKRQSITNPNTIMSVKRHMGTDYKVEVEGKNYTPQEISAIILQHLKSYAEGYLGEEVTKAVITVPAYFNDAERQATKDAGKIAGLEVERIINEPTAAALAYGLDKTDEDQTILVYDLGGGTFDVSVLELGDGVFEVRSTAGDNRLGGDDFDQVIIDHLVAEFKKENGIDLSKDKMALQRLKDAAEKAKKDLSGVSSTQISLPFITAGDAGPLHLELTLTRAKFEELSADLVERTMTPVRQSLKDAGLSASEIDKVILVGGSTRIPAVQEAIKKETGKEPHKGVNPDEVVALGAAIQGGVITGDVKDVVLLDVTPLSLGIETMGGVFTKLIERNTTIPTSKSQVFSTAADNQTAVDIHVLQGERPMAADNKTLGRFQLTDIPPAPRGVPQIEVSFDIDKNGIVNVRAKDMGTGKEQNITIKSSSGLSDDEIEKMVKEAEENAEADAKKKEEIEVRNEADQLVFTTEKTLKDLEGKIDEEQVKKANDAKDALKAAIEKGELEDIKAKKDELQTIVQELTTKLYEEAAKQAQAQQEGGAEGAQKADDNVVDAEYEEVNDDQEKK

SEQ ID NO: 11706 - protein, 486 aa, Zea mays
LNVARIINEPTAAAIAYGLDKKGGEKNILVFDLGGGTFDVSILTIDNGVFEVLATNGDTHLGGEDFDQRIMEYFIKLIKKKYSKDISKDNRALGKLRREAERAKRALSNQHQVRVEIESLFDGTDFSEPLTRARFEELNNDLFRKTMGPVKKAMEDAGLEKSQIHEIVLVGGSTRIPKVQQLLRDYFDGKEPNKGVNPDEAVAFGAAVQGSILSGEGGDETKDILLLDVAPLTLGIETVGGVMTKLIPRNTVIPTKKSQVFTTYQDQQTTVSIQVFEGERSMTKDCRLLGKFDLNGIAPAPRGTPQIEVTFEVDANGILNVKAEDKGTGKSEKITITNEKGRLSQEEIDRMVREAEEFAEEDKKVKERIDARNQLETYVYNMKNTVGDKDKLADKLEAEEKEKVEEALKEALEWLDDNQSAEKEDYEEKLKEVEAVCNPIVSAVYQRSGGAPGGDADGGVDDDHDELYMVVDGGGDVECREPSQIL

SEQ ID NO: 11707 - protein, 625 aa, Mycobacterium tuberculosis CDC1551
  misc_feature (157)..(157): Xaa can be any naturally occurring amino acid
MARAVGIDLGTTNSVVSVLEGGDPVVVANSEGSRTTPSIVAFARNGEVLVGQPAKNQAVTNVDRTVRSVKRHMGSDWSIEIDGKKYTAPEISARILMKLKRDAEAYLGEDITDAVITTPAYFNDAQRQATKDAGQIAGLNVLRIVNEPTAAALAYGXDKGEKEQRILVFDLGGGTFDVSLLEIGEGVVEVRATSGDNHLGGDDWDQRVVDWLVDKFKGTSGIDLTKDKMAMQRLREAAEKAKIELSSSQSTSINLPYITVDADKNPLFLDEQLTRAEFQRITQDLLDRTRKPFQSVIADTGISVSEIDHVVLVGGSTRMPAVTDLVKELTGGKEPNKGVNPDEVVAVGAALQAGVLKGEVKDVLLLDVTPLSLGIETKGGVMTRLIERNTTIPTKRSETFTTADDNQPSVQIQVYQGEREIAAHNKLLGSFELTGIPPAPRGIPQIEVTFDIDANGIVHVTAKDKGTGKENTIRIQEGSGLSKEDIDRMIKDAEAHAEEDRKRREEADVRNQAETLVYQTEKFVKEQREAEGGSKVPEDTLNKVDAAVAEAKAALGGSDISAIKSAMEKLGQESQALGQAIYEAAQAASQATGAAHPGGEPGGAHPGSADDVVDAEVVDDGREAK

SEQ ID NO: 11708 - protein, 469 aa, Bartonella henselae str. Houston-1
MTTASDILKQIADNDIRFVDLRFTDPRGKLHHITIDIAEISEDTFNDGVMFDGSSISGWKTIHESDMVLMPDPETAHIDPFFAQSTLVIFCDVLDPVSGEFYRRDPRSIAKRAEVYMKSLGIGDTINVGPEAEFFIFDDVRYKVAPYNTGFKLDSSELPSNDDTEYETGNLGHRPRMKGGYLPVPPIDPCQDMRSEMLTVLKDMGIRVEKHHHEVAAGQHELGIRFDTLVREADKMQIFKYVVHQIANSYGKTATFMPKPVFGDNGSGMHVHMSIWKDGKPIFAGNEYAGLSETCLFFIGGIIKHAKAINAFTNPSTNSYKRLVPGYEAPVLLAYSVRNRSASCRIPMTPSPNSKRVEVRFPDPTANPYLAFAALLMAGLDGIKNKIHPGHAMDKDLYDLPLKELKDIPTVSGSLREALEALDKDRSFLKAGDVFDDDQINSFIQVKMQEVLRYETTPHPIEFDMYYSV

SEQ ID NO: 11709 - protein, 286 aa, Streptococcus pneumoniae TIGR4
MDLWFSEVHTPDVKLSLRTAKQLYAGKSEWQDIEVLDTPAFGKILILNGHVLFSDADDFVYNEMTVHVPMAVHPNPKKVLVIGGGDGGVAQVLTLYPELEQIDIVEPDEMLVEVCREYFPDFAAGLDDPRVTIYYQNGLRFLRNCEDDYDIIINDATDPFGHTEGLFTKEFYGNSYRALKEDGIMIYQHGSPFFDEDESACRSMHRKVNQAFPISRVYQAHIPTSPAGYWLFGFASKKYHPVKDFDKEGWKKRQLFTEYYTANLHVGAFMLPKYVEDILEEEEGKK

SEQ ID NO: 11710 - protein, 481 aa, Arabidopsis thaliana
MDQEALLLGRTLPKRCIPTIPFILASQALEKLAYFGLVPNMILFLTVEYGMGTAEAANILFLWSAATNFFPLVGAFIADSYTGRFPLTGFGSSISLTGMVLLWLTTINRPECDKLTNVCQPTTLLKSVLLYSFFALTAIGAGGVRSSCLAFAADQLQPNQKSRVTTSSVETLFNWYYFSVMVACFLSQSLLVFVQTTYGWQIGFGVSVAAMALSVALFFAASPYYVRFKSLTGNSRNPWKLCRVQQVEDLKSLINVIPIWSTGIILSLVTACQVSFIVLQAKTMDRHTFIQGFEIPPGSYGIFLVISFLLFLGLYDLVIVPLLSWALRAPFRLGVMVRMWAGYVISVLCISALAATEYARRKTARDESGTKLSAMWLLPYMILGGIAEALNTIAQNEFFYSELPKTMSSVATTLSSLNMAAASLISSWIITIVDVTTYGSWITENIDEGHLDYYYWLLVGLSLLNVLYFVWCKKSYGKCSI

SEQ ID NO: 11711 - protein, 126 aa, Triticum aestivum
HTISSHFSGVTQDPVHATIITSTIVVVFFTTLVFGFLTRPMISAMLPQHRHREPAGGRSTGSNSPKDEFILPFLGDEDASGSGSGFVQAKRSISMMLERPIHTVHIYWRKFDDRFMRPIFGGPRSY

SEQ ID NO: 11712 - protein, 434 aa, Erythrobacter sp. SD-21
MHEETANALSAFDIAALLVVASALLGWFNHHFIKLPHVIGLTVMGAVAAIGLMAVDAIIPGITLDNWVADTLEQMNFTDTLLQGMLSFLLFAGALHVDLDRLKVAWLPVLLLSTVGVMISTVLVGLAMWGVGSLIGLGFAPIWYFVFGALIAPTDPVSVLGVLKEENVPKSLQSAVAGESLFNDGVGIVVFIILLGAAVSGSEFSFLEGAELFAIEAGGGILVGLVAGYLGYRALAGMDEYTLEVLITLAVVMGGYALCSQLHISGPLAMAVAGLLIGNHGVTYAMSDVTRDYLLKFWELLDELLNSVLFLLIGLEMIVLTVGGDVLLFGLLAIPLSLAARAVGIFVSTKTIPAARLQDKGAGRVLWWGGLRGGISIALALSLPAGETRDYILAATFAAVLFSVLVQRATLGRLIDKLKRDHAPAVEEGAETVH

SEQ ID NO: 11713 - protein, 437 aa, Lycopodium annotinum
MGRRKIEMQKIKNNNARNVTFCKRKTGLMKKAFELSVLCGVDVGLLMFAPATGKLSLYASKNRSIEELLLQVACVDEARQSDEDPEYIKAIEKINKDNKHLSQHQSRRRPTRDIDILHANLKMIQMKKAYTEFQIQLHQGIGIEKLSLEGLQNFESKLQLSIINTRAFKEQAILEMCMKNHEALRNRRLFYPNPMDGLIIGEFQQAFQAPTYKSSVSSAMVLANQGLCNVRQGHESSLFDTLQECDTPTYGPSVSSTTMLIDQYNNLNYIGQKQSNINNIFSQYCGYVEYEQVNHRLMSIQNCEVDPTGGHMHSRNMLSKDVYDGIDYDDQEDENSTCMNLQDFEAPTHGRGVFGGTVPVDRYDSSNCIVQVQANWMPISLQDCGYVEGQEANQTLTTMQDPTFMPKKDQEYPDCMTPQYTEFLKDEVLIGGSTENG

SEQ ID NO: 11714 - protein, 432 aa, Magnetospirillum magnetotacticum MS-1
MTHELEIAARERGIKYFLVSYTDLFGTQRAKLVPAAAIGSTCRNGAGFAGFATWLDMSPADADLLAVPDPSGLIQLPWKPEVGWLPADLVMGGKAVEQGPRNILKRLIKEAAREGLQMKSGVECEFFLITPCGSEPADTADKQTKPCYDQSALMRRYDVISEICDAMLSLGWKPYQNDHEDANGQFEMNWDYDDALITADRHAFFKYMARSIAEKHGFRATFMPKPFMDLTGSGCHAHVSLWSGGQNVFADESDEIGMSRKGYHFIGGLIHSADALAALTNPCVNSYKRINAPRTTSGATWAPNTVTYTGNNRTHMIRIPDGGRFEFRLADGAANPYLLQAGILAAGLDGIRQQRDPGQRLDINMYTDGHKVEGVKQLPLNLLDALRALEASSVLNEALGSFVPSYLKLKRQEWDDYCRHLTQWERDTTLDC

SEQ ID NO: 11715 - protein, 502 aa, Haloarcula marismortui ATCC 43049
MVSSAIVLGLTAATVLVFTGIGLFAARGRIDSVETYISARDSAGSGTLAATVIASMMGVWILLSPAEAGAAFGGLPAVLGYAIGSAIPLLLFIPVGARIREVMPAGHSLTEFAYARFGSGMYLLVLLVSVFYMFIFLAAEMTGIAGALALVADVPLWQTSLLIGGFVLVYTAYGGLLASIVTDTVQTLVILPLLAVGFGGALLSLGGTSEFHATVVSADPTLLDPGFGPGLEFGLYVAFALLGANMLNQGVWQRVYAADGDGALRRGMGIAAVVVVPMLLLSGLFGIAAAGLGLTESGSASIAFFLVVAEAFPTWVTLAVVVLAVLLVMSSADTMFNAIASVVTADLARLLDDPDQRTLWLGGRGLTVAVALAAMFIGAQGYSVLQLFLTADLLAAGVFVPFLAGLYTERLTGPGALVSGIAGLLVGFTYFPSLRGLMAAIPGVGSMLPAPSFLIAFAGATLVSAALTAVATLLGGADADLDSLGREVRALDDPVADGGSEQ

SEQ ID NO: 11716 - protein, 476 aa, Borrelia garinii PBi
MKNKFLICAYFLLTLSISSLVIVESIFAVDESNNNKLSRSSYEQMMIQAFEFVKENYVEPVNDEVIFEGALKGIFQALGDPYSQYLTKKDLEEISKTTVGDYVGIGISIIKKMHSQDKQDKAKNLDSNSFCVSIVTPFEGGPAYKAGIKSGDCIIAVDGKSVSSMEVDQVVDRLKGKEGTKVKVSILRGKDLTLDFELTREKIEIQTIKYDVINPDIGYIRIVSFNPYTSVDFSKALDNLKNRNIKSLILDLRLNTGGYFQAAIKMADDILSKGTIVSTKSRNSSKPIDYKASSKQVLPSDIKIVALIDRSSASASEVFVGALKDNKRAYIIGEKSYGKGVIQHVVPFYTGGFKITSSKYYTPSGKSIHKVGIEPDLEIKSPDFSEEEAVIYKEIFDKKLIEGFLKGKKSITEQEIDFFVENLVKENPKYKIDKEFLGKYVFFNYYQDNNKELPIYNLHYDKVLKAACEYLSKLGN

SEQ ID NO: 11717 - protein, 1055 aa, Candida albicans SC5314
MSELDQLDVKLVDQDELETSITNKANKVLLSKDAELDEKRLSKAIKELESTQRQIANLSARLAHPRTKISEKKRLKDEIHWYEENELIPRQQDVDDIRNRLKENKIQLKKDAPQSTQSTSRLPEETERDYLIRTGKITAFGNENAFQSEQTHEQQSHVFLREPGLDNKVNDEDYAYQSDSEVDDNDNSIDKNAVRDLGETNQESESVLHNIDDGDESLYQQRLQTWVRKRASLRTQHQQEGIEEWFLPHPNIADAKLNEKFKLPGDIYPSLFDYQKTCVQWLWELYTQKTGGIIGDEMGLGKTIQIISFLAGLHYSGLLDKPVLVVVPATVLNQWVNEFHRWWPPLRCIILHSIGSGMNGSVSESKLEEYLESTDPDATQSSLHGIKSQINAQEIVDRVMEKGHVLVTTYVGLRIYSKHILPREWGYVVLDEGHKIRNPDSDISLTCKKIKTVNRIILSGTPIQNNLIELWSLFDFVFPGRLGTLPVFQQEFSIPINIGGYANSNNLQVKTAYKCAVVLRDLISPYMLRRLKSDVAQDLPKKNEMVLFVKLTKIQQELYESFLQSEDLESILKGKRNVLMGVDILRKICNHPDLVYRDTLMKRKNYGDPAKSGKMQVLKNLLRLWQSENHKTLLFCQTRQMLDILEKFVANLSLINGGDFNYLRMDGSTPISKRQMLVDAFNQDPDMHVFLLTTKVGGLGVNLTGADRVIIYDPDWNPSTDIQARERAWRLGQKRDITIYRLMTTGSIEEKIYHRQIFKTFLTNKILKDPKQRRFFKANDLHDLFTLGDQDEEGTETAQLFEGGEQSQQKYSGTKPRQSRGLFKKKYKDDDDFSQVARISGVSKLDKFEDGDHNDGDGDSTYSANEDNRIMSSIFAQSGVHSTLQHDDIISGSKEKESSLVEKEADKLATAAAEALKKSRMQTRKNTIGTPTWTGKFGSAGKFGLKKRKLLNSSSTILQNLRQKNELTESKKPDDVKVEPDRKQIMENLVEYLGDQMDNFSTSNDIIKNVKLSMSTENEMIMIRSMLREIANWDSLRKGWKLKDEFLQQQQQQPE

SEQ ID NO: 11718 - protein, 107 aa, Chlamydomonas reinhardtii; identical to SEQ ID NO: 784

SEQ ID NO: 11719 - protein, 234 aa, Arabidopsis thaliana
  misc_feature (48)..(48): Xaa can be any naturally occurring amino acid
  misc_feature (87)..(87): Xaa can be any naturally occurring amino acid
  misc_feature (92)..(92): Xaa can be any naturally occurring amino acid
  misc_feature (105)..(105): Xaa can be any naturally occurring amino acid
  misc_feature (134)..(134): Xaa can be any naturally occurring amino acid
  misc_feature (163)..(163): Xaa can be any naturally occurring amino acid
MASSMLSSAAVVTSPAQATMVAPFTGLKSSAAFPVTRKTNKDITFPNXPSNGGRVSCMKVWPPIGKKKFETLSYLPDLSDVELAKEXVDYLXSANKWIPLCLKFXELEHGFVYGEHGNTPGYYDGRNWTMGKLXLFRWTDSPQGLKEIENCKKEYPGAFIRIXIPNTPQGQGISFIGKNPPTSPKVNFFFKKFLRNNPGPFISNWAGVFFPFWKKFFSGWAKGGFFEKWNFNFP

SEQ ID NO: 11720 - protein, 545 aa, Zea mays
MSMGYQVVAAQLKVASSADHASVVIITLFVALLCACIVLGHLLEENRWLNESITALIIGLCTGGVILMTTKGKSSHVLVFSEDLFFIYLLPPIIFIAGFQVKKKQFFRNFMTITLFGAVGTMISFFTISLGAIAIFSRMNIGTLDVGDFLAIGAIFSATDSVCTLQVLHQDETPFLYSLVFGEGVVNDATSVVLFNAVQKIQITHINAEVALQVFGNFLYLFSTSTLLGIATGLITSFVLKKLYFARHSTTRELAIMMLMAYLSYMLAELFSLSGILTVFFCGVLMSHVTWHNVTESSRITSRHVFAMLSFIAETFIFLYVGTDALDFDKWKTSSLSFGGTLGVSALIMALVLLGRAAFVFPLSVLTNFSNKHENESITFKHQVIIWWAGLMRGAVSIALAFKQFTYSGVTLDPVNAAMVTNTTIVVLFTTLVFGLLTKPLIRLLMPHRHLTMLSDDSTPKSLHSPLLTSQLGSDLEEPTNIPRPSSIRGEFLTMTRTVHRYWRKFDDAFMRPMFGGRGFVPVVPGSPIERSVPQWSEEAHNKEP

SEQ ID NO: 11721 - protein, 727 aa, Xylella fastidiosa Dixon
MRLRILNSLKVALLTLAITTAPALMAKSDSASPQVATPDQTTATKLVYGLLSDSRYAYRLRPLDEAMSKDIFKRYLEALDSNKQFFTEADIDNFSAFKAEIPDSIRNGNLKPAFSIFAVYKKRVAERVTYANQLLKQNFDFSGQEKYEYDRSKAPWPASPQDLDDIWRRSTMNDWLRLKLAGKKPEDIRKTLKKRYANLLKTVNELKGEDVFQLYLNAYTNSIDPHTDYFTPRTADAFNQQMSLSLEGIGAQLQKQEDMVIIREVIPGGPTALDGTLKPGDRIVGVGQGKGGPIEDVIGLRIDDVVSKIRGKKDTQVRLEYIPAESGIDGAHRIVTLTRQKVRLAEQAAKGETITIEGSNGDAQRRIGIIKLPTFYEDFEGRRRNVANYTSATRDVAKLLTNFKTDKVDGVVLDLRNNGGGSLDEAIQLTGLFIEQGPVVQVRESGGRVTVNGDRDDKVTWDGPLAVLINRGSASASEIFAGAIQDYGRGLVIGETSFGKGTVQNIVDLDRWPANESRRFGQVKLTIAQFFRISGSSTQHKGVLPDIAFPASVGATEFGESTYENALPWTQIASLQHTQYGNFSPILSKLKKIHISRTANDIEFKWWQEDVHNFSLEKEKKYVILNEAKRLAERRKQETQHRERQTIRKNLGLQLDPLSEESDDGLIGNERDIAKDTAREKLADKRPDPLLHESAAILTDTINLLEKDQILSAQVLLQSTTPGHWAN

SEQ ID NO: 11722 - protein, 1070 aa, Synechococcus sp. WH 7805
MSLLHATWLPAIRTPSSSGRAALLVWADTWRVADPLGPGATPALHPFTLSAEDLRAWLTERDLLPDGIIDATACLTLPSRSVKPRRPRGSAAATPSSEEQPPWCGLPLQAGEPIPKTTEWWPWQVQGLAIEPMAATAWLAKLPLSGHHPDLADELRWWSHMQRWALSLVARGRWLPQVELSRGEGYPHRARWVPLLNREEDRRRLEDLAARLPLVATCALPWREPTGKRSNRITRLRPEAMRAANPVACCRPRSGRLRVATLLEDLVDAQLRKGFHPDDEGLDPLLCAWENALSSETGVIDLNDEDAERLATASHHWREGVAGNVAAARACLELATPNEGEELWDLRFYLQAEADPTLKVPAGAAWAAGPEGLQLGEIPVEHPGEVLLEGMGRALTVFEPIERGLDSATPEAMQLTPAEAFVLVRTAARQLRDVGVGVDLPPSLSGGLASRLGLAIKAELPKRSRGFTLGENLDWNWELMIGGVTLTLRELERLAGKRSPLVRHKGAWIELRPNDLKNAERFCAANPDLSLDDALRLTASEGDTLMRLPVHAFDAGPRLQGVLEQYHQQKAPDPLPAPEGFCGQLRPYQERGLGWLAFLHRFDQGACLADDMGLGKTIQLLAFLQHLKMEQELKRPVLLVAPTSVLTNWKREAAAFTPELTVHEHYGPKRPSTPAALKKALKDVDLVLTSYGLLQRDSELLESFDWQGTVIDEAQAIKNPSAKQSQAARDLARTRKGSRFRIALTGTPVENRVSELWALMDFLNPNVLGEEEFFRQRYRMPIERYGDMSSLRDLKSRVGPFILRRLKTDKAIISDLPEKVELSEWVGLSKEQKSLYAKTVENTLDAIARAPRGKRHGQVLGLLTRLKQICNHPALALKEEVAGDDFLQRSVKLQRLEEILEEVIAAGDRALLFTQFAEWGHLLQGYLQRRWRSEVPFLSGSTSKGERQAMVDRFQEDPRGPQLFLLSLKAGGVGLNLTRASHVFHIDRWWNPAVENQATDRAYRIGQTNRVMVHKFITSGSVEEKIDRMIREKSRLAEDIVGSGEEWLGGFDMGQLKELVSLEDNETRNP

SEQ ID NO: 11723 - protein, 209 aa, Arabidopsis thaliana
  misc_feature (65)..(65): Xaa can be any naturally occurring amino acid
  misc_feature (124)..(124): Xaa can be any naturally occurring amino acid
  misc_feature (140)..(140): Xaa can be any naturally occurring amino acid
  misc_feature (151)..(151): Xaa can be any naturally occurring amino acid
  misc_feature (180)..(180): Xaa can be any naturally occurring amino acid
  misc_feature (187)..(187): Xaa can be any naturally occurring amino acid
TRKKKKKKSPYYPPPPTRGLTKSEEDLWLSSMVSSARMVASPAQVTMVAPFNALKTSGAFPVTRXKANNDITSITSNGGRVNCMQGWPPIGKKNRDTLSYLPDLTDSELDKEVDYLIRTKWIPXDEFELKNGFVYPEHGXNSPGYYDGRDXTMRMLPLFSCTYSAQVLKEVGECKKEYPXAFIKIIXFNNTREVQSIRFIAYKTPSFTG

SEQ ID NO: 11724 - protein, 275 aa, Glycine max
IRLEGIGLIEKKLKNRIQWKGLDVSRPGEADDSFASLQAEVENLTMKERQLDEQIREMQERLRDLSEDENNDKLLFVTEEDIKNLPCFQNETLIAIKAPHGTTLEVPDPDEAVDYLQRRYRIVLRSTMGPIDLYLVSQFEEKFEEINGADVAPKLPSSPDVTKQQSTVVPEDRGKHIEVQGQAAPGPSSDFTPSQDFVSGIMKIVPSDVASEADYWLLSDADVSITDMWRTEPGVEWNELEPLQEDYCMTDENTTTPSHPSNVGEVSSASKPTGG

SEQ ID NO: 11725 - protein, 648 aa, Ralstonia metallidurans CH34
MGKIIGIDLGTTNSCVSILEGNTPKVIENSEGARTTPSIIAYMEDGEILVGAPAKRQAVTNPRNTLYAVKRLIGRKFEEKEVQKDIGLMPYAIVKADNGDAWVGVRDQKLAPPQVSAEVLRKMKKTAEDYLGEPVTEAVITVPAYFNDSQRQATKDAGRIAGLDVKRIINEPTAAALAFGMDKNEKGDRKIAVYDLGGGTFDISIIEIADVDGEKQFEVLSTNGDTFLGGEDFDQRIIDYIIGEFKKEQGVDLSKDVLALQRLKEAAEKAKIELSSSQQTEINLPYITADASGPKHLNLKITRAKLEALVEELITRTIEPCRTAIKDAGVKVSDIDDVILVGGMTRMPKVQEQVREFFGKEARKDVNPDEAVAVGAAIQGSVLSGDRTDVLLLDVTPLSLGIETLGGVMTKMINKNTTIPTKHAQVFSTADDNQPAVTIKVYQGEREMATGNKMLGEFNLEGIAPAPRGTPQIEVSFDIDANGILHVGAKDKATGKENRITIKANSGLSEDEIQRMVKDAEANAEEDKRARELADARNQADALIHSTRKALGEYGEKLEAGEKEKIEAAIKDLEDAARGGDKAEIDAKVNALSEASQKLGEKVYADMQAQAGEGAAAGAGAAGGAQQQAQPQDDNVVDAEFKEVNDKK

SEQ ID NO: 11726 - protein, 281 aa, Zea mays
MFKIIKEMLPPDVRVARDAQDLLVECCVEFINLLSSESNEVCSREEKKTIAPEHVIKALSDLGFREYIEEVYAAYEQHKLDTLDSPKAGKFTGIEMTEEEAVAEQQRMFAEARARMNNGAPKPKETEQEPPQQPQAQPQLQLHTEPQQPVQSQVQLHSPTQHSLQPQVQLHPQPQQLPQVQVHSQTQLHPQPQQPQVQVHPQLQQLPQLQAHSQPPQPQVQIHPQPQQPPQVQLQSSVQQTSQPQPQVHLYNHRGGSQAQLQPQLPGQLQTQGQTGPGIDS

SEQ ID NO: 11727 - protein, 766 aa, Brassica rapa
MVSLRSTKKTPVPVTASDEKTKKDASADSSTSVLSDEENSEEILVGKEILLAKDGDSSLISEAMAQEEEQLLKLREDEEKAKCAESGEATDLNDTQFTKLDELLTQTQLYSEFLLEKMEDITKNGIEGETQKAEPEKKGGRGRKRKPATQAASMKAKKAVAAMISRSKEGHESANSDLTEEERVMKEQSELVPLLTGGKLKSYQLKGVKWLISLWQNGLNGILADQMGLGKTIQTIGFLSHLKGNGLDGPYLVIAPLSTLSNWMNEIARFTPSINAIIYHGDKKKRDELRRKHMPKTVGPKFPIVITSYEVAMNDARKNLRHYPWKYVVIDEGHRLKNHQCKLLRELRHMKMENKLLLTGTPLQNNLSELWSLLNFILPDIFASHDEFESWFDFSEKNKSEASKEEGEEKRKAQVVAKLHSILRPFILRRMKCDVELLLPRKKEIIIYATMTDHQKNFQDHLVNRTLEAHLGENAIPGQGWKGKLNNLVIQLRKNCNHPDLLAGQIDGSYFYPPIEDIVGQCGKFRLLERLLVRLFAKNHRVLVFTQWTKILDIMDYYFSEKGFEVCRIDGNVKLDERRRQIDEFNDEKSSCRIFLLSTRAGGLGINLTAADTCILYDSDWNPQMDLQAMDRCHRIGQTKPVHVYRLATAQSIEGRVLKRAYSKLKLEHVVIGKGQFHQERAKSSIPLEEEDILALLKDDETAEDKLIQTDISEEDLDRLLDRSDLMITSPGETEPEAGEAFPVKGPGWEVVLPSSAGGMLSSLNS

SEQ ID NO: 11728 - protein, 727 aa, Acinetobacter sp. ADP1
MKLQVIACAVAVATGGFFFSHAINEALAATDTVSVTQSIQPTKEQALVSRQLATLVDRQHYLNMRLDATTSNRILDMYLDSLDPDHSILLASEVAEYKKKYGPTFGAALKAGDLSGPFAIHAQYRARLKAFYEYVLGELKKPQNLKQSNVYVDTDREKAPYFKTVAEQQDYWRKMLVSQLINLTISKEEDLAKQKALKDNPALANGQDLASAEDLTPVQTLTKRYTRQLERINRVKSDDVLDKTLNAMMATYDPHSNYYPPIDAMELNRQTTLQLEGIGVSIRPERGNEDYTKIETIVEGGPASKSGQIKSGDRIIGVAQDGDKMVDVIGWPSSEIVGLIRGKRGTKVTIKLLGPGAQMSQARTVTLVRDVIQEDDAGVRSRTVEITRDGKKHVFGVIEIPSFYLNYRARRAGTEYRSVSEDTNNALKALSAKNVEGIIIDLRNNPGGSLEEVARMLGQVIKSGPVVQIRDGNGNVSVFEDNDGGAQTYAGPLAVLINLASASASEIYSAAIQDYERGVVIGSTTTGKGTAQVQLDSLAYGQATLTQRKFYRVTGGSTQNKGVIPDVKLVDIYDEEFGERKAKNALKWDTIPTAPFKREGSIQPYVTKLSQLSLQRVDKDPQFTYLETRKSIAQETKDQKRVVLDIDQRKAEILSLEKQTLDAENKRRLATGLKPYANWESYQASLDALSESRAKMKATQRPALPEEEAFVTEAGNVLLDYSKLQGH

SEQ ID NO: 11729 - protein, 767 aa, Brassica rapa
MVSLRSTENTPASEMASDGKTEKDGSGDSPTSVLSDEENCEEKTAAVAVEEDILLAKNGDSSLISEAMAQEEEQLLKIREDEEIAKRAAGSGEAPDLNDTQFTKLDELLTQTQLYSEFLLEKMEDITKKVRPKRPSLSLSPRRKVVDVKERRLLRATMKAKKAVAAMISRSKEGRESAESDLTEEERVMKEQGELVPLLTGGKLKSYQLKGVKWLISLWQNGLNGILADQMGLGKTIQTIGFLSHLKGNGLDGPYLVIAPLSTLSNWMNEISRFTPSINAIIYHGDKKERDELRKKHMPRTVGPKFPIVITSYEVAMNDAKKNLRHYPWKYVVIDEGHRLKNHKCKLLRELRYLNMENKLLLTGTPLQNNLSELWSLLNFILPDIFASHDEFESWFDFSGKNNNEATKEEGEEKRRAQVVAKLHNILRPFILRRMKCDVELSLPRKKEIIIYATMTDHQKKFQEHLVNRTLETHIRDDTIRGHGLKGKLNNLAIQLRKNCNHPDLLVGQLDGSYLYPPLEDIVGQCGKFRLLERLLVRLFAKNHRVLIFSQWTKILDIMDYYFSEKGFEVCRIDGSVKLEERRRQIQEFNDEKSNCRIFLLSTRAGGLGINLTAADTCILYDSDWNPQMDLQAMDRCHRIGQTKPVHVYRLATAQSIEGRVLKRAYSKLKLEHVVIGKGQFHQERAKSSTPLEEDDILALLKDDENAEDKLIQTDISEEDLDRVLDRSDLMITLPGETQAQEAFPVKGPGWEVVSSSAGGMLSSLNS

SEQ ID NO: 11730 - protein, 377 aa, Oryza sativa
  misc_feature (105)..(105): Xaa can be any naturally occurring amino acid
MKSRKSYGHLLSPVGSPPLDNESGEAAAAAAAGGGGCGSSAGYVVYGGGGGGDSPAKEQDRFLPIANVSRIMKRSLPANAKISKESKETVQECVSEFISFVTGEXASDKCQREKRKTINGDDLLWAMTTLGFEAYVGPLKSYLNRYREAEGEKAAVLGGAGGAAAARHGEGGCCGGGGGGADGVVIDGHYPLAGGLSHSHHGHQQQDGGGDVGLMMGGGDAGVGYNAGAGSTTTAFYAPAATAASGNKAYCGGDGSRVMEFEGIGGEEESGGGGGGGERGWFLNYFPFFSSGMPTWQYRVKMALFAAIAVRVSMRVGVYHPTAALVFDRLLVGGLHDDNGSMSYIVGVHLSLIVALYTAWRMLLYCPFSLPSLRLHA

SEQ ID NO: 11731 - protein, 545 aa, Xylella fastidiosa 9a5c
MHSIQIVLAMLLVVAASGYLVRIIPFSMPLPLLQIALGAVISGVFDGGYELQPEVFFLLFLPPLLFLDGWRIPKQGLFRDKNVILELALGLVVFTVLGIGFLIHWMIPTMPLALAFALAAILSPTDPVALSSITSRVRIPKRMMHILEGESLLNDATGLVCFQFAIAAVLTGHFSLATASLTFVWVLVVGLSLGMTTTYVLSRVQRWVWRHFGGEPAAAILVNLLTPFAAYLLAESMQASGILAAVAAGITMSYVELSGNAPATIRVQRWAVWETVQFTFNGIIFVLLGEQLPGILDDLVHSAQQAGHMNVGWLLVDVAVISAGLMLLRFLWVWLSLQWNLFKAVCCGKQRISPPWQIVVAMSLSGVRGAVTLAGVLTLPLLMPDGTPLPARQLVIFLAASVILVSLLLASVALPYLLRGLELPEKSSYDKEEDFARRVSAQAALEAVERLRQRLVEDSANAERYNEAAHQVSQLYQRKLGAVDLANVDPQETKVFEQVVRRFRQVGLAAERDELFRLAREHNISDELLQRMVRNLDLIEARRRS

SEQ ID NO: 11732 - protein, 317 aa, Cucumis sativus
MAAELSLGSAASKPQTENGVSDSISSVIPGWFSEISPMWPGEAHSLKVEKVLFQGKSDYQDVLVFQSSTYGKVLVLDGVIQLTERDECAYQEMITHLPLCSIPNPKKVLVIGGGDGGVLREVARHLSVEQIDICEIDKMVVDVSKEFFPRVAIGYEDPRVTLHVGDGVAFLKAVPEGTYDAIIVDSSDPIGPAQELFEKPFFASVAKALRPGGVVCTQAEGIWLHMHIIEDIVTNCRQIFKGSVNYAWTTVPTYPSGVIGFMLCSTEGPTVDFKHPVNSAEVNGIDTAKSPLKFYNSEIHAAAFCLPSFAKKIIDSE

SEQ ID NO: 11733 - protein, 239 aa, Oryza sativa
MESRKPPPSALVDNHVVPGDVVLDLTEMTNQTIKLGAGLRQDCDTIQATSAGRLRLSKPNKYWVESSQKRYIPSVEDTVLGVVVDTKPDNFLVDIKGPNLAFLPVLAFEGGTRRNIPKFEIGTLIYARVVKANSIMNPELSCMDATGKAAEFGQLKDGYMFDTSTGLSRMLLSSPTCPVLEALGKKLSFEIAVGLNGRVWVNAPSPSNVIVVSNAIIKSESLSGIGQRSMVESLLERLS

SEQ ID NO: 11734 - protein, 404 aa, Solibacter usitatus Ellin6076
MSSRTKYFVVSTSTCLTVLLLIGSVLGRSASPDDTYKHMGVFADVVSRIKSEYVEEPDMKSVTLGALNGMLEAIDPFASYLNADQYRDYLKNKDVKRADVGLILSKKFGYVGVVGTITGSPAAKANFTTGDMIESIGGVATRDMPLAYANMLLQGESGTTVDLSVVRVRHPEPTSVKLTRAVFALPSVESRVIGDKVGYINIDALSPALVKEVAANVQKLQKDGAQKLVLDLRNCATGSPEDGIALANLFMNKGRITYLVGQKVARQNFEADPAKAISSLPLAILTNRGTADAAEVAAAALLDNKRAQVVGERTYGDAAVRRAITMEDGGAIILSVAKYYSPDGGKAIQDTGVTPNNVVSDADAQIDVDDNGEPVPDAAAEKGPEKKVEDDAVVKKALEVLAKG

SEQ ID NO: 11735 - protein, 286 aa, Salmonella enterica subsp. enterica serovar Paratyphi A str.
MAENTMWHETLHDQFGQYFAVDNVLYHEKTDHQDLIIFENAAFGRVMALDGVVQTTERDEFIYHEMMTHVPLLAHGHAKHVLIIGGGDGAMLREVTRHKNVETITMVEIDAGVVSFCRQYLPNHNAGSYDDPRFTLVIDDGVNFVNQTHQTFDVIISDCTDPIGPGESLFTSAFYEGCKRCLNPGGIFVAQNGVCFLQQDEAIDSHRKLSHYFSDVGFYQAAIPTYYGGIMTFAWATDNDALRHLSSEIIQARFHAAGLKCRYYNPAIHAAAFALPQYLHDALSAQ

SEQ ID NO: 11736 - protein, 334 aa, Schizosaccharomyces pombe; identical to SEQ ID NO: 806

SEQ ID NO: 11737 - protein, 469 aa, Streptomyces avermitilis MA-4680
MFQNADEAKKYIADEDVKFVDVRFCDLPGVMQHFTIPAEAFDPAEELAFDGSSIRGFQAIHESDMALRADLSTARVDPFRRDKTVNINFFIHDPITGEQYSRDPRNVAKKAEAYLASTGIADTAYFGPEAEFYVFDSVRFKTAENESFYHIDSEAGAWNTGAIEDNRGYKVRYKGGYFPTPPVDHFADLRAEISLELANSGLQVERQHHEVGTAGQAEINYKFNTLLAAADDLQLFKYIVKNVAWRNGKTATFMPKPIFGDNGSGMHVHQSLWANGDPLFYDEAGYAGLSDTARYYIGGILKHAPSLLAFTNPTVNSYHRLVPGFEAPVNMVYSQRNRSAAMRIPITGSNPKAKRVEFRAPDSSGNPYLAFSALLLAGLDGIKNKVEPAEPIDKDLYELAPEEHASVAQVPTSLPAVLSALEADHEYLLQGNVFTPDLIETWIDYKRTNEIAPLQLRPHPHEFELYFDV

SEQ ID NO: 11738 - protein, 483 aa, Sulfolobus tokodaii str. 7
MKSHIILRLFLHTLTLPNALSSPILSVSKVYQSSRPSSSIRYYTSSLLIISHTVIKNMSVSELLRKNNVEILRFTWVGLDGIIRSKGAYIDEVDNLVKTGIGLTMAMMSFTPMDYISPYGTFGPQDEDVFLTPDLSTLSIFPPSAVVLCYLYKGSSPWMYDPRSTLKKILEKYSEYEFKSSFEIEFYLVKDRKPFDDTKCFDSRAYYNNQIIPEIAKVAGSVGIVPLRVIKEYGPGQYEFDIQHKDAMRSADEVILFKEIARQIASKYNVEANFMPKPFNKMAGSGLHLNFSIWKDGRNLFYDPNDNYGLSDLAYNFIAGIIEHAKALTAIAAPTVNSYKRLVPGSWAPTKITYGYNNKSAMLRIPTPYPGMSMQDRRIEYRVPDATTNPYLLLSAFIEAGIDGIERGLKPPSPVNENAYFRKDIEDVPRNLREALNELKKDTRLIERVGREIVEEFIRVKMAEVEEFESLVTDWEYEVYKYV

SEQ ID NO: 11739 - protein, 469 aa, Yersinia pestis CO92
MSAEHVLTMLNEHEVKFVDLRFTDTKGKEQHITIPAHQVNADFFEEGKMFDGSSIGGWKGINESDMVLMPDASTAVMDPFFADSTLIIRCDILEPGTMQGYDRDPRSISKRAEDFLKSSGIADTVLFGPEPEFFLFDDIRFGSSINGSHVSIDDVEGAWNSSTKYEGGNKGHRPAVKGGYFPVPPVDSAQDLRSAMCLTMEEMGLVVEAHHHEVATAGQNEVATRFNTMTKKADEIQIYKYVVHNVAHAFGKTATFMPKPMFGDNGSGMHCHMSLSKNGNNLFAGDKYGGLSEIALFYIGGIIKHAKAINALANPTTNSYKRLVPGYEAPVMLAYSARNRSASIRIPVVASPKARRIEARFPDPAANPYLCFAALLMAGLDGIINKIHPGDAMDKNLYDLPPEEEAEIPKVAGSLDEAMAALNEDREFLTRGGVFTDDAIDAYIELRREEMDRVRMTPHPVEFELYYSV

SEQ ID NO: 11740 - protein, 448 aa, Streptococcus agalactiae NEM316
MTITAEDIRREVKEKNVTFLRLMFTDILGVMKNVEIPATDEQLDKVLSNKAMFDGSSIEGFVRINESDMYLYPDLDTWIVFPWGDENGAVAGLICDIYTAEGEPFAGDPRGNLKRNMKRMQEMGYKSFNLGPEPEFFLFKMDENGNPTLDVNDKGGYFDLAPTDLADNTRREIVNVLTQMGFEVEASHHEVAVGQHEIDFKYDDVLKACDNIQLFKLVVKTIARKHGLYATFMAKPKFGINGSGMHCNMSLFDNEGNNAFFDPEDPRGMQLSEDAYYFLGGLMEHAYNYTAIINPTVNSYKRLVPGYEAPVYIAWAGRNRSPLIRVPASRGMGTRLELRSVDPTANPYLALSVLLGSGLEGIENKIEAPEPIETNIYAMTVEERRQAGIVDLPSTLHNALKALEEDEVVKAALGTHIYTNFLDAKRIEWASYATYVSQWEIDNYLDLY

SEQ ID NO: 11741 - protein, 669 aa, Oryza sativa Japonica Group
MARDKQSALIVAAFVLLCSGCLCGVADGAKGGRKTKGPVIGIDLGTTYSCVGVYRNGHVDIVANDQGNRITPSWVAFTDDERLVGEAAKNQAALNPDRTIFDIKRLIGRRFDDEEVQRDVKYLPYKVVDKGGKPYVEVRVKAGEVKVFSPEEISAMILAKMKETAESYLGQRVTDAVVTVPAYFNDAQRQATKDAGTIAGLNVPRIINEPTAAAIAYGLDRKGAGEMTNVLVYDLGGGTFDVSVLSLDHGVFEVLATSGDTHLGGEDFDRRVMDHFIRLVKRQHGRDIGGDGRALGKLRRECERAKRALSRQHQVRVEIEALFVGVDFSETLTRAKFEELNMDLFKKTLGPVRKAIADAKLKKSDIDEIVLVGGSTRIPKVQELLKEMFDGKEPTKGINPDEAVAYGAAVQGSIISGEGGAETKDILLLDVTPLTLGIETAGGVMTKLIPRNTRIPVKKSQVFTTYEDHQTTVSIKVFEGERSLTKDCRELGRFDLSGIAPAPRGVPQIEVTFEVDENGILHVTASDKAAGRSKSITITNDKGRLSQEEIDRMVREAEEFAEEDRRVRERVDARNRLENYVYRMRSAVRDGGMAGKIGDDDRERMESALTEALEWLEDNDGGARTAEKEDYEEKLKEVEQVCGPIIKQVYKKSGDASAGAGDDDDVNEL

SEQ ID NO: 11742 - protein, 107 aa, Triticum aestivum
ESPSLFVHPCSLLLRYLVRAYAWCMGMADWFGGGGTRPSAAPAASLNSSREEAGEAAGVRTREISSSKTTDRGFYVREMIVSMWAVRRPRPPGNPREGRGGGGGSHN

SEQ ID NO: 11743 - protein, 473 aa, Synechococcus elongatus PCC 6301
MPETAQEVLQLIQEKGIQLVDLKFIDMPGIWQHLTLHVSQIDENSFVEGVPFDGSSIRGWKAINESDMTMVPDPTTAWIDPFMKEPTLSMICTIYEPRTNTPYERCPRAIAQKAVDYLKASGIGDTAYFGPEAEFFIFDDVRFDQAENKSYYYVDSIEGRWNSGREEEGGNLGYKPRYKEGYFPVAPTDTSQDMRSEMLLTMADCGVPIEKHHHEVATGGQCELGFRFGKLIEAADWLMTYKYVIKNVGRRYGKTITFMPKLLFNDNGSGMHTHQSIWNDGQPLFAGDQYAGLSQMALWYIGGILKHAPALLALTNPTTNSYKRLVPGFEAPVNLAYSQGNRSASVRIPLSGTNPKAKRLEFRCPDATSNPYLAFAAMLCAGIDGIKNQIDLGEPLDVDIYDLSPEELAKIPSTPGSLKDALKALEADHDFLTVGGVFTEDFIQNWIEYKLDNEVIPISLRSHPYEFALYYDC

SEQ ID NO: 11744 - protein, 320 aa, Oryza sativa
MMDGRGSQEEEHLDLIMRHHASMGLDRCESEEALGSSESEQPTRPARPRGKRSRAAEVHNLSEKRRRSRINEKMKALQSLIPNSSKTDKASMLDDAIEYLKQLQLQVQMLSMRNGLYLPPVNLSGAPEHLPIPQMSAALDQNSAKASDPSVVLQPVNQTSGALLPFELASQHKPLFLPGVPNATALEPRFLVESSRSNLQSLRFTEPAEMIYPDEMMLKHRLTSASESTIVPGTDEKSVRQNTYMMNADRFDRYALSKDQLQHIMPKNTESVLDMPHLQRILTKVLIVSDYKLTIQLPILDRLQTSDTKVRVEGRIKVNP

SEQ ID NO: 11745 - protein, 518 aa, Zea mays
  misc_feature (367)..(367): Xaa can be any naturally occurring amino acid
  misc_feature (384)..(384): Xaa can be any naturally occurring amino acid
MPYSLFPQFKNQPSPPAPIHLHRSTSGPSRLHPFPESEVRAKLQTSSTFEFQSGGIMFWADTVGSKHIYLSLKKWSERYGSYFKPSRYLEERAMKGMPLVMLTVENEIPVATKGVVMIKAQKNITDQKLKDLKAKKISQCLDYAYICMKIVCFYSENGGFKISDEDKSYMQSCKVAVFTCAFGGGDDLYQPIGMSEASLKKVCYVQDFMLLQNGRIDYGEFVAMIQNMMTHDKSDRETVLVRRMLQDRPITTRMYSSFSLLQQRLAILFQKLWQQQPNVDHITGNKIWKSSVFSKGKLPGPLRQLQMDLRKLMLPYTALKLKEKKRNNLKDFLNVAGPMGVTHFLVLSKIETSPVLRVAKTPQGPTXQLRPRCPQDLFKNPPLXNSKYIFGQIVLSGFAAADEQLRLTTMVFKNIFPDIDINTPFQTRSQLFTKKDRSVGEAVTSALLDDSWFSSDSFLHCFCKDFFSLVQDASVVDGDLLSWTRKLKELLENSLGWEFQQKSAVDGIYFKENDEVSL

SEQ ID NO: 11746 - protein, 164 aa, Ralstonia metallidurans CH34
MSNVYQFEANSLSGQPQPLADYRGKVLLIVNTASECGFTPQYAGLQTLQASYQARGFDVLGFPCNQFGKQEPGDAEQIGAFCESRFHVTFPMFEKIDVNGADAHPLYKWLTSEKRGFLGTQAIKWNFTKFLLRRDGTVFKRYASTTKPEEIRADIESLLAEQPA

SEQ ID NO: 11747 - protein, 379 aa, Actinobacillus pleuropneumoniae serovar 1 str. 4074
MNALHFGAGNIGRGFIGKLLADSGVFVTFADINQTQIDQINQNKQYGVKIVGDASRVEVVKNIAAINSKDEEAVIEQVKSVELITTAVGPNVLGFIAPLFAKALAARLEAGNTQPLNIIACENMVRGTSFFKAKIFENLTDSQQAEIEKFVGFVDSAVDRIVPPAELNEADPLEVTVEEFSEWIVDKTQFKGQIPDIKGMELTDNLMAFVERKLFTLNTGHLISAYLGKQAGVKWIKEAIAIDSVKAAVKATMEESGAVLIKRYNFDPQAHAAYIEKILKRFANPYLNDDVNRVGREPIRKLSPNDRLIKPLLGTLEYGLPHKNLVNGVVMALQYRNEEDPQAVELAQFIADNGVAAAVEKYTGLTNQEVIDQVVALYN

SEQ ID NO: 11748 - protein, 139 aa, Yarrowia lipolytica; identical to SEQ ID NO: 837

SEQ ID NO: 11749 - protein, 362 aa, Zea mays
MEAGGAGSGLNGAVQAKGTGADDGSAKRLPPCCVKARAAAPESEARCHATVVSGWFTEPRSRCGKASKVQYYNNPMWPGEANSLKVEKILYQGKSLYQEVLVFESSTYGKVLVLDGIVQLTDKDECAYQEMITHLPLCSIPSPKKVLVIGGGDGGVLREVSRHSSVESIDICEIDQLVIDVCKDFFPHLSVGFQDPRVQLHVGDAVEFLRNAPEGTYDAIIVDSSDPIGPAQELVEKPFFDTIARALRPGGVLCNQAESMWLHTHLVQDMLSICRETFKGSVRYAWTRAPTYPSGVIGFLLCAKEGPLVNFLTPINPIEKLEGATKAGREIRFYNSEEQAEETPAAPLKLTLASRSEIFATS

SEQ ID NO: 11750 - protein, 368 aa, Pseudotsuga menziesii; identical to SEQ ID NO: 8310

SEQ ID NO: 11751 - protein, 455 aa, Blastopirellula marina DSM 3645
MWKNPASFALSALTTFALLLPMERLTWAAGPTPSEPSVSQPSPYAEIDDDYVELIQMFADALDQVDRNYVEKLDRRKLIEAAIRGVITELDPHSTYIPQEELARFRTNIDQQFGGIGIQIDSRNGQLIIASPLVGGPAYDAGLGAGDRILEINGQSTKGMTIDDAIARLKGDEGETVSLVIYHPAEFKTETVELEREMIQLQTVLGDQRLENNDWDYIYDHDQKIAYVRITIFSRNTAEEFAAVLQQLKKDEIRGLIVDLRSNPGGLLSAAIEISDRFINEGKIVSVEGRNTPKREWSAVADTTLVDVPVAVLVDHFSASASEIVSACLQDHERAVVIGQRTWGKGSVQNIINLEEGKSAMKLTTASYHRPSGKNIHRLPDAKDTDEWGVSPSPDMEVEMTPKQLANFQNYRRRRDMGTLIPHPPAPEPPLADVDPVLAKGLEYLESKLSQPASP

SEQ ID NO: 11752 - protein, 205 aa, Oryza sativa; identical to SEQ ID NO: 11224

SEQ ID NO: 11753 - protein, 874 aa, Clostridium perfringens str. 13
MKINNQRIFEGRNIYSHRKCIRLDVDLEGYCETPTKDIDGFNERLLSYVPELYTHRCGIDIEGGFVQRLKEGTYLAHVCEHTIIGIHNKLGIDIKYGKAREIKDDFYYIIFEYKLKRTAILIAELAIDLINSIIKKKDINFDERIEIINRVIMEESIGPSTKAICDAAKEVGLPIITVGNENLYQIGYGKAGKRFSATIGNNTKGIAIDIACDKMLTKELLDIQNLPVARGEKVFNTIHLIEAVNRIGYPVVLKPQWGSKGNGVFVNINSEKELLRAYAEITKECKEIMIEEYKVGNDYRVMLVDYKVVAVSLRKPPYITGDGVRNIRDLIEAMNANPLRGEGHEKPLTKVKIDEELINRLSKLGYSLNSVLEYGEKVTLRGNANLSTGGSAEDYTDLICKENIEICERAAKTIGLDICGIDICAKSIAEPLYENDGIILEVNAAPGIRMHHFPTIGKERNVGRKILDNMFKENYSNIPVISVTGTNGKTTTVRLISYVLNLIGFNVGCTTTSGVKIGNRYIHKGDDTGYNSARSVLLNPEVDIAVLESARGGLVRRGLAYDLADVGVITNIREDHLGIDGINDMEDLSFVKSLVGEAVKDNGYSVINADDEWSLKVLDRIKKPKILFSMNENNKYLQENLKLGNPIVFYRDETIYVKNRGKEYKIASAEEMKFTMNGKLKHNIENAMAACAALVGIEVDYCIISKGLKQFKSCEEDNRGRFNMFDVNGINVILDYAHNIDGYKVVIDSLKNLGLKNITGIIGVPGDRDLNTMKEVGRISGDFFDSIVIKEDKDLRGKDKGEVASIINEGVLSSNRKDLNVKIILSEEEALRETLKLAKKGETIIMFFEDYESLYDIINEFKNKGTKDLKSASI

SEQ ID NO: 11754 - protein, 275 aa, Clostridium perfringens str. 13
MKSSSKKNLIIIGGAEDKKGEKIILNFVADKFKESEGIMLIATIATESPNIVIEQYKNIFSSMGIREIKELRVIEREEAFDENNISLVNEASVIFFTGGDQLRITSLIGGTPLYDTLQKRSNEGCYFVGTSAGASVMSDVMIVGGEEEESPKKSTLNMSAGLGLIKNTLIDQHFAQRGRIGRLLSGVCQNPEVLGIGIDEDTAIVINDDELTVIGSGAVYFVDGRNIEYTNVSEKRQDEVFSIFNIKLHVLTAGKKMNLSTRVPFEEERNKNEDK

SEQ ID NO: 11755 - protein, 1728 aa, Arabidopsis thaliana
MAFFRNYSNDTVSHNVLDENEERQNAATFQSSPLNEDVDGTYSERGFDMNMDVQYQSDPEPGCSIRQPNETAVDNVADPVDSHYQSSTKRLGVTGRWGSTFWKDCQPMGQREGSDPAKDSQSGYKEAYHSEDNHSNDRSEKLDSENENDNENEEEDNEMNKHQSGQADVPADEMLSDEYYEQDEDNQSDHVHYKGYSNPTNSRSLPKAGSAVHSNSRTSRAIHKNIHYSDSNHDHNGDADMDYEEEEDEDDPEDADFEPYDAADDGGASKKHGQGWDVSDEDPESDEEIDLSDYEDDYGTKKPKVRQQSKGFRKSSAGLERKSFHVSSRQKRKTSYQDDDSEEDSENDNDEGFRSLARRGTTLRQNNGRSTNTIGQSSEVRSSTRSVRKVSYVESEDSEDIDDGKNRKNQKDDIEEEDADVIEKVLWHQLKGMGEDVQTNNKSTVPVLVSQLFDTEPDWNEMEFLIKWKGQSHLHCQWKTLSDLQNLSGFKKVLNYTKKVTEEIRYRTALSREEIEVNDVSKEMDLDIIKQNSQVERIIADRISKDGLGDVVPEYLVKWQGLSYAEATWEKDVDIAFAQVAIDEYKAREVSIAVQGKMVEQQRTKGKASLRKLDEQPEWLIGGTLRDYQLEGLNFLVNSWLNDTNVILADEMGLGKTVQSVSMLGFLQNTQQIPGPFLVVVPLSTLANWAKEFRKWLPGMNIIVYVGTRASREVCQQYEFYNEKKVGRPIKFNALLTTYEVVLKDKAVLSKIKWIYLMVDEAHRLKNSEAQLYTALLEFSTKNKLLITGTPLQNSVEELWALLHFLDPGKFKNKDEFVENYKNLSSFNESELANLHLELRPHILRRVIKDVEKSLPPKIERILRVEMSPLQKQYYKWILERNFHDLNKGVRGNQVSLLNIVVELKKCCNHPFLFESADHGYGGDINDNSKLDKIILSSGKLVILDKLLVRLRETKHRVLIFSQMVRMLDILAEYLSLRGFQFQRLDGSTKAELRQQAMDHFNAPASDDFCFLLSTRAGGLGINLATADTVVIFDSDWNPQNDLQAMSRAHRIGQQEVVNIYRFVTSKSVEEEILERAKRKMVLDHLVIQKLNAEGRLEKRETKKGSNFDKNELSAILRFGAEELFKEDKNDEESKKRLLSMDIDEILERAEQVEEKHTDETEHELLGAFKASSVVANFCNAEDDGSFWSRWIKPDSVVTAEEALAPRAARNTKSYVDPSHPDRTSKRKKKGSEPPEHTERSQKRRKTEYFVPSTPLLEGTSAQVRGWSYGNLPKRDAQRFYRTVMKFGNHNQMACIAEEVGGVVEAAPEEAQVELFDALIDGCKESVETGNFEPKGPVLDFFGVPVKANELLKRVQGLQLLSKRISRYNDPISQFRVLSYLKPSNWSKGCGWNQIDDARLLLGILYHGFGNWEKIRLDESLGLTKKIAPVELQHHETFLPRAPNLKERATALLEMELAAAGGKNTNAKASRKNSKKVKDNLINQFKAPARDRRGKSGPANVSLLSTKDGPRKTQKAEPLVKEEGEMSDDGEVYEQFKEQKWMEWCEDVLADEIKTLGRLQRLQTTSADLPKEKVLFKIRRYLEILGRRIDAIVLEHEEDLYKQDRMTMRLWNYVSTFSNLSGDRLNQIYSKLKQEKEEEEGVGPSHLNGSRNFQRQQKFKTAGNSQGSQQVHKGIDTAKFEAWKRRRRTENDVQTERPTITNSNSLGILGPGPLDRSHRARQTGFPPR

SEQ ID NO: 11756 - protein, 591 aa, uncultured marine bacterium 581
MSNLTGSPRMIYAATLILAACSLLYELLIAQALATFAANTVTWYSVTVGLYLAGMGLGALLHDQHPTDNLWARFFKVEIALSAAGAIAVPLLHFSHTGALLLELYGLTFLGKVLFFGTGFLSITTIGILTGFELPVLIDLANTAKDKKRLTNRVLASDYTGSLLGGLAFPLILLPKLSLVAIGLIAATLNVFLATLALYFFLPKLHRSSFGFIVSGSLIIMLGLGLSFAPSLDRYFTKLYYFYWDQSEDFKQLFASMDNTEDVFRVRSPYQRIDLVHDKNGSGPSPVDDFYSSKFVDNPQQPKNYSLFLNGDFQLASNYEEYYHEFFAHIPIMTNGAVPRHVLVMGGGDGLLLRELVKYSDIKTIVHVDLDRELIEQATTHPVLLAMNEGSLSDPRITRHFDDAYRFIRNSSDQFDAIYLDFPDPRDYNLSKLYSREFYHFVRQRLTSDGFIALDSPGLRHNKERREIYTSTLAAAGYQFVTPYISKIETINEAAYEFLLASGYEEEKARRLLASHAASMRLGFITARDNWPDRPIYQDPRVKLHVINDTRLYLTLRNLIPSLAPTDPDKINSIFRPTLPSGNIWHVRDPW

SEQ ID NO: 11757 - protein, 160 aa, Griffithsia japonica
PIVRLPIHPTPNSRRPQPLSTAPPSPASRLSFPPRRRRLCPPAIGAAASASVYDLSAFKNGRPYPFSPLSGKLTLFVNVASYCALTPQYEGLVALHTAYQPKGFEVVASPCNQFGRQEPQPDDEICAFVKERFGARFVLLDKLVVNERPADGRSPRSTVS

SEQ ID NO: 11758 - protein, 1137 aa, Puccinellia tenuiflora
MEEAGSSPDDAVLLFGVSLVLGIGSRHLLRGTRVPYTVALLVLGVALGSLEYGTKHGLGKLGAGIRIWAAINPDLLLAVFLPALLFESSFSMEVHQIKKCMAQMVLLAIPGVVLSTVLLGSAVKLTFPYNWSWKTSFLFGGLLSATDPVAVVALLKDLGASKKLSTIIEGESLMNDGTAIVVCQLFYRMVLGTTFDAGSIIKFLTQVSLGAVALGLAFGIASVLWLGFIFNDTIIEISLTLAVSYIAFFTAQDAFEASGVLAVMTLGMFYAAFAKTAFKGDSQESLHHFWEMVAYIANTLIFILSGVVIADGVLQDNIHFERHGASWGFPLLLYVFVLTGRAVVVTVLYPLLRHFGYGMDVKEATVLVWSGLRGAVALSLSLSVKRASDADQPNLKSEVGTMFVFFTGGIVFLTLIVNGSTTQFLLHLLGLGKLSATKLRVLKYTRYEMLNKAKEAFGDLRDDEELGPADWITVKKYITCLNNLEDEQAHPHDAPDKDESVHTMNLRDTRVRLLNGVQAAYWGMLEEGRITQATANILMRSVDEAMDLVSTQSLCDWKGLRSNVHLPKYYRFLQMSRLPRRVVTYFTVERLELGCYICAAFLRAHRIARRQLHDFLGDSEIARIVIDESTAAGEEAKKFLEDVRLTFPQVLLALKTRQVTYAVLTHLSEYIQDLGKTGLLEEKEMVHLDDALQTDLRKLKRNPPLVKMPRASEILNTHPLVGALPAAVRDPLLSNTEETIKVHGTILYSEGSRPTGIWLVSTGIVKWTSQRLSTRHSLDPILSHGSTLGLYEALVGKPYICDIITESVVHCFFIEAETIEQLRQSDPSIEDFLWQESALVIARIFLPQIFEKMAMREMRVLISERSTMNIYIKGEDIELGPNYVCILLEGFLQMNQTLITPPAVLLPSNTDLNVFGLQSSAMNHIDYCYTAPSYQVTARARAILFDIRRPEAESDLQRSASLLSPNLGPPRTQSKEHIGLLRWPQSFHHRSRGPGNPSLAEIGKQPGSFSASALQVSMYGTMMDDEMHTAQPRPRPDRVEANQKHSASYPKVPSRSLSNTRPLLSVRSEGSNMMKRKSAPAPAHAPALDPFPPLAGGRHHRAITEGDLSSDESAGEEVIVRVDSPSMLAFQPRPQGN

SEQ ID NO: 11759 - protein, 461 aa, Physcomitrella patens subsp. patens
MGSASEALMAVLSSDHDYSSVAPVMTPSNSSCTGSSDLFSPPPVSSWLQGSLPGSEQRLGSSQRSKFRGSPLDTLPAPMPEWPYPRDEKVLVNALQGPCRATNFRSNMTAPHDLNRPRHGGLQRYHSAPSSFLQCLDDLMNEPDVFPQASSSLVDSDVLLDWADDLTPITERGSQQMDTEKSYPRSGFNDCEQFLSSLTNFSSITPSPQSQNVEPTGSLARQDGLGGFDLPAIQDSIEENSVAIYQMPGFLFADGSMSCTSSEKIGAANSTISSAYIPEDSTHLVKEPAVCGGLWNCTTSSGGSVGSSSLRGVEVTMEPPLGWHGVSSLGGAVTVGEPAPRLEGLIRHSSLPATSRPFSSTFELDDLQADPSMVYLKTLRANRGHATHPRSIAERVRRGKISERMKKLQELVPNSDRQTNTADMLDDAVEYVKQLQLQVQELTNTVAELQLLQERLGHPTS

SEQ ID NO: 11760 - protein, 589 aa, Chlamydomonas reinhardtii
MRPSSEPGPRFPTSMDPAAAAALSQTAFLGILLLAVLSGYAIRRTRFQWATEGSVALLLGLVAGAGLFGYYYLTDPNHRIPRRLVTFDEDVFFQTLLPPIIFSAGFSVKKKLFFRNFFTLMIFGVLGTMVSAGILASGSLGLMTAVGLPLHGLLRMSLALGSVLSCTDSVASLSVLDGERHPLLYSLLFGEGVVNDATAIVLLGSVSNLNAFDESQALGLSGLWALALQFLRLFVLSTALGLGVGMASAALVRRLFRRPGAPSPASAPAAGGAAAAAAGSDHGGSGSSNQEVLAVALLGLVAYFLAEALDLSAILSVFFCGIAMSHYTWHSLSPAAKVITRHGFHVISSACEVTLFVYAGLDVWVTAVWWRPDVSRRYLLAAVLLAAGLLAMMAAARAAFTFPVCWLANRLWRRADPIPAGGASVLWWGGLPRGAITLALAYHCFYKDASECTCRLAHTGPLRHQARGAGCHLRRHPGGCDHHGRVRRHHAARHAGLHQPGCQQARTRRRPDAGALTPRGPRRPPHPRLQPPRHRTGARRTSRIRLAGTVAAAVSSAVSGKGDAGCAAFGGGGGWRRRRRRAGGSSHGG

SEQ ID NO: 11761 - protein, 423 aa, Synechocystis sp. PCC 6803
MLKQKRSLILGTTALLLTTVAVTGVGLRLARSQGYLQDNPKELVDEVWQIVNRTYVDGTFNGEDWVAVRQDYLTRDYKNQEEAYTAIREMLEKLNDPYTRFMSPDEFQSMRIDTSGELTGVGIQITQDQDTKKIVVVAPIEDTPAYNAGILSKDVITKIDGKSTDGMEVDDAVKLIRGKPGTSVVLTIEREGQAIEYPLTRTLIEIHPVRAQVEDINGARVGYIRLNQFSAQASEEMRQAVQKLEKENVVGYIFDLRSNPGGLLYSSVDIARIWLDEGGIVSTVDRRGEVEQQSANKRQLSNRPLVVLVDGGSASASEIVSGALQDNQRAVIVGTKTFGKGLVQSVRELGDGSGMAVTIAKYLTPNGRDINKHGIDPDVEVELTDAQRKELQQNREKVGTLEDPQFARAYEVLMQQVNKTASK

SEQ ID NO: 11762 - protein, 201 aa, Zea mays
TAAEAAKGLVPAATATALMGKSGSVLLLIMLFMAVTSAGSAELVAVSSLCTYDIYRTYINPDATGEQILRVSRATVLVFGCLMGVLAVILNLVGVSLGWLYLAMGVIIGSAVIPIALLLLWRKANALGAILGAVSGCVLGVTVWLSVAKVQYGRVDLDSTGRNAPMLAGNLVSILVGGAVHAACSLAWPQHYDWESSRQIT

SEQ ID NO: 11763 - protein, 444 aa, Thermodesulfovibrio yellowstonii DSM 11347
MTYSKPRDEKDVMKLVKEMNVKFVRLWFTDILGQLKSFAVPVEELEVAFSEGMGFDGSSIHGFARIDESDMIARPDPTTFAVLPWRPKESPVARMFCDIYEPDGTPYKGDPRYILKTNLEKAAKKGFTFYLGPELEFFYFKTDKDPEILDEGGYFDYPLDAAEDLRRDTILALEQMGIKVEYSHHEVAPSQHEIDLRYAEALNMADIVMTYRVVVKEIAKRHGVYATFMPKPLFGENGSGMHTHQSLFKGDKNAFFNPKDPYYLSDIAKSYIAGVLTHIKEITLVLNQWVNSYKRLVPGYEAPVYICWARRNRSALIRVPLYKPGKEKATRIELRSPDPACNPYLAFACMLNAGLTGVEKKYKLPEPIEKDVYHLAPEERKSLGIDSLPGSLIEAIEYAEKSTILKETLGEHIFTNLIESKKKEWDDYRIRIFPYELERYLPIL

SEQ ID NO: 11764 - protein, 699 aa, Magnaporthe grisea 70-15
MAGGGGAASGAISPPLSQAYGYGIVVGLGFLFCFLMIFLTWVLKRYNNESQTSEMFNTAGRTVKSGLVASAVVSSWTWAATLLQSSGVAYRYGVSGPFWYASGATVQIILFATLAIELKKRAPNAHTVLEVIRARYDAGKLHEDISADFLKGRVTHCVYICFCLFTNILVTLMLIVGGSAVMTSLTGMSTEGACFLIPLSVVIYTTFGGIKATFLSDYVHTVIVNVIIIIFAFTAYSTGSKLGSPSVVYDRLVAAAASHPVDGNAQGSYLTMQSREGIVFFVINIVGNFGTVFMDNGYYNKAIAASPVHALPGYIIGGLAWFAIPWLCATTMGLSALALEGSPAFPTFPDRMLPADVTAGLVLPYAAVALLGQSGAICTLIMIFMAVASAFSSQLISVSSIVTYDIYQTYINPSAKGKNLIAVSHVSVCAYGIIMAGFSVGLHHAGISMGWLYLWMGVMISAAVIPATLTLFWKRQNKFAAAGAPILGLICALVAWTVTCAREFDGVLSIENLGSNSPMLAGNVVALLSPLVFVPVLTFAFGADDYNWASMAAIEQADDDKTSGTEGGELESGNDRPAFAVVAPEQDMAKLHRASRIAKWLTCLMSISFLVLWPMPMYGSGYVFSKPFFTGWVTVGMIWIFASTAAVGVFPLWEGRYSILRVAKGMLGMKTKSSGSDEPIEGVVAYESKADSEEKKRED

SEQ ID NO: 11765 - protein, 482 aa, Rhodopirellula baltica SH 1
MSGELLAVTGAILSPQSGYILLAIFGILWIALGWWWGRQAKSYDGFAVAGRNVGLAMGTATAVATWITSNTTMLAPQYALQLGIWGALAYSTASFGLFAFAPMSGRIRQLMPKGYTAVEFIRRRYGWLGTVPFLIISLFYAVTWLVSMSMAGGKLLNVLSGIPYEYGMTVVVLVCVAYTLFGGMYAVIGTDFIQSLIILVGLVVVAIAVLTQVEIQEVHEKLQNERPMLLSAFFPAALMALFNNMLFGFGEIFHSNVWWSRAFAMREGVGPKAYALGGVLWLPVPIVAGFLGLAAPALGIGISEPDTAGPLVAATLLGTGGALLVFVVVFCSLASSIDSLLAATSDLIVNDIAEPIQKRVTNRHSSDSSKRKLSAMAIVGLGAIAWIAAFPNVGSLATVLFFAGPMVGSCIWPILCGLYFRRASPIAACASMVLGSLLGLVAYFQIGWFTASLIGAAVSGVTFAVCCQIWPDDFEFATLADD

SEQ ID NO: 11766 - protein, 1124 aa, Physcomitrella patens subsp. patens; identical to SEQ ID NO: 8328

SEQ ID NO: 11767 - protein, 208 aa, Arabidopsis thaliana
MTSSVVVAGAGDKNNGIVVQQQPPCVAREQDQYMPIANVIRIMRKTLPSHAKISDDAKETIQECVSEYISFVTGEANERCQREQRKTITAEDILWAMSKLGFDNYVDPLTVFINRYREIETDRGSALRGEPPSLRQTYGGNGIGFHGPSHGLPPPGPYGYGMLDQSMVMGGGRYYQNGSSGQDESSVGGGSSSSINGMPAFDHYGQYK

SEQ ID NO: 11768 - protein, 444 aa, Bacillus pumilus SAFR-032
MAKYTREDIVKLVNEENVKYIRLQFTDILGTIKNVEIPVSQLEKALDNKCMFDGSSIEGFVRIEESDMYLYPDLNTFVIFPWTAEKGKVARFICDIYKPDGTPFDGDPRNNLKRILKEMEDLGFSDFNLGPEPEFFLFKLDEKGEPTLELNDKGGYFDLAPTDLGENCRRDIVLELEEMGFEIEASHHEVAPGQHEIDFKYAGAIRSCDDIQTFKLVVKTIARKHGLHATFMPKPLFGVNGSGMHCNLSLFKNGKNAFFDEKADLQLSETARHFIAGIVKHATSFTAVTNPTVNSYKRLVPGYEAPCYVAWSAQNRSPLIRIPASRGISTRVEVRSVDPSANPYLALSVLLAAGLDGIKNKLDAPAPIDRNIYVMDKEERLENGISDLPATLAEALELLKSNEVMVNALGDHLFEHFIESKEIEWDMFRTQVHPWERDQYMSQY

SEQ ID NO: 11769 - protein, 838 aa, Debaryomyces hansenii
MGRKLLTEYTTPLGSGAGVPKEKRPAMITDGAVRLTRPFRVPFANRGQTIGAGSSNTTKRLPLRNVRNKVTNYSDMDNMNGDEDIGVDEDGNVIRGIKRFGALLPRSMLKGDGLNSNENKFRKSFTIPFSKNNEKMAQFDNKGPPPPLGTRRKTILPPRALHDPTSEFAIVLYDPTVDIIPIIEETKENDKEKELEENKENIEERPAKRQRTHKSLAEILGICKNPEDSLAKYPDVPVVIDPRLAKILRPHQIAGVKFLYRCTSGLIDPRAKGCIMADEMGLGKTLQCLALMWTLLKQSPRGKRTIEKCIIVCPSSLVRNWANEIIKWLGEGVLTPLAVDGKSTKSSDLGQALQQWSVATGRNIVRPVLIISYETLRRNVDKLAGTEVGLMLADEGHRLKNGDSLTFTALNSLRCERRVILSGTPIQNDLSEYFSLLNFANPGYLGTRNDFRKNFESAILRGRDADATDKEKEVSDKKLTELSQMVSKFIIRRTNDILSKYLPVKYEYVVFVGLSPMQKKLYEYFVTSPEIKKLLKGVGSQPLKAIGMLKKLCNHPDLLNLPDDLDGCDSLIPEDYVPAIGNGNRSREIQTWFSGKFMLLERFLHKIRTETNDKIVLISNYTQTLDLIEKMCRYKKYANVRLDGTMNINKRQKLVDRFNDPEGSEFIFLLSSKAGGCGINLIGANRLILIDPDWNPASDQQALARVWRDGQKKDCFIYRFISTGTIEEKIFQRQSMKLSLSSCVVDEKEDVERLFSADNLKQLFEFQPNTPCDTHDTYSCKRCRPDTGQFIKSPAMLYGDSTTWNHLNHDALNENEDILLRNESEFNDVSFAFQYVSH

SEQ ID NO: 11770 - protein, 545 aa, Oryza sativa
MELGLGMGMGLGDPPADYGSIAAVGMFVALICVCIVVGHLLEESRWMNESITALIIGLGTGGVILMVSSWKHSRILVFSEDLFFIYLLPPIIFNAGFQVKKKQFFRNFMTITLFGAIGTLISFSVISLGSLGLISRLNIGSLDLGDYLALGAIFSATDSVCTLQVLNQDETPFLYSLVFGEGVVNDATSVVLFNAMQNFDLANFSSVKFLQFIGNFLYLFATSTFLGVAAGLLSAYIIKKLYFGRHSTDREVSIMMLMAYLSYMLAELLDLSGILTVFFCGIVMSHYTWHNVTESSRVTTKHAFATLSFIAETFLFLYVGMDALDMEKWKIVGETFSPMKSIALSSTILFLVLVARAAFVFPLSFLANLTKKTEEGKISIKQQVIIWWAGLMRGAVSIALAYNKFTRSGHTQLPSNAIMITSTITVVLFSTMVFGLLTKPLIRLLIPARHLNRESSALSDPPSPKSFLDPLILNGSDVDPEIGVGIRRPTSLRLLLASPTQSVHHYWRKFDNAFMRPVFGGRGFVPFVPGSPTERSVPLLQGNEN

SEQ ID NO: 11771 - protein, 977 aa, Cytophaga hutchinsonii ATCC 33406
MKVSTTEPFQIIYSLFEHEYLGYLFESFVIQLDHQRRLTLKHQNISAKNADEFARELDDVDFKLIDLIDSIQQEAIVKKFYNKKITPAEFFLKIYHKEKGDELIQDAIRSYIELKKNQILCLLENKMLFEMGHDGEPTWKRLALAPQKANILFHFMRNEDNTHYFPTIKYDGQKIDFQYKNAIIVCSMPAWLLVDNTVYHFNKDVDGNKLKPFLNKKFILVPRKMEETYYEKFVTQIVSSFDVHAKGFTIHAEEYAPKPVLTLTELAVAKAPVSLFDTAGQDTAVDTVEENKILVSLDFQYGTFIFSSDKLSPSFVKMEKTDDSYIFHKVKRDSDKEKDFLDLLRNSDLEFKSGKVTLDKSKIFSWLSANRAALEAQGLVVRQNLKDGKRYFVGASSISLEVKENNDWFDIYAVVRFGEFEIPFLKLKQYILKKKKEFVLPNGEIAVIPEEWFSQYSDLFAFIEDDSDDLKLRKHHMALVKELQNDRLAEVSMDRKLERLRDFQEIEDYDLPAEFKGELRPYQKAGYNWMRFLNQYNFGGCLADDMGLGKTVQTLALLQSLQKTADGKASLLIMPTSLVYNWEMEARKFTPDLKILNFTGINRDKNVEQFHNYDIIITSYGTVRIDIELFKQYQFYYTILDESQVIKNPESIIAKAVKELNSKHRLILTGTPVENSTMDLWSQMTFVNPGLLGSQQFFRNEFLNPIEKKHDEVKTKRLYSIIKPFILRRQKSQVVKDLPEKIENVHYCTMSPEQEQEYEKTKSNYRNLILESIDEKGLAGSQILLLQGLTKLRQIANHPSLVEDTFEGTSGKMEDVNYMLDNALELGHKILVFSQFVKHLHLYAKLLDKAGIKYAYLDGQTRDRQAEVERFQNEEGIRVFLISLKAGGLGLNLTAADYVFLLDPWWNPAVEAQAVDRAYRIGQKNTVFTYKFITKNTVEEKILNLQKNKLKLANDLISSEETFFKALSKEDIQSIFD

SEQ ID NO: 11772 - protein, 613 aa, Kluyveromyces marxianus
MAEGVFPGAIGIDLGTTYSCVATYENSVEIIANEQGNRVTPSFVAFTPEERLIGDAAKNQAALNPKNTVFDAKRLIGRRFDEESVQSDMKTWPFKVIDSNGAPLIEVEYLGETKTFSPQEISSMVLTKMKEIAEAKIGKKVEKAVVTVPAYFNDAQRQATKDAGAIAGLNVLRIINEPTAAAIAYGLGAGKSEKERHVLIFDLGGGTFDVSLLHIAGGVYTVKSTSGNTHLGGQDFDTNLLEHFKAEFKKKTGADISGDARALRRLRTAAERAKRTLSSVAQTTVEVDSLFDGEDFEATITRARFEDINAALFKSTLEPVEQVLKDAKISKSQIDEVVLVGGSTRIPKVQKLLSDFFDGKQLEKSINPDEAVAYGAAVQGAILTGQSTSDETKDLLLLDVAPLSLGVGMAGDVFGVVVPRNTTVPTIKRRTFTTVADHQTTVTFPVYQGERVNCKENTLLGEFDLKGVPPMPAGEPVLEAIFEVDANGILKVTAVEKSTGKSANITISNAIGRLSSEEIEQMVNQAEEFKAADEAFAKKHEARQRLESYISSVEQTVTDPVLSAKIKRNAKAKVEAALADAFSTLQIEDASADDLRKAEVGLKRAVTKAMSTR

SEQ ID NO: 11773 - protein, 143 aa, Triticum aestivum
GDTSQEERELAMDQFNNSADAKVLFGSIRACGEGISLVGASRVVILDVHLNPSVTRQAIGRAFRPGQQKKVFVYRLVAADSQEESFHQTAFKKEVIPKLWFEWSEQHCTSDDFRLNKVDIDDCEDELLDNKAMRQDIKVLYKR

SEQ ID NO: 11774 - protein, 716 aa, Vitis vinifera
  misc_feature (40)..(40): Xaa can be any naturally occurring amino acid
  misc_feature (65)..(65): Xaa can be any naturally occurring amino acid
MVPGNEVKDDASADSPTSVLEDEGICEEKIKVKMEDDILXPLDAKNGDSSLISGTMAKEEEMLMXERVKEEDAEQNRVEEKESEIVEVKKRGRGSKRKAEYNNRKAKRAVAAMLTRSKEGATPEDVNLTEEERAEKEQAGLVPLLTGGKLKSYQIKGVKWLISLWQNGLNGILADQMGLGKTIQTIGFLAHLKGKGFVPSINAIIYHGNRKERDQIRMKYMPRTIGPKFPIILTSYEVALNDARKYLRHYNWKYLVVDEGHRLKNSKCKLLKELKLLPVENKLLLTGTPLQNNLAELWSLLNFILPDIFSSHEEFESWFDLSGKCNNEAVVEELEERKRAQVVSKLHAILRPFLLRRMKSDVEQMLPRKKEIILYATMTEHQKNFKDHLVNKTLENYLKEKASTGRGVKGKLNNLMVQLRKNCNHPDLLESAFDGSYLYPPVEQIVEQCGKFRLLDRLLARLFARKHKVLIFSQWTKILDIMEYYFSEKGLEVCRIDGSVRLDERKRQVPPIFIVTVVLEACFFLTVLIEEFNDMNSNCRVFLLSTRAGGLGINLTAADTCILYDSDWNPQMDLQAMDRCHRIGQTKPVHVYRLATAQSIEGRMLKRAFSKLKLEHVVIGKGQFQQERIKPNMDVLEEEDLLQLLQDQEDSEDKLIQTDISEEDLDRILDRSDLIGDTSNDDGRSNSAADAFPLKGPGWEVMTPTASGGMLSTLNS

SEQ ID NO: 11775 - protein, 656 aa, Chlamydomonas reinhardtii
MAQWKAAVLLLALACASYGFGVWAEEEKLGTVIGIDLGTTYSCVGVYKNGRVEIIANDQGNRITPSYVAFTDEERLIGDAAKNQATVNPKRTVYDVKRLIGRKYEDKEVQRDKKLVSYDIVDRQGKPYVAVDVKGEQKVFSPEEISAMILQKMKDTAEAYLGKTVKHAVVTVPAYFNDAQRQATKDAGTISGLNVVRIINEPTAAAIAYGLDKKGGEKNILVFDLGGGTFDVSILTIDNGVFEVISTNGDTHLGGEDFDQRVMEYFIKLIKKKYKKDISGDARALQKLRREAERAKRALSSQHQVRVEIEALYEGIDLSEPLTRARFEELNMDLFKKTMGPVKKAMDDANLKKTEIDEIVLVGGSTRIPKVQDLLREWFDGKEPNKGVNPDEAVAYGAAVQGGILGGEGGDEVKDILLLDVAPLSLGIETVGGVMTKLIPRNTVIPTKKSQTFTTYQDQQTTVSIQVYEGERAMTKDNHKLGQFDLNGIPPAPRGTPQIEVTFEVDANGILNVAAEDKGTGKKEKITITAEKGRLSQDDIERMVKEAEEFAEQDKAVKAKIDARNQLETYCYNMKSTVEDKMKDKIEEEDKEKITAAVKEALEWLDENPDAEPDEYKDKLKEVEDVCNPIIAEVYKKSGGPSDGGDSEDLGDHDEL

SEQ ID NO: 11776 - protein, 469 aa, Bradyrhizobium japonicum USDA 110
MKTAKDVLKSIKDNDVKYVDLRFTDPRGKWQHVTFDVSMIDEDIFAEGTMFDGSSIAGWKAINESDMCLMPDPVTATIDPFFAETTMVITCDVLEPTTGEPYNRDPRGIAKKAEAMVKSMGVGDTVFVGPEAEFFVFDDVRFSSSPYNTGFRLDSSELPTNTDTEYEGGNLGHRVRTKGGYFPVPPQDSVQDMRSEMLGAMAKMGVKVEKHHHEVASAQHELGMKFDTLTLMADHLQIYKYCIHQVAHIYGKTATFMPKPVYGDNGSGMHVHQSIWKDGKPVFAGNKYADLSETCLHYIGGIIKHAKAINAFTNPSTNSYKRLVPGYEAPVLLAYSARNRSASCRIPYTASPKAKRVEVRFPDPLANPYLGFAAMLMAGLDGIKNKIDPGPAMDKDLYDLPKEELKQIPTVCGSLREALENLDKDRAFLKAGGVFDDDFIDSYIELKMTEVERFEMTPHPVEFDMYYSG

SEQ ID NO: 11777 - protein, 263 aa, Brassica oleracea
MANFENLSSEFQTIAVDIYSSMNQAADLNNNNNISSNLQFQTFPPFSTSLDSLFLHHRHPQQLHDLPGKYPGSDNNLSATSTLYHSSHNNVDETKKRKALLQPLSSSENSSVSDQLNINTTKTGCSRRGKRLKKKNQEEEKEREVVHVRARRGQATDSHSLAERVRRGKINERLRCLQDIVPGCYKSMGMATMLDEIINYVQSLQNQVELLSMKLTAASSFYDFNSETDAVDSMQRAKAREAVEMGRQTRDGNPVLHLSAWSL

SEQ ID NO: 11778 - protein, 439 aa, Thermotoga maritima MSB8
MTIETIKRIIEEENVRFIRLQFTDINGTLKNLEITPDVFLESWEDGIMFDGSSIEGFVRIEESDMYLKPVLDTFAVLPWTVDGAKSARVICDVYTPDGKPFEGDPRYRLRRMMEKAEQLGYTPYAGPEMEFFILPINEKGEPVPEFLDHGGYFDLLPLSKVEEIRRDIAIALEKMGITVEATHHEVAPSQHEVDFRYDTFLRTADNAQTVKLVIKTMAIFHGYHATFMPKPFYGVNGSGMHVHMSLFRGDKNAFYDPDDPLGLSKELRYFVGGILKHAKALAAVTNPTINSYKRLVPGYEAPVYISWSVGNRSALIRIPKARGKATRLEYRSPDPSCNIYLAFAAILAAGLDGIINKIEPPAPVEENIYHMTSERREELNIESLPGSLKEAVEELKKDDVIIDALGEHIFEKFVEAAEKDWKEFSTYVTNWELQRYLYL

SEQ ID NO: 11779 - protein, 170 aa, Physcomitrella patens subsp. patens
MAGSKEAGQTIYDFVVKDIDGSDVELSKYRGKVLLIVNVASKCGLTTTNYKELADVYTKYKSQDFEILAFPCNQFGGQEPGTNEQIKEFACTRFKAEYPIFDKINVNGPQEAPLYKYLKLQKGGGWLLGDSIKWNFAKFLVDKNGNVVDRFAPTTPPSKIEKSIETYLSR

SEQ ID NO: 11780 - protein, 164 aa, Candida glabrata CBS 138
MAAKSFYELECKDKKGETFKFDTLKGKVVLIVNVASKCGFTPQYKDLESLYQKHKDEGLVILGFPCNQFGGQEPGSQEEIGNFCQLNYGVTFPIMHKIEVNGDNTDPVYDFLKSQKSGLLGLNRVKWNFEKFLVDKHGKVHQRYSSLTKPMSIEDDIKQLLAQK

SEQ ID NO: 11781 - protein, 493 aa, Vibrio vulnificus
MRNTMNLTNLLAPWLDCPELADITVQSLELDSRQVKQGDTFVAIVGHVVDGRQYIEKAIEQGANAVIAQSCQQYPSGLVRYQQNVVIVYLEKLDEKLSQLAGRLYQHPEMSLIGVTGTNGKTTITQLIAQWLELAGQKAAVMGTTGNGFLNALQPAANTTGNAVEIQKTLADLQQQGAKATALEVSSHGLVQGRVKALQFAAGVFTNLSRDHLDYHGTMEAYAKAKMTLFTEHQCQHAIINLDDEVGAQWFQELQQGVGVSLFPQDASVKALWASSVAYAESGITIEFDGCFGQGRLHAPLIGEFNATNLLLALATLLALGVDKQALLDSAASLRPVLGRMELFQVNSKAKVVVDYAHTPDALEKALQALRVHCTGHLWAIFGCGGDRDKGKRPMMAEIAERLADHVVLTDDNPRSEDPTMIVQDMLAGLTRADSAVVEHDRFSALQYALDNAQADDIILLAGKGHEDYQVLKHQTVHYSDRESAQQLLGISS

SEQ ID NO: 11782 - protein, 154 aa, Lupinus luteus
MGVLTDVQVALVKSSFEEFNANIPKNTHRFFTLVLEIAPGAKDLFSFLKGSSEVPQNNPDLQAHAGKVFKLTYEAAIQLQVNGAVASDATLKSLGSVHVSKGVVDAHFPVVKEAILKTIKGVVGDKWSEELNTAWTIAYDELAIIIKKEMKDAA

SEQ ID NO: 11783 - protein, 278 aa, Silene vulgaris
EAHSLKVEKILFQGKSKLQDVMVFQSSTYGKVLILDGVIQLTERDECAYQEMISHLPLCSIPNPKKVLVIGGGDGGVLREVARHSSVEHIDICEIDEMVVTVSKEFFPEVAVGYDDPRVNLHIGDGVAFLKAATEGSYDAVIVDSSDPIGPAKELFEKPFFESVAKALRPGGVVCTQAESIWLHMHIIEDIVSNCREIFKGSVNYAWTTVPTYPSGVIGFMVCSTEGPAVDFRNPVNPIDKMEDEKRPLKFYNAEIHSAAFCLPSFAKRIIEAKANST

SEQ ID NO: 11784 - protein, 509 aa, Geobacter sulfurreducens PCA
MRLEDLARVVDPIAVRGDLTREINGLYCDSRQVRSGGLFFALKGVASDGHDFIASARERGAVAVVLEDETRAPCGMEWIRVGDARLAMSRMAALFYGQPTDGVPVVGITGTNGKTTTTYLVEAIMSRAGIPAAVLGTISYRFGSKLVPAPHTTPESVELQATIRDLVDEGAKAVVMEVSSHALEQRRVDSCRFDVAVFTNLTRDHLDYHRDMESYFGSKARLFTELVAPDGVKPRRAAAINRDDSYGARLVETAVAPVISYGLAADAAVRAENVVFSVDGIAGTLVTPFGTAPFHSHLLGRFNLYNILAAVAAGVGLGLSLDVILGGIEGDVRVPGRLERVHNERGVTVLVDYAHTGDALENVLKTVSELATGRIITVFGCGGDRDRGKRPVMAEISGRYSHLTIVTSDNPRTEEPAAIIKEVLTGIIPMGLREYDARELNRGFVEKGFTSLVSRHDAIRLAATVAVAGDIVLLAGKGHEDYQIIGTEKFHFDDREEAIAAFRSSDSGE

SEQ ID NO: 11785 - protein, 476 aa, Solibacter usitatus Ellin6076
MPNQLQDFLTLSYAELEELNLQAKAERLGRAPTHQIQEQRLKYLTDEKRIKAVTVLFSDLEGRLHMLDYDKKFLVKSWDNLTFDGSSIRGFTAQRESDLRLSMDWSSFYWAPSDVFGAGKVLVFGEVIDKDGTPYSADIRGVLKAYAQSLYEKQGYTLNAANEIEGFLFNGSDAERRYHETAKFDYVNTGGYYHSLPGDPLRTFIDSCAEVQRAMGFQNEKDHPEVAPSQFEINYSYAEVVAAADQIQLYKLICRQVATRMGLTASFLPKPVVGVNGSGMHTNVSITKGGKNIFWDPKGEEKMSKFAWQFVDRILTHGNDLCLLLNASVNAYRRLDPHFEAPNQIKASAVDRGSMIRIPIGNERSSRVEVRSVGPDANPYMVMLGVFRTGLEGEISRIKNLRGAERYLPDNIYDAMANFKNAEWTTKLLGEDVKGRYADLKQASADRCPRLLGTFVKTPEVQYHHEVYNQFLWNMF

SEQ ID NO: 11786 - protein, 229 aa, Zea mays
  misc_feature (212)..(212): Xaa can be any naturally occurring amino acid
  misc_feature (220)..(220): Xaa can be any naturally occurring amino acid
MLLSVPIQMALNPSFRFRAKSTDNDAQDWDLQRAIGLMEVGDARNGSAAAALTKGGADDAARKPLPPCCVKAKARVPETEANCHDTVVSGWFTEPRSRFGKTSKVQYFNNPMWPGEAHSLKVEKILFQGKSPYQEILVFESSTYGNVLVLDGIVQLTDKDECAYQEMVTHLPLCSIPAPKNVLVVGGGDGGVLREIARHDSVETIDICEIDXLVIDVPKXFPNLSIGFK

SEQ ID NO: 11787 - protein, 278 aa, Silene latifolia
EAHSLKVEKILFQGKSKYQDVMVFQSSTYGKVLILDGVIQLTERDECAYQEMISHLPLCSIPNPKKVLVIGGGDGGVLREVARHSSVEHIDICEIDEMVVTVSKEFFPEVAVGYDDPRVNLHIGDGVAFLKAATEGSYDAVIVDSSDPIGPAKELFEKPFFESVAKALRPGGVVCTQAESIWLHMHIIEDIVSNCREIFKGSVNYAWTTVPTYPSGVIGFMVCSTEGPAVDFKNPVNPIDKTEDEKRPLKFYNAEIHSAAFCLPSFAKRIIEAKANST

SEQ ID NO: 11788 - protein, 649 aa, Ageratina adenophora
MSGKGEGPAIGIDLGTTYSCVGVWQHDRVEIIANDQGNRTTPPYVAFTDSERLIGDAAKNQVAMNPTNTVFDAKRLIGRRFSDASVQSDIKLWPFKVTPGPAEKPMIAVNYKGEEKTFAAEEISSMVLIKMKEIAEAFLGTTVKNAVVTVPAYFNDSQRQATKDAGVISGLNVMRIINEPTAAAIAYGLDKKATSVGEKNVLIFDLGGGTFDVSLLTIEEGIFEVKATAGDTHLGGEDFDNRMVNHFVQEFKRKHKKDITGNPRALRRLRTSCERAKRTLSSTAQTTIEIDSLYEGVDFYSTITRARFEELNMDLFRKCMEPVEKCLRDAKMDKSSIHDVVLVGGSTIIPKVQQLLQDFFNGKELCKSINPDEAVAYGAAVQAAILSGEGNEKVQDLLLLDVTPLSLGLETAGGVMTVLIPRNTTIPTKKEQVFSTYSDNQPGVLIQVYEGERTRTRDNNLLGKFELSGIPPAPRGVPQITVCFDIDANGILNVSAEDKTTGQKNKITITNDKGRLSKEEIEKMVQEAEKYKSEDEEHKKKVEAKNALENYAYNMRNTVKDEKIGEKLTPGDKKKIEDAIDEAIAWLDANQLAEADEFEDKMKELENVCNPIIAKMYQGGAGDAAGAGGMDEEPAPSGGGAGPKIEEVD

SEQ ID NO: 11789 - protein, 914 aa, Pseudomonas syringae pv. phaseolicola 1448A
MSSILEKVLAAAWTDLFHERTLERGRDYARQKRIVLEDSSPQIIRTACRGSGLEIYTQTLLFKDPDRYKNYLTCKCTCPVRNDCKHCVAALLFLQDPQNRPLLQAALASHQQEPEKPVEQKPRLPERLIDDLQPRPRLILASIEFSAYEPRNGRMQRHIQHRAALAFAYGKHYAVGTTNVSILVSSLGSDLVNQKSDIIEHTDTETLRIRRQGERERQLRQELANLGFKVATRQSKALPDSAGDMYELPNDKAWLHFVLDDLPRLREQGWEIDIQDEFGFDVTPVEDWYAVIDEENERDWFDLELGIIVNGERLSLLPILINLIRSHPELMSPSAVAKRGDEEQLLVQLNHFTQSGGSPVQIALPYGRLKPVLATLGDFYWRQEGNNALRMSKADAARLTQLEDLPLTWQGGDRLRHFAERLINIKDAPVSLPDGLNATLRPYQLEGLSWMQSLRELEVGGVLADDMGLGKTLQTLAHLLMEKQAGRLDRPALAVMPTSLIPNWLDEAEHFTPDLKVLALYGANRHQDAGNLQDYDLILTTYALLPRDLELLEKQPFHVLILDEAQYIKNPNSKAAQAARNLNARQRLCLSGTPLENHLGELWSLFHFLMPGWLGNSKEFNSNYRTAIEKHGNQDRLHHLNARIKPFLLRRTKEQVATELPPKTEIIHWVDLNDAQRDVYETVRLAMDKKVRDEITRKGVARSQIIILEALLKLRQVCCDLRLVNQDMPVNSKQGTSGKLNSLMEMFEELLAEGRKILLFSQFTSMLSLIEEELKQRGIAYALLTGSTRDRRTPIHDFQSGKLPIFLISLKAGGTGLNLTAADTVIHYDPWWNPAAENQATDRAYRIGQDKPVFVYKMIARGTVEEKIQRLQREKSALAAGVLDGRTTGDWKLRDEDLQALFAPLPAAPKKTRK

SEQ ID NO: 11790 - protein, 468 aa, Listeria monocytogenes str. 4b F2365
MKLFPFIMLLFAFVFVTALVTTIVMSLGDDKQVKVSIPERKEFTKLYDVYDEITSKYYKDTKSTTMIDGAINGMVNSLDDPYSTFMSKKESSEFNDTISASFEGIGAEIQEKDGAIVIVSPIKNSPAEKAGLRPQDIITQVDGKSVKGDTATEATQKIRGEKGTKVTLTIQRSNEDKPFDVTITRDEIPIETVYKEMGSDKIAHVTISTFSETTYDELEKALKSLEKDGMKGLVLDLRGNPGGLLDQAVSISSLFVPDGKIVVQEQDKDGDKSAIKADSSSHGDYKVKVPTTMLIDGGSASASEILAAAAKESGGIKLVGTKSFGKGTVQTATTLSDDSTLKLTVAKWLTPNSEWIHEKGITPDVVVNMPDYATMTIPSSTKVYKNGDFGDDVKTIETLLKALDYNVGKVDGLYDTDTEYAVQRFQAANKLDVTGIMTGVTTDKLVELTQKHLKETDPQLQKAKALVK

SEQ ID NO: 11791 - protein, 275 aa, Zea mays
  misc_feature (200)..(200): Xaa can be any naturally occurring amino acid
  misc_feature (245)..(245): Xaa can be any naturally occurring amino acid
MDPMDIVGKSKEDVSLPKSTMFKIIKEMLPPDVRVARDAQDLLVECCVEFINLLSSESNEVCSREEKKTIAPEHVIKALSDLGFREYIEEVYAAYEQHRLETLDSPKAGKFTRIAMTEDDAAAEHQRMFAVARARMNNGAPKPKEPEQEPPQLPQAQPQLQLHTEPQQPMQSQVQLHSQTQHYLQPQLQLHSQPQLQPLXQLPPQLQVHQQLQQPPQVQVHQQPEVQPQEAQLQSSAQQTSQPQXSGTTTITGALTSAAASRTAGSVADTGANRT

SEQ ID NO: 11792 - protein, 778 aa, Clostridium perfringens str. 13
MVNLDKGLLKIIKDESLEDYFIKANFGLEKENVRVTESGNLALTPHPKAFGDREKNAYIKTDFSESQLEMVTPVCNTLEEVYSFICNLNKVVSLEIMKNGEFLWPQSNPPILPREEEIPIAKLSNREDELYRENLSYKYGKKKQVISGIHYNFSFKEEFIKLLYKELKVEKDFREFKDDIYLRMARNFQKYHWLLIYLTGASPVFHESYIEEIKEEGEKLGEDSYYIKDDTSLRNSSYGYKNKKDYYVSYNSIEEYASDIKNLVKDKEIQSIKEYYNPIRLKSLGSEDMLESLLHKGIDYLEVRLLDLDPLSIQGVSKETLYLLHLFMIYTLLKENKEITYKDQEEFFKNHDMVALKGRNEEAVIYENGVPVLLKDKGREILSEMDEIVEILFSNNEEFKNVIKRALEKINNPHDTISEKLIKDIKEEGYINFHMRLAKEYLNNFKNKEFNLVGYEDLELSTQILILDAIKRGIEFNIMDRLENFISLSDGEKVEYVKQATKTSKDSYITALIMENKLVTKDILRENNIRVPKGKDYDNIDEAKKDFRLFKDEKIVIKPKSTNFGLGISIFPGEYSREDYDKAVEIAFREDSSILIEEFMTGKEYRFLVIGEEVVGILHREPANVIGNGESTIEELVSEKNKDPLRGKGYKTPLEKIKLGEIEEMFLKNQGLSFKSIPKNGEKIYLRENSNISTGGDSIDFTDKIHPSYKEVALKSAKAVKALICGVDMVIDNIEEEAKEKNHGIIELNFNPAIHIHCFPYKGENRKAGEKILDLLFN

SEQ ID NO: 11793 - protein, 689 aa, Haemophilus influenzae R2846
MSKNVICYAWLSVCLSSAIPAFAVQPTLKPSDISIPAISEESQLATKRATTRLTQSHYRKIKLDDDFSEKIFDRYIKNLDFSHNTFLQSDIDELRQKYGTKLDEQLSQGDLSAAFDIYDVMMKRRYERYTYALSLLDKEPDLNGQDQIEIDREKAAAPQTEADANKLWDARVKNDIINLKLKDKKWSEIKAKLTKRYNLAIRRLTQTKADDIVQIYLNAFAREIDPHTSYLSPRTAKSFNESINLSLEGIGTTLQSEDDEISIKSLVPGAPAERSKKLHPGDKIIGVGQATGDIEDVVGWRLEDLVEKIKGKKGTKVRLEIEPAKGGKSRIITLVRDKVRIEDQAAKLTFEKVSGKNIAVIKIPSFYIGLTEDVKKLLVKLENQKAEALIVDLRENGGGALTEAVALSGLFIADGPVVQVRDAYQRIRVHEDDDATQQYKGLLFVMINRYSASASEIFAAAMQDYRRGIIIGQNTFGKGTVQQSRSLNFIYDLDQSPLGVLQYTIQKFYRINGGSTQLKGVAADINFPEIIDSKEYGEDKEDNALAWDKIPSASYMEVGNIDYIDNAVNILNEKHLARIAKDPEFVALNEELKVRNERRDRKFLSLNYKMRKAENDKDDARRLKDLNERFKREGKKALKDIDDLPKDYEVPDFFLKEAEKIAADFVIFNSDQKINQANGLSEAKTESKK

SEQ ID NO: 11794 - protein, 575 aa, Gibberella zeae PH-1
MATEITNVPSAPSRQQQKLSVLEGPVDPPLVDFTLGELLELQTYQHGNQECLVIPWTGARWTYNELNQQSSSLAQSLLDMGIGVGDRVAIMAGNCEQYAAVFFAVAKIGAILVILNNTYTPTEAMYGLKFSDSKIFFTTPRIGRLDQTQLLQQLENKKTAPKVVMLRGDETGKYETYDSLVTAGRRRNHQRLYQAMTKVLPHQVVNLQFTSGTTGLPKAAMLTHHNLVNNSRFIGDRMRLGPADVLCCPPPLFHCFGLVLGLLAVVTHGGKIVYPAEVFDIQATLQAISDEQCTAVHGVPAMFDSLFQAKWPENFNCDNLRTGIIAGAPVPRYLMELLVNRFGMTEFTSSYGLTEASPTCFNAFTDDSIDTRLTTVGTLMPHAKAKIVDRDGNIVPVGERGELCVGGYQLQAGYWNNSEKTNETMARDASGVLWLHTGDEAVFDENGYCSITGRFKDIIIRGGENIYPLEIEERLMDHPAITRAIVVGLKNKHYGEVVGAFVELADGHQKPEFEELKDWCRKRLGGHKSPAHVFWLGHDDVPATVPLTGSGKVRKFEMAKLGDDLLRKQENVSKL

SEQ ID NO: 11795 - protein, 145 aa, Oryza sativa Indica Group
MGFSETQEELVLRSWQSMKKDSESIALKFFLRIFEIAPAAKQMFSFLRDSGDDVPLESHPKACESATQLRKTGDVKVREATLRRLGATHVKAGVADAHFEVVKTALLDTIKDAVPEMWSPEMKGAWEEAYDQLAAAIKEEMKKAA

SEQ ID NO: 11796 - protein, 278 aa, Thermodesulfovibrio yellowstonii DSM 11347
MIKFFEKDPYAPIQYVYEVEKVLYKGKSKFQEIMVFENPYFGKILVLDGVVQLTERDEFIYHEMLTHVLMHAHPEAKNVAVIGGGDGGAVREVLKHGSVKKLYFIEIDEEVIKVSKEFFPSVSSAIDDSRVEIRCMDGAEFIKEMKNSLDVIIVDSTDIIGFAKSLFTVEFFKFVRDALTENGMFVTLSESLIFHRELVYEVQNSMKLIFPIVELYTASIATYAGNWWSFSVGSKSLDPREIRKPVKIETKLYTADLHKSCFLPRDIYKKLLNKELIW

SEQ ID NO: 11797 - protein, 535 aa, Arabidopsis thaliana
MSSELQISPAIHDPQGQEKQQQAAGVGILLQIMMLVLSFVLGHVLRRHKFYYLPEASASLLIGLIVGGLANISNTETSIRTWFNFHDEFFFLFLLPPIIFQSGFSLQPKPFFSNFGAIVTFSVLGTFVASMVTGLLVYLGGVMFLMYRLPFVECLMFGSLISATDPVTVLSIFQELGSDVNLYALVFGESVLNDAMAISLYRTMSLVRSHSSGQNFFMVIVRFLETFVGSMSAGVGVGFTSAHLFKYAGLDVDNLQNLECCLFVLFPYFSYMLAEGLSLSGIVSILFTGIVMKHYTYSNLSANSQRFVSAFFHLISSLAETFVFIYMGFDIAMEKHSWSHLGFIFFSILFIVIARAANVFGCGYLVNLARPAHRKIPMTHQKALWYSGLRGAMAFALALQSVHDLPEGHGQTIFTATTAIVVLTVLLIGGSTGTMLEALEVVGDSHDTSLGDGFEVVNSRYMTSYDDEDTPPGSGFRTKLREFHKSAASFTELDRNYLTPFFTSNNGDYDDEGNMEQHHEERIPFTRRGNLNNRG

SEQ ID NO: 11798 - protein, 451 aa, Oryza sativa Indica Group; identical to SEQ ID NO: 11325

SEQ ID NO: 11799 - protein, 278 aa, Silene latifolia
EAHSLKVEKILFQGKSKYQDVIVFQSSTYGKVLILDGVIQLTERDECAYQEMISHLPLCSIPNPKKVLVIGGGDGGVLREVARHSSVEHIDICEIDEMVVTVSKEFFPEVAVGYDDPRVNLHIGDGVAFLKVAPEGSYDTVIVDSSGPIGPAKELFEKPFFESVAKALRPGGVVCTQAESIWLHMHIIENIVSSCREIFKGSVNYAWTTVPTYPSGVIGFMVCSTEGPAVDFKNPVNPIDKTEDEKRPLKFYNAEIHSAAFCLPSFAKRVIEAKAKST

SEQ ID NO: 11800 - protein, 1080 aa, Arabidopsis thaliana
MRKLCPNIDKDDGLETVLEVPIPEEMFSGMGNNVALRWQNMMTWMKAQTSDKWSQPLIAARINELRFLLYLVGSPLIPLQVQVGHSVHKPVKDCSIQASTAKYIVQQYIAATGGPQALNAVNSMCVTGQVKMTASEFHQGDDSGVNLKSNDEMGGFVLWQKDPDLWCLELVVSGCKVICGSNGRLSWRHSSNQQTPASTGTPRPLRRFLQGLDPRSTANLFLDATCIGEKIINGEDCFILKLETSPAVREAQSGPNFEIIHHTIWGYFSQRSGLLIQFEDSRLLRMRTKEDEDVFWETSAESVMDDYRYVDNVNIAHGGKTSVTVFRASEMVSDGKTEKDASGDSPTSVLNEEENCEEKSVTVVEEEILLAKNGDSSLISEAMAQEEEQLLKLREDEEKANNAGSAVAPNLNETQFTKLDELLTQTQLYSEFLLEKMEDITINGIESESQKAEPEKTGRGRKRKAASQYNNTKAKRAVAAMISRSKEDGETINSDLTEEETVIKLQNELCPLLTGGQLKSYQLKGVKWLISLWQNGLNGILADQMGLGKTIQTIGFLSHLKGNGLDGPYLVIAPLSTLSNWFNEIARFTPSINAIIYHGDKNQRDELRRKHMPKTVGPKFPIVITSYEVAMNDAKRILRHYPWKYVVIDEGHRLKNHKCKLLRELKHLKMDNKLLLTGTPLQNNLSELWSLLNFILPDIFTSHDEFESWFDFSEKNKNEATKEEEEKRRAQVVSKLHGILRPFILRRMKCDVELSLPRKKEIIMYATMTDHQKKFQEHLVNNTLEAHLGENAIRGQGWKGKLNNLVIQLRKNCNHPDLLQGQIDGSYLYPPVEEIVGQCGKFRLLERLLVRLFANNHKVLIFSQWTKLLDIMDYYFSEKGFEVCRIDGSVKLDERRRQIKDFSDEKSSCSIFLLSTRAGGLGINLTAADTCILYDSDWNPQMDLQAMDRCHRIGQTKPVHVYRLSTAQSIETRVLKRAYSKLKLEHVVIGQGQFHQERAKSSTPLEEEDILALLKEDETAEDKLIQTDISDADLDRLLDRSDLTITAPGETQAAEAFPVKGPGWEVVLPSSGGMLSSLNS

SEQ ID NO: 11801 - protein, 150 aa, Silene latifolia
FLKVAPEGSYDTVIVDSSGPIGPAKELFEKPFFESVAKALRPGGVVCTQAESIWLHMHIIENIVSSCREIFKGSVNYAWTTVPTYPSGVIGFMVCSTEGPAVDFKNPVNPIDKTEDEKRPLKFYNAEIHSAAFCLPSFAKRVIEAKAKST

SEQ ID NO: 11802 - protein, 778 aa, Clostridium perfringens ATCC 13124
MVNLDKGLLKIIKDESLEDYFIKANFGLEKENVRVTERGNLALTPHPKAFGDREKNPYIKTDFSESQLEMVTPVCNTLEEVYSFICNLNKVVSLEIMENGEFLWPQSNPPILPREEEIPIAKLSNREDELYRENLSYKYGKKKQVISGIHYNFSFKEEFIKLLYKELKVEKDFREFKDDIYLRMARNFQKYHWLLIYLTGASPVFHESYIEEIKEEGEKLGEDSYYIKDDTSLRNSYYGYKNKKDYYVSYNSIEEYASDIKNLVKDKEIQSIKEYYNPIRLKSLGSEDMLESLLHKGIDYLEVRLLDLDPLSIQGVSKETLYLVHLFMIYTLLKENKEITYKDQEEFFKNHDMVALKGRNEEAVIYENGVPVLLKDKGREILSEMDEIVEILFSNNEEFKNVIKRALEKINNPHDTISEKLIKDIKEEGYVNFHMRLAKDYLNNFKNKEFNLVGYEDLELSTQILILDAIKRGIEFNIMDRLENFISLSDGEKVEYVKQATKTSKDSYITALIMENKLVTKDILRENNIRVPKGKDYDNIDEAKKDFRLFKDEKIVIKPKSTNFGLGISIFPGEYSREDYDKAVEIAFREDSSILIEEFMTGKEYRFLVIGEEVVGILHREPANVIGNGESTIEELVSEKNKDPLRGKGYKTPLEKIKLGEIEEMFLKNQGLSFKSIPKNGEKIYLRENSNISTGGDSIDFTDKIHPSYKEVALKSAKAVKALICGVDMVIDNIEEEAKEKNHGIIELNFNPAIHIHCFPYKGENRKAGEKILDLLFN

SEQ ID NO: 11803 - protein, 668 aa, Isatis tinctoria
MARSFGANGTVVLAIIFFGCLFALCTAKEEATKLGTVIGIDLGTTYSCVGVYKNGHVEIIANDQGNRITPSWVGFTDSERLIGEAAKNQAAVNPERTIFDVKRLIGRKFEDKEVQKDRKLVPYQIVNKDGKPYIQVKIKDGETKVFSPEEISAMILTKMKETAEAYLGKKIKDAVVTVPAYFNDAQRQATKDAGVIAGLNVARIINEPTAAAIAYGLDKKGGEKNILVFDLGGGTFDVSVLTIDNGVFEVLSTNGDTHLGGEDFDHRIMEYFIKLIKKKHQKDISKDNKALGKLRRECERAKRALSSQHQVRVEIESLFDGVDFSEPLTRARFEELNNDLFRKTMGPVKKAMDDAGLQKSQIDEIVLVGGSTRIPKVQQLLKDFFEGKEPNKGVNPDEAVAYGAAVQGGILSGEGGDETKDILLLDVAPLTLGIETVGGVMTKLIPRNTVIPTKKSQVFTTYQDQQTTVSIQVFEGERSLTKDCRLLGKFDLNGIPPAPRGTPQIEVTFEVDANGILNVKAEDKASGKSEKITITNEKGRLSQEEIDRMVKEAEEFAEEDKKVKERIDARNSLETYVYNMKNQVSDKDKLADKLEADEKEKIEAATKEALEWLDENQNSEKEDYEEKLKEVEAVCNPIITAVYQRSGGAPGAGGESAPEEEDESHDEL

SEQ ID NO: 11804 - protein, 205 aa, Arabidopsis thaliana
MAEGSMRPPEFNQPNKTSNGGEEECTVREQDRFMPIANVIRIMRRILPAHARISDDSKETIQECVSEYISFITGEANERCQREQRKTITAEDVLWAMSKLGFDDYIEPLTLYLHRYRELEGERGVSCSAGSVSMTNGLVVKRPNGTMTEYGAYGPVPGIHMAQYHYRHQNGFVFSGNEPNSKMSGSSSGASGARVEVFPTQQHKY

SEQ ID NO: 11805 - protein, 461 aa, Azoarcus sp. EbN1
MRNKLQKAGLIMTGVFAGVLISLNFPASADKVSAAPLPVEELRAFADVFNAIKQGYVEPVEDKKLINHAISGMLSGLDPHSAYLDVEAYKELQVGTHGEFGGLGIEVGMEDGFVKVISPIEDTPAFRSGVKAGDLIVKLDETPVKGMTLSDAVKRMRGKPKTDITLTIVRKGEDRPVVVTLTREVIKVQSVKSKMVEPGYGYLRVAQFQENTSQAVAEHLAKLAKEGDMKGLVLDLRNDPGGLLHGAVGVASAFLPANALVVSTDGRTDDAKREYRARADDYLRGSREDFLKDLPAGARTLPMVVLVNAGSASASEIVAGALQDHRRAVVMGTQTFGKGSVQTILPLNSNTAIKLTTARYYTPSGRSIQAKGIEPDIIVEETANGSSRRLREADLERHLGNDRDPEAEPKKADEPKAGDQSPADDEAEALPRPELASKDDYQLNQAINLLKGLQIVQNKKE

SEQ ID NO: 11806 - protein, 483 aa, Arabidopsis thaliana
MSGVVRSSPGSSQPPPPPPHHPPSSPVPVTSTPVIPPIRRHLAFASTKPPFHPSDDYHRFNPSSLSNNNDRSFVHGCGVVDREEDAVVVRSPSRKRKATMDMVVAPSNNGFTSSGFTNIPSSPCQTPRKGGRVNIKSKAKGNKSTPQTPISTNAGSPITLTPSGSCRYDSSLGLLTKKFVNLIKQAKDGMLDLNKAAETLEVQKRRIYDITNVLEGIDLIEKPFKNRILWKGVDACPGDEDADVSVLQAEIENLALEEQALDNQIRQTEERLRDLSENEKNQKWLFVTEEDIKSLPGFQNQTLIAVKAPHGTTLEVPDPDEAADHPQRRYRIILRSTMGPIDVYLVSEFEGKFEDTNGSGAAPPACLPIASSSGSTGHHDIEALTVDNPETAIVSHDHPHPQPGDTSDLNYLQEQVGGMLKITPSDVENDESDYWLLSNAEISMTDIWKTDSGIDWDYGIADVSTPPPGMGEIAPTAVDSTPR

SEQ ID NO: 11807 - protein, 360 aa, Mycoplasma pulmonis UAB CTIP
MKKYKALHFGAGNIGRGLISDIYMKNNMDFALVDIDKDLIEKLNKQKSYSIIDFQTNKVFQISNFKAFSIDQEDEIKKWIEQADFISTSIGWSNLASLKKFFENVKLKEKAQIICFENGYKISSFFQSILNIDSNHFVNASVDKIIPNFKSDSLDVYVESYYEIILEQKNESQKKLNFVNYSTDLEAYINKKLFLVNAIHSTIGYLGYLKKYTYINEALNDQQILFKIKRLAKIINEILSKEYLLFKVDYLNDYLEKNLKRFSIKENQDLISRVARNPIQKLSKNERYFLIYNLVKKHNLEIDILLEIYKSIFYYDNKMDKESSKIQSTIENKSLAYALKKFSNLDQEDQEKILKSLAKK

SEQ ID NO: 11808 - protein, 663 aa, Zea mays
MDRARGSAFLLGVLLAGSLFAFSVAKEETKKLGTVIGIDLGTTYSCVGVYKNGHVEIIANDQGNRITPSWVAFTDSERLIGEAAKNQAAVNPERTIFDVKRLIGRKFADKEVQRDMKLVPYKIINKDGKPYIQVKIKDGENKVFSPEEISAMILGKMKDTAEAYLGKKINDAVVTVPAYFNDAQRQATKDAGVIAGLNVARIINEPTAAAIAYGLDKKGGEKNILVFDLGGGTFDVSILTIDNGVFEVLATNGDTHLGGEDFDQRIMEYFIKLIKKKYSKDISKDNRALGKLRREAERAKRALSNQHQVRVEIESLFDGTDFSEPLTRARFEELNNDLFRKTMGPVKKAMEDAGLEKSQIHEIVLVGGSTRIPKVQQLLRDYFDGKEPNKGVNPDEAVAFGAAVQGSILSGEGGDETKDILLLDVAPLTLGIETVGGVMTKLIPRNTVIPTKKSQVFTTYQDQQTTVSIQVFEGERSMTKDCRLLGKFDLNGIAPAPRGTPQIEVTFEVDANGILNVKAEDKGTGKSEKITITNEKGRLSQEEIDRMVREAEEFAEEDKKVKERIDARNQLETYVYNMKNTVGDKDKLADKLEAEEKEKVEEALKEALEWLDDNQSAEKEDYEEKLKEVEAVCNPIVSAVYQRSGGAPGGDADGGVDDDHDEL

SEQ ID NO: 11809 - protein, 878 aa, Ralstonia eutropha JMP134
MKKKDIEIFDVMSLRGPNMWTYRPVLEAWVDIGELEDFPSNTIPGFYERLSTWLPSLVEHRCSIGERGGFLQRLKEGTWPGHILEHVTLELQNLAGMPGGFGKARETPIRGVYKVIVRAWHEEVTRAALFAARDLVMAAIEDRPFDVPAAVDNLRRLVDEHCLGPSTACIVDAADDRDIPSIRLSDGNLVQLGYGARSRRIWTAETDRTSAIAESISRDKDLTKSLLESCGVPVPEGRMVESPEDAWEAAEDIGVPVVVKPYDGNHGRGVFTNLMTREEVETAYAVAIEEGSGVIVERFVPGNEHRLLVVGGRVVAAAMGETASVVGDGKSTIEELIELQINSDPRRGSTEDHPLNRVRLDSAARLELKRQNMDGESVPPAGKTVLIQRTGNVAFDVTDRVHPSVAAHAALAARVVGLDIAGVDLVAEDISRPLTDQRGAIVEVNAGPGLLMHLKPAEGTPRPVGRAIVDHLFPEADDTYPGRIPVVGITGTNGKTVVAKLVARLLQLSGKHTGLACSDGLFLDRRLVQGGDRANWDAGHRILMNRAVEAAVFENDSGAILSEGLVYDRCQVGVVTNFDTPDHMGDYYVEDEDRMYNVLRTQIDVVLKNGAAVLNARDERVVEMAELSDGDVIFFGLSADLPAIVAHRAKGKRAVFVRDGKVVLTTGNSETPLTDVAAIPVTYAGRVSFQVENVLAAVATGWALGISNDLIRAGIVTFDVGQVDVPGRFTLFERNGATVIVDDAHNAPALEALATALDRFPAERRMIVYGAGVQRRDEDMVRQGKVIGATFDRVFLCEDRSVKGALPDAEARALLKQGLYEGRRVTKIIDEGTRQDAIETALGQLVAGDLLVLQCDEGATAATVDRVHQWMGQPPRRA

SEQ ID NO: 11810 - protein, 856 aa, Ralstonia eutropha JMP134
MEVSRIRALRGPNLWCRHTAVEAIVACPEPSDMVATLPGFEDRLRARFPDIGPLHPDEDAGELSLAHVLEAATLRLQAAAGCPVTFSRTAQTVEPGTYQVIVQYSEEEVGRLAFDLAQALCLAARDDAPFDLDDALHRLRELDEDVRLGPSTGSIVYAAVARGIPYRRLTQGSMVQFGWGSKQRRIQAAETSATSAVAESIAQDKELTKSLLHAAGVPVPLGRSVRSAEQAWEAAQEIDAPVVVKPRDGNQGKGVAVRIRTREEVMTAYEVASDISSDVIVERYIPGHDFRLLVVGKHLVAAARRDPPQVIGDGTHTVRQLVEEVNRDPRRGEGHATSLTKIRFDDIALATLAKQGLTAESVPPKGTRVVLRNNANLSTGGSATDVTDDVHPDIAARAVAAAQMVGLDIAGVDAVCETMLKPFEEQAGGIVEVNAAPGLRMHLQPSYGKGRAVGEAIVSTMFADGDDGRIPVVAVSGTNGKTTTVRLITHIMATSGLRMGMTGTDGVYIRGERIDTGDCSGPRSARNVLLHPDVDAAVFETARGGLLREGLAFDRCDVAVVTNVGEGDHLGLSFISTVEDLAVLKSVIVQNVAPHGMAVLNAADPMVVRMADACPGLVTFFAHDPGQPAMATHRAQGKRVVFVDGDHIVASEGDNEMRIPLAEIPLTRNGTIGFQVENAMSSIGAAWALGIDWNVIRRGLATFVNDAQTAPGRFNVFDYRGATLIADYGHNPDAIQALCNAVQTMPAKRRLVVISGAGDRRDEDIRKQTQILGGVFDEVILYQDQCQRGRADGEVLALLREGLQGATRTSAVEEIRGEFVAIDTGLSHLQPGDLCLILVDQVDEALAHIAGRVAQG

SEQ ID NO: 11811 - protein, 412 aa, Microcoleus chthonoplastes PCC 7420
MPKRSFWVGLIILCQIVLLWVGWTPSASASTQEQQLFSEAWRIVSQAYVDDSFNEQNWWLVRQKTLKKDLENRDATYKAIEGMLATLDDPYTRLLKPSQYRSLKVNTSGELSGVGLQIALDDETGQLAVVAPIAGSPAEEAGIQPRDRIVAIDGETTAALTLDEAAARMRGPVGTSVTLSIQSKDEEPRVIELVRDRIALNPVYAALDSESNNIPIGYIRLTQFSANAPTEIEAAINRLEKEGANAYILDLRNNPGGLLQAGLEIARLWLDRGTIVYTVNRNGMMGSFDAFGQAVTESPLVVLVNQGSASASEILAGALQDNGRAELVGERTFGKGLIQSLFDLSDGSGLAVTVAKYETPNHRDINKLGITPDWEVSLDPIPVTRAGTASDRQYQAAVELLTGNSVLAAKAA

SEQ ID NO: 11812 - protein, 252 aa, Vitis vinifera
MASQFGSMLTRLGNLSTSDHASVVSINLFVALLCGCIVIGHLLEENRWVNESITALVIGVCTGVVILLTSGGRSSHLLVFSEDLFFIYLLPPIIFNAGFQVKKKQFFRNFITIMLFGAVGTLISCGIITSGVMQFFSKLDIGSFDIGDYLAIGAIFSATDSVCTLQVLNQDETPLLYSLVFGEGVVNDAASVVLFNAIQSFDLTHTNLRIALQFIGNFFYLFFTSTMLGVVAGLLSAYIIKTLYFGSHSLEE

SEQ ID NO: 11813 - protein, 374 aa, Streptomyces coelicolor A3(2)
MFASVLVAGAASGSLPGTDRKSEPGTARSAAPAGQQARHDDVARAAAEAMADGKSPVEAAERAVSRSGDRWGAVYSEGEYEELEDALDGRYTGVGLSARRERDGRIEVTRVRSGSPAAGAGIREGDRLRSVDGERVDGRPVTEVVSILRGDGEREPAGTAVRLGLERGTRAWTETVRRARLSTDPVTVRTLADGLTVVKVTSFTKGVGEQVREAVARVPSGAGVVLDLRGNSGGLVTEAVTAASAFLDGGLVATYDVDGDQRALHAEAGGDTTRPLVALVDGGTMSAAELLTGALQDRGRAVVLGSRTFGKGSVQMPSRLPGGSVAELTVGHYRTPSGRGVDGTGITPDLEVDPADPGALARARTVLSGLGPTA

SEQ ID NO: 11814 - protein, 1828 aa, Oryza sativa Indica Group
MDPPARSRRCTLLTRALLLAVAALALRLIYAAFLAGMALYPPLPAAAVLGSKTYLHSAVATPDAWRTRDWRKAVDYHATLLAPHLADGILSPTSRAVCLGAVQEALAMRELGVSTAVAVARKRSPPLAVAGNDRRLPFQDSSVDFVFAARALDSSKRPADLAAESARILKPDGHLVVLTTSAADAFSLRALQALLPSLRLLRSRQIKGPDDSTLRELVFQKIQDSTDDPVNKCTIGDHKLQLLTHAEPLIQEEPRKPWITLKRNIKNIKYLPTLADISFKRNYVYVDVGARSYGSSIGSWFRKHYPKQNHTFQVFAIEADPAFHSEYAAKKAVTLLPYAAWVKNETLNFEINADPGKEDEAKANGRGMGRIRPMAGKKMSGEVRSVPAFDFAEWLKRTVSEQDYVVMKMDVEGTEFDLIPRLFDTGAICLIDELFLECHYNRWQKCCPDRAEAFEMAKGVSCFYWSIQFPKSIYMQPEEPGFLVMDVYCDEARLVEESFDVTEKLKVRRKAFEVFYDGSWHGVNCIRIRNGNLFVKFIYSGSTVEHNVDGDCLRLRSRRATCSDCSNVLKPGVDVCVQSSHTPEASSQGGTNASVLLRHDARLITIKKNHQEDKCLCLFVVILYKNQCPGNAEKVITDRRAEVVTINDIFLLQKLQPEVHEGSMKWSFSKDSLSLNKGRLISARFSSEITHLIVLSILRGMEFNIKLVEGQIVYQIIKGDQAQWNLDSMAIPPGFGNTMEIISFQLRDEALRPTITNIPITHVKKNNITEDMRFTVKSEMDSELDRALDVEILYEHVDLRRSKRLKTQPDRFTSYDTPRFLSGYKKKEASSSPTKHVRGAVHCDSPVDDSKKEVESCCVEIPGNVTQKQTGVHSPMVDEKSNSPEGQHKNTTKRTTCSLVKEKASSPEGQHEKTTKRTTCALPVKEKASSPEGQHKNTIKRTTCSLPVKEEPSSVEIEEKSSKEQSAPEFHIPRTPAQNKEKHNRPPFSCKPKLFTSSGTLGVNCEPAFCQKVGGKRKRHMCEREYKQMIDQCIGNIESEMERDSMFNFDANMMNYVQHSYREEDFTWPPSADNQEVEEDELEELWKEMDYSLTTLALLEQKQVMAQSRINMLVDNFDGLRLDCLTLTDDYRCYYQKKEKFAESGSVNESTDYFGKVGGIPCHHECILDEELGLACRLCNVVCTEAKDIFPEMFNGNDYKDRTGCSNICLDDDILDPSLLANLAPELSELKNSGSVWSAISDLDPKLLPHQRKALDFLWKNLAGSIQVEGMDNSNVSTGGCVIAHTPGSGKTLLLISFLVSYMKAHPRSRPLVLTPKAAIHTWKREFEKWGISLPLHVFHHANRSGKPLGAMDSKLRSLLNNFHRPTWTNMRLMDSLDKLFKWHAHPSVLLMTYSSFLGMTKQDSKVRNRYREFIAEVLMNNPGLLILDEGHNPRSNKSKLRKLLMKVKTEFRILLSGTAFQNNFEEYFNTLCLARPRFIGDIMSELVPERKRETVGRRAKHQEAVARRAFVEKVGQKIESDNKHIRSDGISLLNKLTRGFIDSFEGAKLINLPGIHVYTVFMKPTDIQEEMLAKVTMPKLGSSRFPLEVELLITIGSIHPWLIKTTKAVSTFFSPAEVKKVERYKRDFAAGCKAKFVIDLLHKSSFRGERVLIFCHNVSPITFLVKLIEMVFGWRLGEEVLVLQGDQELPVRSDVMDKFNGDSAGKRKVLIASTTACAEGISLTGASRLVMLDSEWNHSKTRQAIARAFRRGQERTVYVYLLVASGTWEEEKYNSNRRKAWMSKMVFLGRYVDDSSQNRVTDIDDEVLKELADEDHTGTFHMIVKQD

SEQ ID NO: 11815 - protein, 342 aa, Zea mays
MGRVKLKIKRLENNSGRQVTYSKRRSGILKKAKELSILCDIDLMLIMFSPTDKPTICIGDRSTLEEVVAKYTQLTPQERAKRVQTVEELSAELVSLQGQVAELQKRVSDWSDPEKVDNIDNIRAMEQSLKETINHIQIHKGNFGKQHLIGLQYAATQFQTDMQLPLGLPGESGPSSWFQNGGADGQQAMMLTDESGLLHQRDIAQGYPSYFSTVKQDPDTGGSSSDHGQVVLHHPQPPDFSQTECLTSLHLPSQQFPYPPFDHHGLYSDRIFRPDAVELHAGGVASMDFLSGQYDLPRPGDDASFHNWASAAACSATMFDQQQQQQHQHHQQPQSSPAQVSA

SEQ ID NO: 11816 - protein, 554 aa, Streptomyces coelicolor A3(2)
MIEPHAPAPPGSPPSWGGPCGPEAPARLPVRPAVGRFLVLAGVFVCAACGLVYELELVALASYLIGDSVTQASVVLSVMVFAMGLGSLAAKRLRGLAAAGFGALEAALALVGGSSAMLLYAVFAWTGGWGGLWADGPRILLVAFSLAIGVLIGAEVPLLMELIQRVRRQDPGGAVADLFAADYVGALVGGLAFPFVLLPFLGQLTGALLTGTVNAVVGAALVLGLFRRDLTRRARWLLLTANAVVLALLATATVLADDFERAARHAVYGQDVRVAVRTGVQEVVLTGDADGRPLDLFLDGRLRVRGSDERSYHEALVHPAMGGPHARVLILGGGDGLAAREVLRHPGVRRVDVLEADPGLARLARHDPGLSTLNEHAYGDARVRVLSGDAFHRLRATPSATYDVVISDLPDPGVTASTKLYSQEFYGLLRRVLAPDGRLAVHAGPVDARPRAFWTVDATLRAAGLPAVAYRVGARDTGPGPGSVPGPRRAAAGPPAPRGWGFLLAARTAPAPRLDPAAPRPHSLTPDSLARGVREAARTQMAGLPPSTLVHPRF

SEQ ID NO: 11817 - protein, 202 aa, Hyacinthus orientalis
MGRGKIEIKRIENSTNRQVTFSKRRNGIIKKAKEISVLCESEIAIVVFSSLSKMSEFCSPNTTFPKMLEKYQQHSGKKLWDAKHENLSAEIDRIKRENDNMQIELRHLKGEDLSSLNPRELIPIEEALQNGVTGARAKQMEFLKMMKLNGKLLEDENKKLAYLLHHQELAMDGSRHQRGTEYASEIPMALRVQPVQPNLQEA

SEQ ID NO: 11818 - protein, 1364 aa, Oryza sativa Japonica Group
MAALSAPGAGAPTAAKPPPLSSQAHNAPPMTGAARPASLGAATAATPSPPVQNAPQMTAVPRPASFGAAAARVSSPSPSTQNAPQMTGGPRPVNLGAPVARGTAARAPSPSPTMQRQNATPMTGGSFAITARAERSVDERRYQGSLGGATNAGSFAGWDGAGRSELPHSCDRHPGRTVATQADAGSASCNGAGHGSEELSYSSTVHREAPRAIVERSGSSVNGNVAGRSDHPDSDRESSRVAATESSNGERPPAQATAQPSTQRYYVGVQRDKGTGKWAACVVDPSNPTKHRLVGAFPDEHAAALAHDRLDLAFRGGGHRGAGDNFRPAFHAVELEFLRLCAATSSPGSHCGLVAGGDKYDEKYSEFLRKIYHGVMDNSPSYKKFFDVILDFFIARAREIGREALEDGGDMLVERFVAMHKNKAVDAQQRLRQQAMEEAQAKQVAAQQELQQQEAMANKQCLALSPARPASAVSPADEESEREAAKLDHQPVAISSRKHPGSDSRKVLQIPLSLRGGGGEIDHSTQKEARMDSDSCKRRKHESGHDSSSRVQSQSSILSRNRILCHQLLEQCDDLKYGSSTNDYKAISMKRLELISILQKLQEVPIQLPYASPLKSSETNRLVQDGRNSSCRNIIDLDSDNDEDYTFANVDNIGANTTVVLVDSDDGDSVASFVDEKSSDSKQNANYIEESVLPEQHAQQQEISMLDNENISSEAQAVKKGKDSMDINDVIYNKSGHEEIGEEEAQAENVQIKGNLKKEIISVASDELACEVMRSQSPTNGNFDQYDNSSPVDELEGLWMDMYLAMACSKTVGSDHNIVPSENSCEQAEDECQHDFLMKDDLGIVCRVCGLIQQRIENIFEYQWKKHMKPHQVEGFNFLVKNLADENNPGGCILAHAPADKRSEQLKVLNLWEESRSILLLGYQQFACIVSDHTSDTEAIMCQEKLLKVPSLVILDEGHTPRNEETDLLTSLENIRTPRKVVLSGTLFQNHVREVFNILKLVRSKFLKMDKSRAIVNCILSKVDLMGKSARSKNISDKDFFDLVQEHLQKDGNDKMRAVIIQNLRELTADVLHYYQGKLLDELPGIVDFTVFLNMSSKQEHIIKGLDGINKFAKRSRCNAVSLHPCLKNANKADADDGNVTNRKIGSIISGIDINDGVKAKFVHNLLSLSEATGGKVLVFSQYVRSLIFLEKLVSRMKGWKSEVHIFRVTGGSTQDQREQAVHRFNNSPDARVFFGSIKACGEGISLVGASRIVILDVHENPSVMRQAIGRAYRPGQSKMVYCYRLVAADSPEEDDHHTAFKKERVSKLWFEWNELCSSDDFELATVDVSDSEDRFLESSALKQDIKALLKRYISMISMILKSD

SEQ ID NO: 11819 - protein, 202 aa, Hyacinthus orientalis
MGRGKIEIKRIENSTNRQVTFSKRLNGIIKKAKEISVLCESEIAIVIFSSLNKISDFCSPNTSLPKMLEKYQQHSGKKLWDAKHENLSAEIDRIKRENDNMQIELRRLKGDDLTSLNPRELIPIEEALQNGVTGACAKQMEFLKMMKLNGKLLEDENKKLAYFLHHQELAMDGNRHQRGTEYASEIPMALRVQPVQPNLQEA

SEQ ID NO: 11820 - protein, 451 aa, Bradyrhizobium japonicum USDA 110
MMRKTSVILLSAATGAALTLFVTQPRAVFMGSSARAATADTYRQLNLFGDVFERVRSDYVEKPDDTKLIESAISGMLTGLDPHSSYMDAKSFRDMQVQTRGEFGGLGIEVTMEDGLIKVVSPIDDTPASRAGIMANDIITNLDDEAVQGLTLNQAVEKMRGPVNTKIKLKIIRKGQDNPLDVTLVRDNIRVRSVRARIEADDIAYIRITTFNEQTTEGLKREVANLSNQIGDKLKGYIIDLRNNPGGLLEEAVTVSDSFLEKGEIVSTRGRNAEETQRRTAHAGDLTKGKPVIVLVNGGSASASEIVAGALQDHKRATIVGTRSFGKGSVQTIIPLGSGNGALRLTTARYYTPSGKSIQAKGIVPDIEVLQDVPDELKSRTDTKGEASLRGHLKNDGDEKTGSQSYVPPDAKDDKALKLADDLLHGIKNSASAAPTPGTDKAATDKPKAAN

SEQ ID NO: 11821 - protein, 161 aa, Trema orientalis
MSSSEVDKVFTEEQEALVVKSWAVMKKNSAELGLKFFLKIFEIAPSANNLFSYLKDSPIPLEQNPKLKPHAMTVFVMTCESAVQFRKAGKVTVRESNLKRIGAIHFKNGVVHEHFETRFALLETIKEAVPEMWSPEMKNAWGEAYDQLVAAIKFEVKPSST

SEQ ID NO: 11822 - protein, 1048 aa, Alteromonadales bacterium TW-7
MSANLSKNDLLAIFEEIKNEQATQFPLSERFINKLFKPNVLAKGKAYYKNGKIAWLEHNSDFSVIDSTVQSDTGASYNQRIEISKLPTGYSVDTHCTCNIKSKCLHLAAILLKLKIEHSGEYGEDYFINDWFSELSTLKSTESTTPSQVLLFVLSVENKKVFISPKIANFDKDQNYTLGRNLTDQQLNSFITPNDLLESDFRLYSWIRSQNAVGSLELKGQWGFSALQQLIATERLFLHRSRTAIKPQSGQVLSFNWQQEKELTKLVVNLEQSKNWAVLKTTPPTYLDLDHLKVGRIRTPLSGDEIAHLQTMPAIHSANFDRIYKQLADNFGAGVIPHPTNTQSVLPHTASNAVIKVSMEEAGLRLSLSFKYKNKHYPAGTAPNNLINSAFENTVTNELVNLGFEFCKGGLQSEFTFNKQSAIHLHWLTYEVFPSFKEHGWKVTIGKMDIANPQSEVTLIANRAAGHQMHCKVLINSSKLAQLFSNEDSLYQSLNRQSQLFHYYPVGRQFGVINKSAMNVLSDFKQRFEFVKTRDEFNIPLSYLPELVKHTAINVELHDDSLELYLEELNNTHKTMPSVSLHGLNESVELREYQQQGVDWLSFLKRHKLGGILADDMGLGKTLQVIAFLTSTYNRPQAGPTLIVCPTSLVSNWQNEILKFTKGLKVTTIFGSNRNEPLQHLAQAQCILTTYPLLKRDIAYYSPLFFENIVLDEAQYIKNDTAQVSRLVKRLNADFKLCLSGTPIENNLLELKSLLDFAMPSLLGSQAHFKQHFQTPIEREADMQRAEQLKALIMPFILRRTKAQVAQELPQKTEITKEFEFEPKQKEMYQGITRALEEKLIDLFAEQGVQKSKLAFLEALLKLRQICCHPKLIEPDTQAGSAKLEWLSTHLPLMLSLGRKVIIFSQFTSALDLIAKQLSELDINFSLLTGQTRHRDKVIDEFTSGKTSVFLISLKAGGTGLNLTQADTVIHFDPWWNPAVEKQATDRAYRIGQTNPVFVYKLIMSHSIEQKVFKMQEDKQALVDALFTDKSMSFTQFDEQQMLSLIKN

SEQ ID NO: 11823 - protein, 301 aa, Zea mays
MDPMDIVGKSKEDVSLPKSTMFKIIKEMLPPDVRVARDAQDLLVECCVEFINLLSSESNEVCSREEKKTIAPEHVIKALSDLGFREYIEEVYAAYEQHKLDTLDSPKAGKFTGIEMTEEEAVAEQQRMFAEARARMNNGAPKPKETEQEPPQQPQAQPQLQLHTEPQQPVQSQVQLHSPTQHSLQPQVQLHPQPQQLPQVQVHSQTQLHPQPQQPQVQVHPQLQQLPQLQAHSQPPQPQVQIHPQPQQPPQVQLQSSVQQTSQPQPQVHLYNHRGGSQAQLQPQLPGQLQTQGQTGPGIDS

SEQ ID NO: 11824 - protein, 566 aa, Rhodospirillum rubrum ATCC 11170
MESRTGMGAVLTEAPRRTSTRRVVLTLLAGLTGCAHPAPLASTALPQATAVSHSGKIPPTAVWTVPSAFDKGLRGETEDLFSYGYGAIADRYIDEVNLRELGVEGLSGLTSLDPAITVAPVGAMLDVYRNGTVVGRFPLAGARDSAGWGVLTANVVMLARDLSPSLNASDPEEIYQAIFTSALGGLDPFSRYASRDDAEVNRGQRNGFGGIGVMYDVGGRGATITQVMPGTPAADARLRLGDVIVAVNGQSTRGATRHDLREWLRGPTSSEVTLTLVSADTPTERTLTLTRALIIMPTVDLHLDEGVGFITVSSFNQGTTTRVAEAIGEARRQLGADLRGLVIDLRGNPGGLLDQAVTMSDLFLDTGPIVSTRGRNPDARQFYASSGGDIAQNLPIVALIDGDSASAAEIVAAALQDNGRAVVIGTSSFGKGTVQTLIQLPNGGELTLTWSRFHSPSGYVLHGLGVLPVACTSGIAEASREDGAPADKVLTTMRRDQSEIAAHVALWRQTDMRDASRRLALRDACPAEHHPRALIDETVARKLIADQGLYGRALRLTAPAQSASGL

SEQ ID NO: 11825 - protein, 633 aa, Pseudomonas putida GB-1
MEDAALVGWKIDGTALWLVDSEGSARVPASEEIYSALIERRPLEPWMPIHVEGLRASRYPLTPVLTIRDAGGGAPAYSIVASCRGVTVELMPNDLKRGHAIANGTWYPIEPVACGEVLELLHSTGIDLGLARSLKAFLTIRKAAAAGAAVEDHMSEQPISPLVFAPAADVAPAGVNAKLYSYQLAGWRWLKFLLAEGVGGLLADEMGLGKTLQIISVLRDSGSGSLRPSLIIAPGSLLENWRREIDKFAPDLKVLKHNGPLRTGRPAELQRHDVVITSYDNAVGDNSLLNMIRWQVVILDEAQFIKNPDAQRTRAVKRLRREAGLAVTGTPVENRLLDMWSIMDFVLPGQLGDARSFEAQFSNDVDGAAQLEPLVSPLILRRRVADVAQDLPPRIDIPQSLELDEREAAAYDAERNRINAEYGAAATLVALTSLRRFCAHPSLMDSTSGSVDPMSFSKFRRFDEIVEEIFAIGEKVIIFTSFTAMADMIARHIETRYGAFAGVIDGRLAIDDRQPLIDRFSSVKGGAALVLNPKAGGAGLNITAANHVIHYNPEWNPAMEDQASARAYRRGQELPVTVHRLLVSDTVEDVVDERLRRKRALSDTAVIGVEGKEDDYGDIVAALSRSPSKRTGE

SEQ ID NO: 11826 - protein, 111 aa, Physcomitrella patens subsp. patens; identical to SEQ ID NO: 963

SEQ ID NO: 11827 - protein, 612 aa, Symbiobacterium thermophilum IAM 14863
MAKVIGIDLGTTNSVVAVMDGSEPTVLENREGDRTTPSVVAFTKTGERLVGKVAKRQAITNPDRTIISIKRHMGSDYKVRIDDKAYTPQEISAMILSKLKADAEEKLGEKITQAVITVPAYFTDAQRQATKDAGTIAGLEVLRIINEPTAAALAYGLDKGEDQRILVFDLGGGTFDVSILELGGGTFQVIATAGNNKLGGDDFDERIVNYLADRFQREHGIDLRKDKQALQRLREAAEKAKIELSSVTTTNINLPFISMTADGPVHMDETLTRAKFEELTADLVEATMGPTRQALQDAGLEPGEIDKVLLVGGSTRIPAVQEAVRRFFGKEPYKGINPDEVVAMGAAIQAAVIKGDVKDVLLLDVTPLSLGIETLGGVFTKLIERNTTIPTRKSQIFSTAADGQTQVEIHVLQGEREMAAYNKTLGRFILDGIPPAPRGVPKIEVTFDIDVNGIVHVSAKDLGTGKEQKITIQSQTSMSKEEIERAIKEAEAMAAEDKKRREEAEIRNNADAAVYNAEKLIKESEGKGIDPSLIDAVKGAIEPVKEALKGTDVNAVKQATEKLTEAVYKLSSAIYEKTGSAGTGAGSQAGSAAGSGDGQSMDAEFKVKDEDK

SEQ ID NO: 11828 - protein, 240 aa, Kluyveromyces lactis NRRL Y-1140
MSKLLLPGDVISADETQSQSISAGPGIYSDPLSQEIKATHAGLEVVTPNKKGASVYVDYNSKRYIPAVGDFVVGVIVASFGDSYRVSLCNFSNPVTLSYMAFPNASKKNKPTLKVGDLCYARVCSAYKELEAEIECMDSSKGQDAGFGLLDGGMTIEVSLAYARELLFNDSYPLLNILGNLVEFEVAIGVNGIIWLKTDDVRTTLACYRSILTCQGVSPAQFDKTIKSIFNDTLKSTDEK

SEQ ID NO: 11829 - protein, 667 aa, Lactobacillus plantarum WCFS1
MQTVFLVLLLVAAVVVANAVYARFNQIPVAFLQIGAGLILSLIPLYRNFELEPEIFLFVIISILMFNDGQNTNIRKLSHQFGTTLSLSVVLAIVTILIVGTVTHLLIPEFSLALAFALGAIITPTDAVAVSSITTKVAIPGEVMTTLENESLFNDASGIVAFNLAIAAIVTGKFSVWHGVTNFLYVFAGGIFVGLIIGYIIVAVRIMLIRMRVDTPSVIVPYTLLTPFVVYFLAESLGVSGILAVVATGLIHGVQSDQLRLTTSRLQIVMTTTWSIVASILNGIVFVLLGVSLPSVINHLQQRDTSSVAVLVGLGILLYLIMTFARFLWTRFDLARIRAWDNHEKTRNAFVMGLSGVHGTITLAMAFSLPLTLNGSAFPYRNDIIFVAAVVILTSLMVPTLLLPLTLPKQVVKVTEDELATAKADMVTHAIDLMQARHGNNAGTSKVIAILSGQRVLDGRPKRSQLASLFDATFKVEQTTIDEMVANNEITPQAAEKYMRVASQTRLQNQQTFFERLKLFFRFTLSKWSLSKKARARRKMFRQYRPHGGQSRAELMTRNRQMWQQMRQIEQKPYEAVLAYLADTITADNQQAIGIVRRAYDERHRRLSGERDFQETQNELLIEAFQLEYNFIQTQLANKTFSSELGNQLYEQISTDQLVYLQSINTD

SEQ ID NO: 11830 - protein, 362 aa, Vibrio cholerae
FTDTKGKEQHISIPAHQIDADFFEDGKMFDGSSVAGWKGINESDMVMMPDPSSAVLDPFTEDATLNIRCDILEPATMQGYDRDPRSIAKRAEEYMRSTGIADTVLVGPEPEFFLFDDVKFATNMSGSFFKIDDVEAAWNTGTEYEDGNKGHRPGVKGGYFPVAPVDSSQDIRSAMCLIMEEMGLVVEAHHHEVATAGQNEIATRFNTLTTKADEIQIYKYVVHNVAHAFGKTTTFMPKPLVGDNGSGMHVHQSLAKDGVNLFAGDKYGGLSETALYYIGGIIKHARALNAITNPSTNSYKRLVPHYEAPVMLAYSARNRSASIRIPVVPSPKARRIEVRFPDPAANPYLAFAAMLMAGYDGI

SEQ ID NO: 11831 - protein, 459 aa, Vitis vinifera; identical to SEQ ID NO: 964

SEQ ID NO: 11832 - protein, 150 aa, Oryza sativa
AYLGDTIEQVCTKKQAGTGPEFLEHCWPTGSSVDQRKEEEEEEKEGCEEATPAAAAAAAAPSFFAHPCSLLQYIARVCACCLGLSDSFCDPKASSVLVPEPEPAAADPSQEGEEDMKSSEATTRVRAARLRPKPPGNPREGSGGNGGHHH

SEQ ID NO: 11833 - protein, 939 aa, Podospora anserina
  misc_feature (675)..(675): Xaa can be any naturally occurring amino acid
MERFKQWIATKPFTAQRCKQFIYTRPRWLFECIFPQNQGFPFIRYHCRWPCLSPVALTVLIVMADYLIISLALIGALITWGAGKHSGGTAEIRFIDALFFTAGASTQAGLNTVDINLLTTFQQAIFYLWPMMANPITVNSLVVQLRLYWFEKKFQHITQNARLVRVPLAKSFTKSRTKAKQQDGDVEKGVNGRKITVMLNGKKSRINNDGTLLGDAKNKGRHGLGLTAANRTATDGGLDGPLDKADRHTGPAVTSSMTEPRRPALKFADTVTKSDGLGEDFLKLPRIRSDEEHIAIVERQKKGDDEVLRIPNPRDVERGLGPKRVEAGDNEDELLSPHAEAFNLDGEPRAQAADGRHPAITIEEPDRRKLQETDSDEFMDDVRAAAHTFGFLKPHFPRHKKKQDDVEKEPVIPGPSQNRRRQSMQTLRTAFSNNKAEGTPYLSWEPTVGRNSLFPELTEEQREELGGIEYRSLKTLARVLTVYFWGYTALGVVGLLPWILQATQYGQVVEAAGQNKVWWAFFTSQSAFMDLGFTLTPDSMNSFSTATWPLLWMSFLIVIGNTGFPIMLRFMIWVLSLIVPKNSGMYEELRFLLDHPRRCFTLLFPSKATWWLLGFLVLLNGLDVMFFIVLDGPVASMSDGQKVLNGIFEAASTRTAGFSCVNLSLLHPAVQVSYXIMMYISVFPIAISVRRTNVYEENALGIYSHGEEEEHSKANHNDWSHVGTHARRQLSFDLPFIALGLFILAISEGPRIMNPEDAANGFTMFSMLFESISAYGTVGMSLGYSTINASLSAEFSDVGKLVIICLMIRGRHRGLPYGLDRAILLPSDALNAKDAMAADTEGRLARQISRMSVATHRSDTTHNQRGLGHVLAAILHPGPPVPPEPPMEAIHRRSTDPGSDAEPQPMRVTSRRTEPGVVRRSVSHLFSPRPRTAGGHEDD

SEQ ID NO: 11834 - protein, 167 aa, Cicer arietinum
MAEQASKSIYDFTVKDIRGNDVSLSEYSGKVLLIVNVASQCGLTQTNYKELNVIYDKYKNQGFEILAFPCNQFRGQEPGSSEEIQNVVCTRFKAEFPIFDKVEVNGKNAEPLYKFLKGQQGGIFGDGIKWNFTKFLVNKQGKVVDRYAPTTAPLKIEKDIEKLIKSS

SEQ ID NO: 11835 - protein, 829 aa, Gemmata obscuriglobus UQM 2246
MVVGVGEFQDKAISPRPTADADAKALHALLTDKKYLGASPDRAKLLTSSGATREAVVKAVDAAAAATGGDDTVILAFFGRGSSTGDKPCFLTNDSTVKDRAKTALLMSDLEPAFKKFKSQNVLLLMDVQYKGGVDAGAEKILEPSWLEIMKLVFGDEKDENMLPPNRVLVLGNPPFQDALTKGDHGLFYSVLSDALGGKADQAPYNEGYESDGIVTTRELLKYLEKEIPNAARATGKTDKEKELEPVFVGRGASKFWVTRNPAETDTIKKRLDAVEGLAKAGKLTPDLVKEGVDLLFRMPKLKWSQALRKEYQKLADGGATVADLEAHRKKLLEDLKLDTDAAAEFTRKVLPAIYKLSAEYIKPMTRGELTALAVKGLFAEADEPVPADIADTIKTPEKISDERGKELLTEARLRLGKREDLDGAKGADVTVRALVGALHDPYAGYFTKEEWLRTQGQLFGRFPGVGIIIRREAVRDGLLVVTPIKGSPAFRAGIQAGDLITEIRLEVDKEGKPLPADAKKVHSTKGLKTDDAVNLITGAPDTPVSLVVSREGEPEPKVYRITRNYVMVETVHGVKRDEKNDWGYYLDEKSKIGYLHLSQFITVSNELGTPADVRRAVAALKRTGLNGLVIDVRNNPGGSLKAVIDICEQFVGKEAIVTTKERGGAGATFTYSGRSAGDRSFPIVVLINGNSASASEILAACLQDHSRATIMGERTYGKGSVQHVEEYDATGGRVKYTVARYYPPSGRNIDKVAMEQSTELKSRDEWGVKPDAGFELKMTREELADWFEYSRDLEVIPVPGKKAPTVDPGKDKQLAKALEHLQGLVNRK

SEQ ID NO: 11836 - protein, 526 aa, Burkholderia cenocepacia J2315
MTNVELFHYLLLLICGAGALTWLAERISIPPAVVLLLGGCVVAVAGKRVPDMDPALLLAAVLPPLLMSSGFYTAWKEFRQELASIASLALGAVAFTTVAVALAVHAANPALPWAACFTLGAIVSPPDAVAAKAILQRHPLPARLVAVLEGESLVNDASGLLLYQMAVSAALAVSITAASATGLFFSLTLIGIAVGLACGHAMCWVLPRLRDPMLGIVVTFAMAWGSYGIAEAVDGSGVLSVVTCGLVLGVRQHRVFNADMRIKAKATWEAIVFVLDALVFILIGLALHAILARVNHEGAVLMAGLRVALPATAAAIGARVVWVFVAMWLPGRLRARRAGHTPWSWREAVVLGWSGMRGVVSLAAAIALPANFPGRDLILFSTFLLIIATLVVQGGTLAPLIRVLKLRPAARHTMSEHAVRAHTFGAALAELDTLGQHGSALEQPSLDRLLAEYRNRVTFNERAHRQGAEPAGVRARMLRVELELVGISRRALLDLHRDGKVDDAVLHRIESELDFEELRLQRLLEP

SEQ ID NO: 11837 - protein, 469 aa, Thiobacillus denitrificans ATCC 25259
MAVADVLKRIQDDEVKFVDLRFTDTRGKEQHVSIPARIVTEDWFEDGHPFDGSSIAGWKGIQASDMLLKADPDSAYMDPFFDEPTLILTCDVIEPSDGKGYERDPRSVARRAEAYLKSTGLADTAYFGPEPEFFIFDSITWHDDMSGSGVKINSEEAAWSSAEKFENGNTGHRPGIKGGYFPVPPVDSLQDIRAAMVVALEEAGVPVEVFHHEVATAGQCEIGTQFSTLTKRADWTQVLKYIVHNVAHAYGKTATFMPKPIVGDNGSGMHVHMSLWKDGKNTFAGNGYAGLSETALYYIGGIIKHAKALNAITNPGTNSYKRLVPGFEAPVMLAYSARNRSASIRIPIAASEKARRIEVRFPDPLANPYLAFSALMMAGLDGIQNKIHPGDPGDKDLYDLPPEEDAKIPKVCHSLEMALDELDKDREFLTRGGVFTNDMIDAYITLKMEEVTKFRMTTHPVEFAMYYSL

SEQ ID NO: 11838 - protein, 609 aa, Kineococcus radiotolerans SRS30216
MVAAARHRLRGVLVNTTKRRTTVAGLRHRTFDVPAISSRSWQRPPTWLTSGMARDVVLDMGWGRLVFGQTFTDQRDVVDALRAEETGERDIAMYVRDPQVLVGLAPHELFMDPSLTFRLPLTRYRAPRDRNPDVFVRMVRDRAELEEVNRIYATCGMVTSDADVMWANHRTRTFTYLVAEDTRTREVVGTVTGVDHVLAFGDPDQGASLWCLAADPQAAPRGVGEALVRTLAERYVARGRAVLDLSVLHDNAGAIALYRRLGFRPAPPVVVKRKNPINRPLFSPQPAGLAALNPYARIIADEALRRGVRVEVTDAPSGEMRLTHAGRSLLTRESLSELTSAVAMSRCDDKRVTRRLLAARGVRVPEAVELGADPLHDEAGLAACEELAARTGPVVVKPARGEQGKGITVGVGGGEDLRRAVAEAASHCPDVLVEELVRGQDLRIVVIDHEVVAAAVRRPAAVIGTGDDDIATLVTRQSRRREAATRGESSIPLDDTTRAVVADAGFALDDVLPRGQRLEVRRTANLHTGGTIDDVTDDLHPQLVEAAVAASRAIGIPVTGLDLLVPDVAGPDHVVIEANERPGLANHAPRPTAERFLDLLFPETRRQGA

SEQ ID NO: 11839 - protein, 474 aa, Crocosphaera watsonii WH 8501
MAETPQEVLKMIQDNNIQIIDLKFIDLPGIWQHCSFYHNQIDEDSFDAGVPFDGSSIRGWKAINESDMCMVPDPKTAWIDPFYEEPTLSLICSIKEPRTGEWYSRDPRTIAKKAVEYLQSTGIGDTAFFGPEAEFFVFDDVRFDQTENKAYYSVDSVEGRWNTGREEEGGNLAYKPGYKQGYFPVSPTDTLQDMRTEMLLTMAKCGVPIEKHHHEVATGGQNELGFRFATLIDAADYLLTYKYVIKNVAKKYGKTVTFMPKPLFNDNGSGMHVHQSIWKGGQPLFWEEGTYADLSKLATHYIGGILKHAPALLAFSNPTTNSYKRLVPGFEAPVNLVYSQGNRSASIRIPLTGSNPKAKRLEFRCPDATSNPYLAFAAMLCAGIDGIKNKIEPAEPLDVDFYELSPEELSKIPSTPGSLEQALECLGKDHAFLTDGGVFTEDFITNWIEYKLDNEVNPLRLRPHPYEFALYYDV

SEQ ID NO: 11840 - protein, 900 aa, Zea mays
  misc_feature (42)..(42): Xaa can be any naturally occurring amino acid
  misc_feature (416)..(416): Xaa can be any naturally occurring amino acid
  misc_feature (434)..(434): Xaa can be any naturally occurring amino acid
MSQSPGGREGIYYSRQRKPSERNGSVFTPIAAMYPSGHALPXANRNHGLVFGGTSKDWDDIRQFIASLERASENSSAIASKTGGGKSTNHSVEPAEQKGKGDIIVLDSDDEDGDGNSPEHNKLASEMNKELGTSVLASNIAERMATNGSQTFETVHAYGGKNTQIVPYGQGSTLVNQFPLQTSWQPSIQFERVVLTKRPEEQRMQDLVAATIAEKRAETQMFLSLPTERKRRRTDHSLLMLDSFVPKQRRRKGDTGLAPADLSLDLHQTATSQEPDIAIEEEEKRKNDGDGLEDYWKDFALAVESTKLDDVDEAAANEKEDNGKMEDIDCNHDIRIHEDLGHASRRRMNGYGGNSKDADEIDCGTVKLSEDFIVADIAIHPRHAQAMKPHQVEGFNFLVKNLIGDKPGGCILAHAXPGSGKTFLLISFIQSFMXKDIPVYDFYSVKVEKRVEQLQILKSWEDKMGILFLGYKQFSTIVTDDGGSKVTAACRDRLLKVPNLLILDEGHTPRNKETDVLESLSRVETPRKVVLSGTLFQNHVEEVFNILNLVRPKFLRMESSRPIARRIMSQVEIFGRSSKGLADGAFTEAVEGTLLNDENFKRKVHVIRGLRELTRDVLHYYKGAILDELPGLVDFSVFLKLTPKQKDIVHKLEMHDRFKRSAVGSALYIHPCLSGLSEVNAENRAHTLRDDSVDSLMDSINVRDGVKANFFMNILSLANSAGEKVLAFSQYILPMTFFERLLVKKKGWHVGREIFMISGDTSQEDREAAVDRFNSSADAKVLFGSIRACGEGISIVGASRVVILDVHLNPSVTRQAIGRAFRPGQQKKVFVYRLVAADSDEVKVHETAFKKEVIQKLWFEWSEQCTTENFKLGQVDIDDSGDELLDTRAIRQDIKALYRR

SEQ ID NO: 11841 - protein, 642 aa, Neisseria meningitidis Z2491
MAKVIGIDLGTTNSCLAISENGQTKVIENAEGARTTPSVIAYLDGGEILVGAPAKRQAVTNAKNTIYAAKRLIGHKFEDKEVQRDIESMPFEIIKANNGDAWVKAQGKELSPPQISAEVLRKMKEAAEAYLGEKVTEAVITVPAYFNDSQRQATKDAGRIAGLDVKRIINEPTAAALAFGMDKGDNKDRKVAVYDLGGGTFDISIIEIANLDGDKQFEVLATNGDTFLGGEDFDQRLIDYIIDEFKKEQGIDLKQDVMALQRLKEAAEKAKIELSSGQQTEINLPYITMDATGPKHLAMKITRAKFESLVEDLIARSIEPCRTALKDAGLSTGDIDDVILVGGQSRMPKVQEAVRDFFGKEPRKDVNPDEAVAVGAAIQGEVLSGGRSDVLLLDVTPLSLGIETMGGVMTKLIQKNTTIPTKASQVFSTAEDNQSAVTIHVLQGERERASANKSLGQFNLGDIAPAPRGMPQIEVTFDIDANGILHVSAKDKGTGKAANITIQGSSGLSEEEIERMVKDAEANAEEDKKLTELVASRNQAEALIHSVKKSLADYGDKLDAAEKEKIEAALKEAEEAVKGDDKTAIDAKAEALGTASQKLGEMVYAQAQAEAQAGEGAQAESSAKKDDDIVDADFEEVKDDKK

SEQ ID NO: 11842 - protein, 165 aa, Mesorhizobium sp. SDW040
MFADGVMFDGLSIAGWKAINESDMVLMPDPDTVHMDPFFAQSTMVILCDILDPVSGESYNRDPRGTAKKAEAYMKAEGIGDQIFVGPEAEFFVFDDVKYKADPYNTGFKLDSTELPSNDDTDYETGNLGHRPRIKGGYFPVPPIDSAQDMRSEMLTVLAEMGVRV

SEQ ID NO: 11843 - protein, 434 aa, Glycine max
PRRPSVRLFACTASDHVNLTRPEPYGAGVGGLSRDIPETANVKLPCNTTHCQNSSKSKQARPITVGIVLLTIAVSAIGILTFTVYRRRKQKLGSTFDISEGCLSTDEAIGAYRKNGSPLVSLEYSTGWDPLADSRNFNGYRQEMFQSFRFNLEEVESATQYFSELNLLGKSNFSATYKGVLRDGSVVAVKSISKTSCKSDEAEFMKGLNMLTSLRNENLVRLRGFCCSRGRGECFLVYDFVSNGNLSRYLDVKEGDGEVLEWSTRVSIVKGIAKGIAYLHAYKAKKPALVHQNISAEKVLIDQRYNPLLSDSGLYKLLTNDIVFSALKGSAAKGYLAPEYTTTGRFTEKSDVYAFGVLLFQILTGKQKITSAMRLAAESFKFPEFIDPNLRGKFFEYEAAKLARMALLCSHESPFERPSMEAIVQELGNCSSCL

SEQ ID NO: 11844 - protein, 491 aa, Listeria monocytogenes EGD-e
MKLNELMQAIPVFTGEVSETIEISHIAQDSRKVKPGTLFICIDGEVVDGHKFASRAVELGAVAIIAEKQVDVSIPVIYVRDSKRAMAMLADYFYGSPTQALKLVGITGTNGKTTVSHLVEQIVRENGEQTGLIGTMYRKIGDQILETKNTTPDSLTLQETFRDMLLSGVSTAVMEVSSHALVQGRVYGSDYDVAVFMNLSQDHLDYHHTMEEYANAKSLLFAQLGNSYHTSNPKIAVLNADDAESVRMQKATAAHIITFGIKQEADFQASNIKITSHGSTFDLGTPVGNFTLKIKMIGNFSVYNVLAAIATSFALHIPMEKAIKTVESIPGVKGRFELVHAGQEFPVIVDYAHTPDGLLNVLETIDEFAEKRVFVVVGCGGDRDKGKRPQMAKIAVDYATNPIFTSDNPRSENPRAIIEDMIQGVPESDAYVVHENRRDAIRFAVNQAEAGDVILIAGKGHEDYQVVGDEVIDFDDRVEARIAIEKKLGLA

SEQ ID NO: 11845 - protein, 521 aa, Burkholderia thailandensis E264
MRMKLKNIGLIAAGLATGVFATLQISASAQQAVTTAAAPLPLDQLRLFAEVFGQIKREYVEPVDDKKLLTAAIKGMVSSLDPHSSYLDKTDYQELQEQTKGRFAGLGIEISQEDGLVKVISPIEDTPAFRAGIRPGDLITRINDRPVRGMTLDKAVKQMRGEPGTKVTLTIFRKSDDRTFPVTVTRAVIRVQSVKMKLLDPGYAYIRITSFQERTTPDLAAKLQDIARQQPKLKGLILDLRNNGGGLLQSAVGVAGAFLPPDSVVVSTNGQIPDSKQVYRDNYENYRLPSFDSDPLKNLPAVFKTVPMVVLTNAYSASASEIVAGALQDSHRALIMGKATFGKGSVQTVRPMTADSALRLTTAYYYTPSGRSIQNKGILPDIPVDQYADGDPDDVLVTREVDYTNHLANTQDPNEKKELEEREQRRMEQLRLLEEQNDKKTPEQRQKDRERKPVEFGSADDFMMQQALNKLEGKPVVQSKMIAADSTAKSPAAKASAAPAPKGAAAKPASAAKPASAPQPQ

SEQ ID NO: 11846 - protein, 373 aa, Zea mays
MYGSPVSKDLNLPVQPPMASSGLLRYRSAPSTVLGDLCEDFLSSAPRAASPDAGADNVFSRFLADHHIRDDKPSPLASAAVHFPTETDTASQQQQQQMMFHSQQQQEMVSAKSGLYRTVNSGVETAAAAGAGGASSSDNASNLIRQSSSPAGFLDHLNMENGYGAMLRAGMATADSLAGGGSRLKGQLSFSSRQGSLMSQISEMDSEEVGGSSPEASGGGRGYIPGYPMGSGWEDSSALLSDNLSGVKRPRDSSEPGQSGLTHQFSVPKTSSEMATIEKFLQFQDAVPCKIRAKRGCATHPRSIAERVRRTKISERIRKLQELVPNMDKQTNTSDMLDLAVDYIKDLQKQVKVLKESQDNCTCSASKNQQHSC

SEQ ID NO: 11847 - protein, 165 aa, Mesorhizobium sp. SDW010
MFADGVMFDGSSIAGWKAINESDMVLMPDTETVHMDPFFAQSTMVILCDILDPISGESYNRDPRGTAKKAEAYMKAEGIGDQIFVGPEAEFFVFDDVKYKADPYNTGFKLDSTELPSNDDTDYETGNLGHRPRTKGGYFPVPPIDSAQDMRSEMLTVLAEMGVRV

SEQ ID NO: 11848 - protein, 698 aa, Azoarcus sp. BH72
MNRKLPWIVLLLSATLHAAEPQVATPLQPAATQAEAAALSARLLGRFHYQPTPLDDALSARILDRYLKALDPERVYFVQADIERYAAARTTLDDAIREQDLRLPFEIFALYQTRLRERLALARELAAGSFDFSTDEQYRFVRTDEPWPANEAAARELWRKRVKNDWLRLKLAGKDDKGIRDTLTKRYDSLLTRATRIKSEDVFQTFMNAYATSIEPHTNYLGPRASEDFEISMRLSLVGIGAVLQERDDYIVIRELVPGGPAARSTQLAIGDRILGVGQGEQPPVEVLGWRVDDVVALIRGNKDTVVVLDVLPAEAGPDGAHKKVKLVRDTINLEKQAASKSVIDAGPPEAPRKVGVITLPAFYQDVAARGAGGDYRSASRDVARLLRELKAEGADAVLIDLRNNGGGSLDEAVRLTGLFIDTGPVVQQRSAQGQIRVERDADAGQVWDGPLGVLINRASASASEIFAGAIQDYGRGVLIGEQSFGKGTVQTLVDLDEMARNSKPTYGELKMTIAQFYRVNGESTQLRGVSPDIGLPSLLDADRFGESGFDNALPWTRIDPAPHKAAGGIPALVPTLQQRHLARIANDAAFRNLQQDVTEVAAQRKKLDISLNEAERRRERAEQERKLRANANAADEDNGDDGLLAGERSLDAELAAEQLRKKAPDVLLNEAARIVGDLATLQRSEANVAAGGRRSLN

SEQ ID NO: 11849 - protein, 163 aa, Rheum australe
MDSTKGIAFTEEEEALVVKSWASMKKNAGELGLKLFLKVFEIAPTAKKMFSFLRDSDVPVEKNPKLKTHAMTVFIMTCESAVQLRKAGKVTVRESSLKRLGSTHLTYGVADEHFEVVRYALMETIREAVPEMWSPEMKAAWGTAYDQLVAAIKDQMKVASQAS

SEQ ID NO: 11850 - protein, 170 aa, Helicobacter pylori
GSGMHTHVSVWKNNENLFSGETYKGLSELALHFLGGVLRHARGLAAFTNASTNSYKRLIPGYEAPSILTYSANNRSASVRIPYGISKNSARFEFRFPDSSSNPYLAFAAILMAGMDGVKNKIDPGEAMDINLFKLTLDEIREKGIKQMPHTLRRSLEEMLADKQYLKEGQ

SEQ ID NO: 11851 - protein, 473 aa, Magnetococcus sp. MC-1
MANKEAVNKVLGMIDANNVRFVDFRFTDFKGKWQHITAPARMLTEDVFETGLGFDGSSITGWCEINNSDMAYVPDPESAVMDPFSEDATLILACNIIDPFTGEDYSRDPRSVAKRAEAYLAYTGIADTAYVGPEAEFFVFDSVRYNVGMNNVSYHIDSEEGAWNTGTEYEDGNTGHRPGIKGGYFPVPPVDSLQEMRNEMSNLMEEMGLTIEFHHHEVATAGQCEIDMRFGTMLHTADNIQKYKYVVHNVAHQYGKTATFMPKPMAGDNGSGMHCHMSIWKDGKPLFAGNQYADLSEMALHFIGGIKKHAKALNAFTNPSTNSYKRLIPGFEAPVLLAHSSRNRSASIRIPASNSPAGKRCEIRFPDPSANPYLAFAALLMAGMDGVENKIDPGPSMDKNLYDLPPEELKDIPTVCGSLREALEELSKDREFLLKGDVFSNDLIDAYIKMKMDEVYAVEHCPHPIEFQNYYSV

SEQ ID NO: 11852 - protein, 170 aa, Helicobacter pylori
GSGMHTHVSVWKNNENLFSGETYKGLSELALHFLGGVLRHARGLAAFTNASTNSYKRLIPGYEAPSILTYSANNRSASVRIPYGISKNSARFEFRFPDSSSNPYLAFAAILMAGMDGVKNKMDPGEAMDINLFKLTLDEIREKGIKQMPHTLRRSLEEMLADKQYLKEGQ

SEQ ID NO: 11853 - protein, 611 aa, Gibberella zeae PH-1
MDALSLRHPFSFQFVSFILIFFNSQSNLFTMVFYPPSSVKLPFDPPDSVTVPEFIFREDGVRKPHSRSRNPFTCGISGKTYTTAEVIERQKLLARALAKRLGYDIREGTEWDRVVALYSVNTIDYITMTHAVHRLNGIVTPASAAYSAPELEHQLRSSGANALFTCVPLLEVALQAAKGVGIPEDRIFLLPVPGAESKQPFKTINDLVAEGKDAPELKPLDWIKGQGERQVAYLCYSSGTSGLPKAVQITHRNVIANVIQATIQNEEGRKSAGVDAQIQLGLLPLSHIYGLVPVAHYANIKQGIYNGDETIILPKFDLKLLLSAIQRFKIQQMALVPPIFIQMMSNYAECQKFDLSSVRFIFSGAAPLGKETTIDLNKHWPSWKICQGYGLTETSPVVTSTSELDIDPGSSGTLLPGLKAKVIDAEGKEVTEYNKPGELYVQGPTIVLGYLNNAKATAETFVHHDDGRWMRTGDEVIVRKSPKGTEHFVIVDRIKELIKVKGHQVAPAELEAHLLTHPLVDDCAVIQVPDLRAGEVPKAFVVKAPQAKGKSDDEITQSINKHVEEHKARHKWLKGGIEFIDVIPKSPSGKILRRLLRDRERQARKETGAKL

SEQ ID NO: 11854 - protein, 160 aa, Bacillus cereus G9241
MTVYDFSAKTITGEDKSLKDYEGKALLIVNVASKCGFTPQYKGLQEVYDKYKDQGLEILGFPCNQFGGQEPGTEADITSFCELNYGVNFPMFAKIDVKGDKAHPLYTYMTEQAPGLLGMKAVKWNFTKFLIGKDGKVVGRFAPQTKPVDLEVEIEKVLGE

SEQ ID NO: 11855 - protein, 139 aa, Triticum aestivum
  misc_feature (22)..(22): Xaa can be any naturally occurring amino acid
PTRPNLQNLECCLFVLFPYFSXEGLGLSGIVSILFTGMVMKHYTYSNLSDNSQRFVSAFFHLLSSLAETFVFIYMGFDIAMEEHSWSHVGFIIFSIIFIIVARAANVFSCAYLVNISRPEHRRIPLNHQKAFCFSGLRG

SEQ ID NO: 11856 - protein, 373 aa, Arabidopsis thaliana; identical to SEQ ID NO: 10648

SEQ ID NO: 11857 - protein, 573 aa, Coprinopsis cinerea okayama7#130
MYLKSPYPDPPALPETNAHNIFFRRPDQAEWPDYTLHIDATSGKKVMYREFVRRVEDLATALGTPSSQGGLGFSKENGDIVGIMMENSSDYIALIHANIALTTPFALISSYSTPFELKHALTLSKATALFVDAKFLPIVLPVAKEVGMDLNRIYVGTGQAAGRKNIDDLIDGVRARSLPFIGAKPAKENTLAYLVFSSGTSGLPKAVMISHGNLIYSLGQAIVMGTVTAEVYTPPPPANPEGIPVVLAMLPLHHTYGLHSYSYRAFLAPVTHVVMGKWDINVALKAIPKYKVSVIALIPSIVHQLVHHPDIEKVDLSSVTSLGSGAAYLPPELAEKLSRLLPKQSHFSEGYGMSECTIAAITQPYPGTLGKLKAYPGSTGVLLPGMEARIVRDDGTEADFDEPGELWLRSRNVALGYWNNEKANRETFVDGWLRTGDKFRVDKEGNFWFADRAKDTLKVSGAQVSPVEIENCLLAHPDHLIIDATVAGVSGGRTSDEKVPRAWVVLSDKGKALGPDAVIQALKKWTEDNLSKYKHLRGGIEIIKEIPKSPTGKVLRRVLQDEYEKTVAVKAKL

SEQ ID NO: 11858 - protein, 428 aa, Arabidopsis thaliana
MTTTDKSAGIVTDSEAGPETSLLLNPHEGSTKKAPSDSYHFAYIIYFTLGVGFLLPWNAFITAVDYFSYLYPSTAVDRIFAVIYMLVAPVCLFVIVVFYAHKSLASFRINLGLLLFVIALLVVPVLDLVYVKGQVGLYAGFDVTSAAVALSGLGDALMQGGLIGVAGEMPERYMQAVVAGTAGSGVLVSLLRILTKAVYPQDPDGLRKSANLYFAVGIVVMVICAVFYNVAHKLPVIKFHEERKNEELIREKSEEKGSLTGLAWRTTLWDIVTKVKSHGFGIVLLYMVTLSIFPGYITEDVHSELLTDWYPILLIAAYNVFDLVGKCLTAVFMLEDEKIAVGGSIARLLFYPLFWGCLHGPMFLRTEIPVTILTCLLGLTNGYLTSVLMILAPKSVPLRHSETAGIVTVTFLVVGLASGSVIAWFWVI

SEQ ID NO: 11859 - protein, 423 aa, Mesorhizobium sp. HN8A1
VMFDGSSIAGWKAINESDMVLMPDPDTVHMDPFFAHSTMVILCDILDPVSGESYNRDPRGTAKKAEAYMKSEGIGDQIFVGPEAEFFVFDDVKYKADPYNTGFKLDSTELPSNDDTDYDTGNLGHRPRVKGGYFPVPPIDSAQDMRSEMLTVLAEMGVRVEKHHHEVAAAQHELGIKFDTLVRNADKMLIYKYVVHQVANAYGKTATFMPKPIFGDNGSGMHVHQSIWKGGKPTFAGNEYAGLSESCLFYIGGIIKHAKAINAFTNPLTNSYKRLVPGYEAPVLLAYSARNRSASCRIPFGSSPKAKRVEVRFPLGANEQVVEIETVPTGSLGLDIALGVGGLPRGRIIEIYGPESSGKTTLALHTVAEAQKKGGICAFVDAEHALDPVYARKLGVDLENLLISQPDTGEQALEICDTLVRSG

SEQ ID NO: 11860 - protein, 165 aa, Staphylococcus aureus subsp. aureus Mu50
MNNRNVYDIEVSDYKGLTYKLEAFRGKVILVVNTATECIYSEQLKKLETLFQKYKDRGFVVLSFPNNNFDNRQPGSNEEILKISREKFGVTFPVLAKISVNGNDEHPLFTHLKNEQPGIFGSPIKWNFTKFIIDRQGNVVNRFLPMEDPLDISTNIEILLQESSS

SEQ ID NO: 11861 - protein, 293 aa, Zea mays
MAKSGGLCTLATMFKIIKEMLPPDVRVARDAQDLLVECCVEFINLLSSESNEVCSREEKKTIAPEHVIKALSDLGFREYIEEVYAAYEQHKLDTLDSPKAGKFTGIEMTEEEAVAEQQRMFAEARARMNNGAPKPKETEQEPPQQPQAQPQLQLHTEPQQPVQSQVQLHSPTQHSLQPQVQLHPQPQQLPQVQVHSQTQLHPQPQQPQVQVHPQLQQLPQLQAHSQPPQPQVQIHPQPQQPPQVQLQSSVQQTSQPQPQVHLYNHRGGSQAQLQPQLPGQLQTQGQTGPGIDS

SEQ ID NO: 11862 - protein, 179 aa, Glycine max
  misc_feature (32)..(32): Xaa can be any naturally occurring amino acid
  misc_feature (51)..(51): Xaa can be any naturally occurring amino acid
KTLNLSELSPLAQALFLLMANMITIMKNALPXANAKISKDANDTVLDCLSXFLSFYPGEASDSCRMQKFITINRDYLLWVVTTLGFEEYVEPLKIYLRRFREMYRREPPWPPTTLLRTRPPPLSIFGDTGTAPLPFIIKCQGPFFLPRVDLYEFALLFSAPLDFLYCIIFSALASSILT

SEQ ID NO: 11863 - protein, 668 aa, Spinacia oleracea
MAVAWKSRASSIAFGIVLLGSLFAFVSAKDEAPKLGTVIGIDLGTTYSCVGVYKDGKVEIIANDQGNRITPSWVAFTNDERLIGEAAKNQAAANPERTIFDVKRLIGRKFEDKEVQKDMKLVPYKIVNRDGKPYIQVKVQEGETKVFSPEEISAMILTKMKETAETFLGKKIKDAVVTVPAYFNDAQRQATKDAGVIAGLNVARIINEPTAAAIAYGLDKRGGEKNILVFDLGGGTFDVSVLTIDNGVFEVLATNGDTHLGGEDFDQRLMEYFIKLIKKKHTKDISKDNRALGKLRRECERAKRALSSQHQVRVEIESLFDGVDFSEPLTRARFEELNNDLFRKTMGPVKKAMDDAGLEKNQIDEIVLVGGSTRIPKVQQLLKEFFNGKEPSKGVNPDEAVAFGAAVQGSILSGEGGEETKEILLLDVAPLTLGIETVGGVMTKLIPRNTVIPTKKSQVFTTYQDQQTTVTIQVFEGERSLTKDCRLLGKFDLTGIAPAPRGTPQIEVTFEVDANGILNVKAEDKASGKSEKITITNDKGRLSQEEIERMVREAEEFAEEDKKVKEKIDARNSLETYIYNMKNQISDADKLADKLESDEKEKIEGAVKEALEWLDDNQSAEKEDYDEKLKEVEAVCNPIITAVYQRSGGPSGESGADSEDSEEGHDEL

SEQ ID NO: 11864 - protein, 428 aa, Zea mays
MGLGAAMALALGDPPADYASIAAVGLFVALMCVCIVVGHLLEENRWMNESITALFIGLGTGAVILFASSGKHSRVLVFSEDLFFIYLLPPIIFNAGFQVKKKQFFRNFITITLFGAVGTLISFTVISLGALGLISRLNIGALELGDYLALGAIFSATDSVCTLQVLSQDETPFLYSLVFGEGVVNDATSVVLFNAIQNFDPGNISGAKLLNFIGSFLYLFGSSTILGVASGLLSAYTIKKLYFGSPVKSIALSSTILALVLVSRAAFVFPLSFLSNLTKKTPNGKISFRQQVIVWWAGLMRGVVSIVLAYNKAFDLMFPRFCGSARHFGRCARHFGRDIIMPNLKSSVTTTASAVEYMDEVLKALSPVLFLAEGSPAPVVVSEGANTMDVGRPVLVQNAPRTTLDAGTWGTMGIGLGYCIAAAVAEPE

SEQ ID NO: 11865 - protein, 162 aa, Hordeum vulgare
MSAAEGAVVFSEEKEALVLKSWAIMKKDSANLGLRFFLKIFEIAPSARQMFPFLRDSDVPLETNPKLKTHAVSVFVMTCEAAAQLRKAGKITVRETTLKRLGGTHLKYGVADGHFEVTRFALLETIKEALPADMWGPEMRNAWGEAYDQLVAAIKQEMKPAE

SEQ ID NO: 11866 - protein, 1124 aa, Ustilago maydis 521
MAQKRSIRISSSPFPPCQRGSSDQDSFHDDALQTGIELSHGLRKRQRPQLPTRGSGPSRSTLRDLLGLTAADDYIETSSTVAAEHANRSSLRGASKPQHASSIKQAHFETSNRLKRSPASSPSLSKSPSSSEDEPVLSLSRGPRAPRASISRSAAPSTHIQPPCSTAVKQGQPEVDSDTGDDEPEQALSLTSNGNASLPSALAQSSSFRNDRSQTSDEDDEVSLAIRGPVSVPISFTNVSASHIISYSSGDGFHGQRPSFPIPVDLKDVGPLILAPGVEVPASINRFLRSYQRDGVRFLYRSYAQGRGALLGDDMGLGKTIQVIAFLSAIMVKTGREEDADRRIEAIRSDRQSSDYHRANAIWPTCLIICPSSVIDNWRHEFDTWGYFEHAAYSGTRAKDALDSFRRGRLDILVTSHETASLSIEHLRDLDLSCVLIDEAHKLKNPSSQMTQAMQTFRCKVRYALTGTAIQNTYRELYTLADWANPGLLGTVKEWITEIEVPLKHGQKRGADPEHIADARTRAEKLVTNVLPIFFLRRTKALIADQLPRKFDKIVFCPLTPTQLDVYKRILSEDEVDLMKRHADPCDCGRLDPDTGLAYRRQNCCFKRDSTGGAWNKNMLKYIYLLQKCSNHVALVFPDPEDASSKDPDRMERYHRQLSYVQLMFPDSWQSKRCNAANGMEPELCGKWKVLAGMLAQWHANGDKVLLFSTNLRLLQFIEFFLSREGHNFLRLDGTTPQPRRQQLVNQFNRDASIFVFLISTTAGGTGLNLTSANRVVVFDPHWNPSHDLQAMDRAYRFGQSRDVYVYRLIGAGSLEEVIYGRQIYKQQQMEIGYNATKERRYFEGVAGDQGSLGELFGCKNLFTLHESSLAMKSIIDQCNISEVTFALEQYLLAGSLEDPAATGVTLTKHSGILGADVADPTRYVEDGDVAQRTASVDDDPIRSILEGSGISYSHDHAALVGNSAAEAALYKKAARRPVSSRPGRTSRAAGFVATSERAAKPTSTSKKGTHKAAATTPSWPPPRSKKTSSDNEATQQQESQSVAAAAQGLRRAVQHDAVAAQSRMPDLSDLAELQNVKEVELASAVNAMPPAEQKAFFDDAVRRWNRKQSILAKAANRSAQQFF

SEQ ID NO: 11867 - protein, 186 aa, Pseudomonas fluorescens PfO-1
MLKRWCAVPALLMALTGLAQAADCPDLLQGSLPKLRAKESIDLCQRYADKPLVVINTASFCGFAPQFEGLEALNQRYKAQGLEMLGVPSNDFKQESKDSAETAKVCYANYGVTFTMTEPQKVRGDDATHLFQVLARQSSAPKWNFYKYVIDRQGKVIANFSSLTKPDDPEFLAAIEKAIASQSLKP

SEQ ID NO: 11868 - protein, 152 aa, Oryza sativa
MVRTPERSYSCSSAKEVAYSCGYCGYALNLSSSTRNTANIGSKYGKQIRKGVISFFAIDESRFTQTDEVSCMPYFHSRRSWGLFRKRTRLICRKCGGRIGNAYEDEDSTLYDGSDDLHMSSEGYSMSSGKKYVMKINALQPSTDDSGVPFTL

SEQ ID NO: 11869 - protein, 475 aa, Oceanobacillus iheyensis HTE831
MGLEYNNSFLWFVIGYGLIILMMGAFYSKKVTSSEDFILAGKSLGPIVLMGTLLATWVGSGTVTGGPNSIAYSNGLWPAIGYVIPSLIGITILLLISAKIRNYGKYTVSEILEIKYGSFARILSLIIIVLAFVGIVSYQYQGLGFILHVSTGISVETGTIIGAVLIIFLATIGGLMSVAPTDTLSALIIFLGLIIGVPVILGDIGGFDHLVSSVETERLNLFGNLNLLQVMGFYIPVLFLLLGDQNMYQRISASSSDKTTKLGISGWIIGMLISTPLVAVLAFSARYYFPDLDPGMALISTSLVLPTAIGGLLIAAVTSFIVTTGNSYLLSSATNITYDIYGKYINPKATDKQKLVFTRVLIPVLGLIAYLLTTYFPTVLTVQMYAYTVYGAGITPALLGVFLWKRVTKQAGISSMLAGVVSTLIWEFFDTPFNINSSLISIPIAILVLVIVTLLTSKKQELFDYRKDDLIANQK

SEQ ID NO: 11870 - protein, 537 aa, Oryza sativa Japonica Group
MESRKPPPSALVDNHVVPGDVVLDLAEMTNQTIKLGAGLRQDCDTIQATSAGRLRLSKPSKYWVESSQKRYIPSVEDTVLGVVVDTKPDNFLVDIKGPNLAFLPVLAFEGGTRRNIPKFEIGTLIYARVVKANSIMNPELSCMDATGKAAEFGQLKDGYMFDTSTGLSRIIFEWHRATKYGGKSLGETILMGAVEECTHKQLPSLSDLCVTLGEFSHICLASRRLSPSQSGMTSATGVEKVEVWCQDLAMGGRRVEINANKCGTHPTPSKPYYVDKIDTNEQKVVHYQVNCRPARDRNTGSYSVKHHYPSPIVSWIEDLSSFGNVSFSQDPEYADEQSRSSVGQSSASVNLHDMQISVRLTDEFIELAKENTGNNVETCGILGASFRDGTYYVTMLIIPKQEATAHSCQAVSEEEIHAILSEQSLYPAGWIHTHPSQTCFLSSIDLHTQYSYQVMLPEAVAIVIAPTDPTRQVFYGRNCGIFRLTDPGGMGVLRECSESGFHAHRETTDGGPIYETCSKVIFNPNLRFEIVDLRSAP

SEQ ID NO: 11871 - protein, 242 aa, Populus trichocarpa
MESKSSGSPATFIDNLVVPGDVVVDLSSMTNQTIKLGSGLRQDCDAISVMKAGKLRFSKPNKYWVETSQKRYVPCAEDSVLGIVVDSKSDNFLIDIKGPALAFLPVLAFEGGTRRNIPKFEAGTLLYVRVVKANPGMNPELSCTDASGKAAEFGALKDGYMFECSTGLSRMLLSSPTCPVLEALGKKLSFEIAVGLNGRVWVNANSPSIVIIVANAIMNSETLSGVQQKIMAEKLLQKIQND

SEQ ID NO: 11872 - protein, 434 aa, Prochlorococcus marinus str. NATL2A
MLKSFLKISLLIAICPSPSFSFQANSSTLITNNPKEIIDQVWQIIYRDFLDYSGKYKAEDWIKLRKEILSTKYFDNDEAYIAIKDMLTELDDPYTRFLDPKEFNEMRIDTTGELMGVGIQISLDEVTNQIVVVSPIEGTPAFLAGIKPKDIIVSIDGKPIDGLSIDRTVKLIRGKKGTKVELGIIREEELLNISLIRDRIEINVVDSRINNTVSGAKIGYVRLKQFNAKSPKEMSLSINKLEKQKPFGYVLDLRSNPGGLLEASIEIARQWINTGIIVSTKTKDGITDIRKAKSRALTNRPVVVLIDEGSASASEILSGAIKDNKRGILVGKKTFGKGLVQSVRSLSDGSGLTVTVAKYLTPSGKDINKNGIAPDIRADLLLNEKNKLTNADLGTLKDSQYVAAENILIKKFKIESKKNSYNPLKSNLGYALKN

SEQ ID NO: 11873 - protein, 435 aa, Agrobacterium tumefaciens str. C58
MTLDLSKFAAEKGIKYFMISYTDLFGGQRAKLVPAEAIADMQKGGAGFAGFATWFDLTPAHPDLFAVPDASSVIQLPWKKDVAWVAADCVMEDQPVEQAPRVMLKKLIAEAAGEGLRVKTGVEPEFFLISPDGAKISDEYDTAEKPCYDQQAVMRRYDVIAEICDYMLELGWKPYQNDHEDANGQFEMNWEYDDALQTADKHSFFKFMVKSVAEKHGLRATFMPKPFKGLTGNGCHAHISVWDMDGKVNAFADKEMPFGLSAKGKTFLGGIMKHASALAAVTNPTVNSYKRINAPRTISGATWAPNTVTWTGNNRTHMVRVPGPGRFELRLPDGAVNPYLLQAIIIAAGLSGVRSKADPGPHYDIDMYREGHTVTDAPKLPLNLLDALREYEKDAELQQALGMEFSKAYLKLKQGEWNSYCAQFTAWEHQTTLDV

SEQ ID NO: 11874 - protein, 139 aa, Zea mays
NISRIMKKPIPANGKIAKDAKETVQECVSEFISFITSEASDKCQREKRKTINGDDLLWAMATLGFEDYIEPLKVYLQKYREMEGDSKLTAKSSDGSIKKDALGHVGASSSAAQGMGQQGAYNQGMGYMQPQYHNGDIKK

SEQ ID NO: 11875 - protein, 170 aa, Helicobacter pylori
GSGMHTHVSVWKNNENLFSGKTYKGLSELALHFLGGVLRHARGLAAFTNASTNSYKRLIPGYEAPSILTYSANNRSASVRIPYGISKNSARFEFRFPDSSSNPYLAFGAILMAGIDGIKNKMDPGEAMDINLFKLTLDEIREKGIKQMPHTLRRSLEEMLADKQYLKEGQ

SEQ ID NO: 11876 - protein, 831 aa, Vibrio vulnificus YJ016
MHFDSGLLALLFVIIALFIGALVRHLLKGSQVPYTVALLILGIAIGLAHRGNIFADNYTFIGETLSLASEIDPHLFLFLFLPTLIFESAFAMEVHLFRRMFTQIVILAVPGLMLAIWLTAELVAWVLPEHWQWSWALCLMFGALISATDPVAVVALLKEVSSRKRLETLIEGESLLNDGTAIVFFSLFYGWVLMEFSNPGEAITAPPWQAVAQFFVVVFVGLAVGLILGGLCILWIDRVFNDPMIEISLTIAAAYSAFFISENFHVSGVVAVVTLAIMFASVGRTRISPEVAGFLHHFWEMMAHMANTLIFLLVGILVAIRVPLDDKEAWLALFVLYLGIMAIRACSITVFMPILKRIGIGITYEKAVVLCWGGLRGAVSLALAMTVASSDIIPKQIGDHVLFLCAGIVVLTILFNGSTMGHVLKWLNLSSLPPGKQATVDKAQHEINRVLHDMLPKMMTSDFLKGADWETVKQGAKLQVLKECNSPTEITQDELHTAYLRRLLETERKHYWTQFSQGLIGKQATNKLVEAVEHALDGDPIIGPRNELFTTWRLPDWVEPLRQYNSWNKLLLKVYFRRLALGYDVARGFIQAQEALESHIDTLAPDAEIAVMVRQQVELNKRLTFERIESLRMSFPEIIQALQSQAATRLLLNRERAVINDQLKQAVLDKPEAQKLLNMVEERMAALQKESIFDKSQEQKLINDIPWARELKSKTREELTSWIEHTVYDAGQLICENQRPLNRIGIVSRGSITELYETRSDDNLEKVRTTIGPGETFALISLLTGKTNAQYVSDTPTDIMWLPVDKLKLLMNQDPNLTAVVCQLFKQLKSV

SEQ ID NO: 11877 - protein, 789 aa, Oryza sativa Japonica Group
MGLGKTVQVLSFLGSLHNSGLYKPSIVVCPVTLLQQWRREASRWYPKFKVEILHDSANSSSKKSKRSSDSDSEASWDSDQEEAVTCSKPAKKWDDLISRVVSSGSGLLLTTYEQLRILGEKLLDIEWGYAVLDEGHRIRNPNAEITLVCKQLQTVHRIIMTGAPIQNKLSELWSLFDFVFPGKLGVLPVFEAEFSVPITVGGYANATPLQVSTAYRCAVVLRDLVMPYLLRRMKADVNAQLPKKTEHVLFCSLTTEQRATYRAFLASSEVEQIFDGNRNSLYGIDVLRKICNHPDLLEREHAAQNPDYGNPERSGKMKVVEQVLKVWKEQGHRVLLFTQTQQMLDIMENFLTACEYQYRRMDGLTPAKQRMALIDEFNNTDEIFIFILTTKVGGLGTNLTGANRIIIYDPDWNPSTDMQARERAWRIGQTRDVTVYRLITRGTIEEKVYHRQIYKHFLTNKVLKDPQQRRFFKARDMKDLFTLQDDDNNGSTETSNIFSQLSEDVNIGVPSDKQQDQLYAASATPTTSGTEPSSSRHGQGKEDHCPDQADEECNILKSLFDAQGIHSAINHDAIMNANDDQKLRLEAEATQVAQRAAEALRQSRMLRSHESFSVPTWTGRAGAAGAPSSVRRKFGSTLNTQLVNSSQPSETSNGRGQSLQVGALNGKALSSAELLARIRGTREGAASDALEHQLNLGSASNHTSSSSGNGRASSSSTRSMIVQPEVLIRQLCTFIQQHGGSASSTSITEHFKNRILSKDMLLFKNLLKEIATLQRGANGATWVLKPDYQ

SEQ ID NO: 11878 - protein, 170 aa, Helicobacter pylori
GSGMHTHVSVWKNNENLFSGETYKGLSELALHFLGGVLRHARGLAAFTNASTNSYKRLIPGYEAPSILTYSANNRSASVRIPYGISKNSARFEFRFPDSSSNPYLAFGAILMAGMDGVKNKMDPGEAMDINLFKLTLDEIREKGIKQMPHTLRSSLEEMLADKQYLKEGQ

SEQ ID NO: 11879 - protein, 180 aa, Arabidopsis thaliana
MASSMLSSATMVASPAQATMVAPFNGLKSSAAFPATRKANNDITSITSNGGRVNCMQVWPPIGKKKFETLSYLPDLTDSELAKEVDYLIRNKWIPCVEFELEHGFVYREHGNSPGYYDGRYWTMWKLPLFGCTDSAQVLKEVEECKKEYPNAFIRIIGFDNTRQVQCISFIAYKPPSFTG

SEQ ID NO: 11880 - protein, 170 aa, Helicobacter pylori
GSGMHTHVSVWKNNENLFSGETYKGLSELALHFLGGVLRHARGLAAFTNASTNSYKRLIPGYEAPSILTYSANNRSASVRIPYGISKNSARFEFRFPDSSSNPYLAFAAILMAGMDGVKNKIDPGEAMDINLFKLTLDEIREKGIKQMPHTLRRSLEEMLADKQYLKESQ

SEQ ID NO: 11881 - protein, 622 aa, Campylobacter lari RM2100
MSKVIGIDLGTTNSCVSVYERGESKVIPNKEGKNTTPSVVAFTDKGEILVGDSAKRQAVTNPEKTIYSIKRIMGLMINEDAAKEAKNRLPYHITERNGACAIEIAGKIYTPQEISAKVLMKLKEDAEAFLGEKVEDAVITVPAYFNDAQRKATKEAGTIAGLNVLRIINEPTAAALAYGLDKKESEKIVVYDLGGGTFDVTVLETGDNVVEVLATGGNAFLGGDDFDNKLIDYLASEFKDETGIDLKNDVMALQRLKEAAENAKKELSSANETNVNLPFITADASGPKHLTKTITRAKFESMIDGLVAETISKINEVVKDAGLDKSEVKEIVMVGGSTRVPLVQEEVKKAFGKDLNKSVNPDEVVAIGAAIQGAVIKGDVKDVLLLDVTPLSLGIETLGGVMTKIIEKGTTIPTKKEQTFSTAEDNQSAVTINVLQGEREFSRDNKSLGNFNLEGIPPAPRGMPQIEVTFDIDANGILTVSAKDKATGKAQEIKITGSSGLSEEEINNMVKDAELHKEEDRKRKEAVEARNSADSLVHQVEKSLSELGEKVSDEDKANIQKALDDLKETLKNANASKEEIESKMKTLSEVSHKLAENMYKKDEKPSDDKKKKDDDVIDAEVE

SEQ ID NO: 11882 - protein, 476 aa, Methylobacillus flagellatus KT
MRKLKKIGLIVAGPLLGVMLSLSYSAIADKETKPQLPLDDLRTFAEVFGKIKSDYVEPVEDKKLLTEAINGMLAGLDPHSAYLDADAFKDLQAGTQGEFGGLGIEVGMEDGFVKVVAPIEDTPAYKAGLKSGDLIMKLDDTPVKGMTLTDAVKRMRGKPDTKITLTVLRKGEAKPLTFVLTRAIIKTQSVKYKLSEPGYAYIRITQFQEHTGEDLAKALKTMREQNKEAFKGLILDLRNNPGGLLNAGVGVSAAFLPKGELVVYTEGRGEEAKMRLTANPENYVRGGARADYLRDLPAEMKTLPIVVLVNGGSASASEIVAGALQDHKRAIIMGTQTFGKGSVQTILPMNNGAAIKLTTARYFTPKGRSIQAKGIVPDIVVEEATVSSQEHAAMLREADLSRHLSNPKEGEEAPTVQPAPAEPENTKPEAPATEPDSKDQKDKPAANGPIEPGSKADYQFNQALNLLKGLQILQRK

SEQ ID NO: 11883 - protein, 613 aa, Lactobacillus sakei subsp. sakei 23K
MSKVIGIDLGTTNSAVAVLEGGQPKIITNPEGARTTPSVVSFKNGEIQVGEVAKRQAITNPDTIASIKRHIGEAGYKVTVGDKSYTPQEVSAMILQYIKKFAEDYLGEEVTEAVITVPAYFNDSQRQATKDAGKIAGLDVKRIINEPTASALAYGLDKTETDEKVLVYDLGGGTFDVSVLELGDGVFQVLSTNGDTRLGGDDFDEAIMNWLVENFKSDNGIDLSKDKMAMQRLKDAAEKAKKDLSGVTSTQISLPFISAGENGPLHLEMTLSRTEFDRLTSDLVDRTKAPVMNALKDAGLDANEIDKVILNGGSTRIPAVQEAVKNWTGKEPDHSINPDEAVALGAAVQGGVISGDVKDVVLLDVTPLSLGIETMGGVFTKLIDRNTTIPTSKAQTFSTAADNQPAVDIHVLQGERPMAADNKTLGRFQLTDIPAAPRGVPQIEVKFDIDKNGIVNVSAKDLGTNKEQKITIKSNSGLSDEEIDRMMKEAQENEEADTKRKEEVDLKNDVDQLIFQTDKTLKELEGKVSDEELQKAKDAKEELVKAQQENNLEDMKTKRDALSEIVQELTVKLYQQAQEAQQAAGGAEGNATDAKTDDGTVDGDFEEVKDDKE

SEQ ID NO: 11884 - protein, 170 aa, Helicobacter pylori
GSGMHTHVSVWKNNENLFSGEIYKGLSELALHFLGGVLHHARGLAAFTNASTNSYKRLIPGYEAPSILTYSANNRSASVRIPYGISKNSARFEFRFPDSSSNPYLAFAAILMAGMDGVKNKIDPGEAMDINLFKLTLDEIREKGIKQMPHTLRRSLEEMLADKQYLKESQ

SEQ ID NO: 11885 - protein, 157 aa, Leuconostoc mesenteroides subsp. mesenteroides ATCC 8293
MSIYDYFATLENGETYSLNKLANHPVVIVNTATKCGYAPQFGELEKLYKKYKDKGLVILGFPSNQFKQELETASQAAQACQLTYGVTFPMHQLVAVNGKNTDPLFKYLKENSKGMLGSSTIKWNFTKFLVDKEGNVVKRYAPKTEPKDLEEDIEDVL

SEQ ID NO: 11886 - protein, 129 aa, Glycine max
  misc_feature (77)..(77): Xaa can be any naturally occurring amino acid
MKNCAYLSQKQHRFWRVFPHSLGCFVHFLAFHVHPFFVQLCYFEILSMIGYLSLNVSKPTTPDRPNDLDLFYTSVSXLSTVSSMEAVETDVLYNAQLILLTLLMLVSGEDITSALEPIFARYKFTQSVQ

SEQ ID NO: 11887 - protein, 215 aa, Glycine max
  misc_feature (158)..(158): Xaa can be any naturally occurring amino acid
  misc_feature (168)..(168): Xaa can be any naturally occurring amino acid
  misc_feature (183)..(183): Xaa can be any naturally occurring amino acid
MEFSVLPLLYSLVFLLSNPTWVCGNGELRALMDMKASLDPESLYLPSWSINGDPCDGSFEGVACNEKGQVANISLQGKGLFGKLSAAIAGLKHLTGLYLHYNSLYGEIPREIANLTELVDLYLNVNNLSGEIPRKIASMENLQVLQLCYNQLTGSIPXSFGALEKLSXLVLLQSNNLTGAIPXNLGELGMLVRLDLSSNNLFGSISTSLADAPSL

SEQ ID NO: 11888 - protein, 472 aa, Synechococcus sp. RS9917
MAQPFLAPGIAWALVVIFSVLWIALGVSWGRKGKGDADDYMLAGRNIGLALSTATLMASWVTGNTTLLAPEFGYRNGLWGMVSYALAGLGLILFAPLALRIKQLMPAGRTSGDFFRLRYGRAAWWVFMVITAVYTLGFLMTQAMGAGILLEALSGFDYRLGMVVVIGVSTIYTLYGGMRAVVGTDFIQSLLIMVLLVVVAVLAFRQFPVPEVHRELVASHPGRLNLLLPAGLLIAWNSALFSMGEVFHNNIWWSRVFASRPSVVFRSFVFGGLAWMTVPVVTGSIGLVALAQAIELPQVNMVFPVVASQLLGAGGAAMVFVVVFASLTSTLDSLLASTADLVAEDVVFKLLNPQLSDAELKRATRLVVIGLGVVTLALSWPRLDSLASVLFFTGALVASTIWPVAYGLYWRSANRVAAIAAMVAGSVCGLLAYTLIAPYCAALISAAVSALVMAVGTQLWPERFSWHILKEG

SEQ ID NO: 11889 - protein, 180 aa, Helianthus annuus
MATQTVFDFPDDVLQQPPMPADNAFSDKDVKGQDVELSKYKGKVLLIVNVASQCGFTNSNYPELTTLYQKYKDQGFEILAFPCNQFGGQEPGSNEEIQVFACTRFKAEYPVFSKVNVNGKEADPLYKFLKSSKGGFLGDSIKWNFTKFLVDREGKVVDRYAPTTSPLSIEKDIKKLLNVA

SEQ ID NO: 11890 - protein, 503 aa, Arabidopsis thaliana
MVIGLSTMLEKTEALFASDHASVVSMNLFVALLCACIVLGHLLEETRWMNESITALIIGSCTGIVILLISGGKSSRILVFSEDLFFIYLLPPIIFNAGFQVEKKQFFRNFMTIMLFGAIGTLISFVIISFGAKHLFEKMNIGDLTIADYLAIGAIFSATDSVCTLQVLNQDETPLLYSLVFGEGVVNDATSVVLFNAIQRFDLTNINSAIALEFAGNFFYLFILSTALGVAAGLLSAFVIKKLYIGRHSTDREVALMMLLAYLSYMLAELFHLSSILTVFFCGIVMSHYTWHNVTDKSKVTTKHTFAAMSFLAEIFIFLYFGMDALDIEKWDVVRNSPGQSIGVSSILLGLILLGRAAFVFPLSFLSNLTKSSPDEKIDLKKQVTIWWAGLMRGAVSMALAYNQFTTSGHTKVLGNAIMITSTITVVLFSTVVFGLLTKPLVKHLQPSSKQSSTTALQITLRSSFHDPILHEPLLSTQGQSEYDPEQHVSFRMFWKSPSRFTH

SEQ ID NO: 11891 - protein, 454 aa, Agrobacterium tumefaciens str. C58
MTSYTFDALKMDVAEGRIDTVLACLVDMQGRLMGKRFQAEFFVESAFEETHSCNYVLATDMEMETVPGYKSSSWEKGYGDYTLKPDLSTLRKVPWLEGTALVLCDVLDHHTHEEVPHSPRALLKKQVARLEAMGLKAYMATELEFFLFDQTFDAARASGYKDLNLASGYNEDYHIFQTTKEEDVMRALRKGLQGAGIPVENSKGEASPGQAEINVRYAEALTMADRHAIIKNATKEIAWSKGKAVTFLAKWNYNAAGSSSHIHQSLWSLDGKPAFLDKDGEHGMSDVMRHYVAGLLAHASDITYFLAPYINSYKRFMAGTFAPTKAIWSLDNRTAGYRLCGAETKGIRIECRVGGSDLNPYLAMAALLAAGIDGIENKLELEPAFVGDAYGGKDVREIPKTLRDATAFLDGSKMLRQAFGDDVVDHYVHAARWEQEEYDRRVTDWEVARGFERA

SEQ ID NO: 11892 - protein, 830 aa, Candida albicans SC5314
MPRIKKELIEVKQKQQRSILDFTTQQRQQQQQRQRQPNRSSQVVTIKSETITNTTTENSSIVYCPICNEGITHLDLRERTDHVDTCLVRVTFVEKATSTSTTNTTTTTTTTTTTTTTIPVKREISEVKSEETMMETVVPKREFNNSLSSILISSSSSSSSSSSSTEKTNSLIKKKRKIDPENKSKYINREFKNSSKTNTNTNTNINTTFIDQSKIIKPPTSIKHVKKKPIPSLKIMTFPLTQEPSSSSSSSLIYQVAVDAFCFAPHDTINQYFLTHFHADHYGGISKKWAYERVFGNDEDAFNNQTFDFDDDSIYKKIIYCTGITGRLLTLRYSIDPRFIKHLELDTRYKIKSYTEKEDDEEEEEEEEEEEMESNDMTPGLYVTPITANHCPGAAIFFFESIGIDNKIYRILHCGDFRVNMEILNHPILRPFSLTHSKNNLLQSIDKVYLDTTYMSPKHNLPKQELVCEIMANLFQDLIQQEINKDEQKKTTSNLFSNWFGNFTQSRITDFCTTSSTSKNGLTRPIRKKKFLIVIGTYIIGKEKLAISISKRLNNCLIYLSSIGSRKDKFEIFKTYKNDYLNSVMTIEKEFGNINDTNDSDCMIHLVPMTLVSNNEELSKYFNHNKYYQFFERCIGLCPTGWSYSKIANTKKPNQQQQQQKEETENDETGSGGGGGTDDLLISQLEQTITMMKNQPSFNYINDILSQIPTTTPNSTKRKTKTNTKTKTKTKTKTDPDLYRLYSVPYSEHSSFRELAYFIIFFQIKQTIPTVNYENEFQLIKMNRIIQNWEKIRQIILKSDSNGSGGVDDDNNNIPDDLLQRIQRLSLNDF

SEQ ID NO: 11893 - protein, 246 aa, Dendrobium nobile
MGRGRVQLKRIENKINRQVTFSKRRSGLLKKAHEISVLCDAEVAVIVFSNKGKLYEFSTDSSMEKILERYERYSYAERALFSNEANPQADWHLEYHKLKARVESLQKSQRHLMGEQLDSLSIKELQHLEQQLESSMKHIRSRKTQLILDSISELQKKEKILLEQNKTLEKEIIAKEKAKALTQIAPWEKQNLSQYSSAPLHVISDSVPTPTSRTFQAIANEEESPQAQLRVSNTLLPPWMLGHMNG

SEQ ID NO: 11894 - protein, 285 aa, Burkholderia sp. 383
MSTTLLFHPTPDAAYGFPNARRLARVASPHQQIEVWETPQLGRLFTLDGRPMTSVGDEYVYHECMTHPAALAHPAPRRALVLGGGDGGAARQLLKHACIERIVIAELDDEVVGMARRYLDDVHQGALDDPRVEVVIGDAAHFVESTVEHFDLVVFDLTPPDSPAAGLYTRAFYARLKRILTPCGAISMHLGSPVFHAARIAALLDDLRACFAVVDPLSAHVPLYGSQWLMAIASDTLDAAALFAHDIDERLAARRVQGLRYYDARLHASLFALPCALRDTLGVRR

SEQ ID NO: 11895 - protein, 499 aa, Oryza sativa
MGSMYRHLRDRSSRRRRFSPAWRQELARQESPGVAGGRRQGRWCRSWHGRRIGRDDQEVRARTANTIDIDHDLEILVVIFACYDNIGTERSAYFRQIEEDVGTHPAAILELKDAVGAFQSMDMGELARFEGFPSKKLEALRMAAALYSKLDGVVATPIKVTSLTRQQQDRYAAPPDEHARLEQHQQAAHAHPCGDELTDPERSRRKHCTGEALGSSESEQPTRPARPRGKRSRAAEVHNLSEKRRRSRINEKMKALQSLIPNSSKTDKASMLDDAIEYLKQLQLQVQMLSMRNGLYLPPVNLSGAPEHLPIPQMSAALDQNSAKASDPSVVLQPVNQTSGALLPFELASQHKPLFLPGVPNATALEPRFLVESSRSNLQSLRFTEPAEMIYPDEMMLKHRLTSASESTIVPGTDEKSVRQNTYMMNADRFDRYALSKDQLQHIMPKNTESVLDMPHLQRILTKVLIVSDYKLTIQLPILDRLQTSDTKVRVEGRIKVNP

SEQ ID NO: 11896 - protein, 1032 aa, Streptococcus pyogenes M1 GAS
MMARLIPGRVRNEGIKLYEQGLVSFQDDNKGILQIEVETYQVQYGADDEDITCQCDTFHMKHYCKHIAAVEYFLKNDQKGKLFLKQLTNQTKIKETTKKMTSFGSLFLDSLAMNEDDSVKYRLSALGSRSPFSSDYWWSLKINRLPDDRSYVIRDIKGFLQLIKKEGFYQIGKNYFEQLSWLQFDPSSQALIEFLWRLASDTDKGDNENIFPNHARHLRLPSGFFEEGIHYLTSLYDFTFEGPSQTYHHLFVRSLEAEAGLYEFKVEVHRKSIELQIAEKNVQYLFDNDYLLYQDTFYHLTLKQRKMVQAIRSLPIEADLAKHIHFDLDDHAKLAASLSDFKQIGLVEAPKSFAIRDFEVTFQFDLLNRDEISCQLMFDYGNYQVSDKASLEALPFASHLKKEEKINRSLLAFGFSPQFYSKKRLTSAKELYTFFEETVPCFERLGNVALSTAIQALQVKEMPKIAIRRNQGLLDISFDFSTIIENDIDQAVTALFQNNPYFVSQTGQLVVFDDETQKVSKSLQELRARQLKNGHLQLDGIRALQVSKLFEGMTSVHFSKELEELAYHLQHPETFSIKPLPVKAQMRDYQRNGVQWLSMLNHYGFGGILADDMGLGKTLQTLAFLASHLKSDSKVLILSPSSLIYNWFDECQKFTPQLDVVVSYGLKQIRDQIIEEGHQITITSYSSFRQDFETYQAFHYDYLILDEAQVIKNAQTKISHCLRAFNTANCFALSGTPIENKMLEIWSIFQIVLPGLLPTKKEFLKLTAEQVSRYIKPFVMRRKKEDVLPELPDLIEINYSNEMTDEQKAIYLAQLRQMQDQIRNSSDVDISRQKIEILSGITRLRQICDTPSLFMDYQGKSGKLDSLRILLTQIKENGHRALIFSQFRGMLDLAKQEMTALGLTSYQMTGSTPANERQEMTRAFNNGSKDAFLISLKAGGVGINLTGADTVILIDLWWNPAVEMQAISRAYRIGQKENVEVYRLITRGTIEEKILELQESKRNLVTTVLDGNESRASMSIEEIKEILGLNTH

SEQ ID NO: 11897 - protein, 289 aa, Neptuniibacter caesariensis
MGVNFMTTNYKETLHKGYGQAFDVEEVLFEQQTDSWHLIIFRNPVYGTVMALDGIIQTTERDEFVYHEMLTHVPILAHGKAKRVLIIGGGDGGILREVCRHKSVEHVTQVEIDQAVIDMCKEYLPNHSAGAFDDPRANIVIADGVEYVNSTDEKFDVIISDCTDPVGPGEVLFSSRFYEGCKSLLNEGGVFVAQNGVPFLQQDEVITTRRRLSPYFKDQSFYAVAVPTYIGGVMTLAWGSDNESLRQLDLSELQKRFADSGITTRYYNPQTHLGCFGLPQYLLDALDKA

SEQ ID NO: 11898 - protein, 110 aa, Physcomitrella patens subsp. patens
SDDYGGNHGSGERDNSSVREQDRFLPIANISRIMKKALPANAKIAKDAKETVQECVSEFISFITSEASDKCQREKRKTINGDDLLWAMSTLGFEDYVEPLKVYLHKYREV

SEQ ID NO: 11899 - protein, 476 aa, Synechocystis sp.
MARTPQEVLKWIQDENIKIIDLKFIDTPGIWQHCSFYYDQLDENSFTEGIPFDGSSIRGWKAINESDMCMVPDPNTATIDPFCKEPTLSMICSIKEPRTGEWYNRDPRTIAAKAVEYLRGTGIADTVYFGPEAEFFLFDDIRFGPNGNSSYYFADSVEGRWNTGREEEGGNLGYKPGYKEGYFPVAPTDTAQDIRTEMLLTMAGLCVPIEKHHHEVASGGQNELGIKFDKFDKLVNSADNLIIYKYVIKNVAKKYGKTVTFMPKPIFNDNGSGMHVHQSLWKDGQPLFAGDKYAGFSQMGLWYIGGILKHAPALLAFTNPTTNSYKRLVPGFEAPVNLAYSQGNRSASVRIPLSGGNPKANRLEFRCPDATSNPYLAFAAIVCAGIDGIKNQIDPGEPLDVDIYDLSPEELAKIPSTPGSLEAALEALEKDHQFLTGTGVFSPDFVESWIEYKLDNEVNPMRLRPHPYEFSLYYDC

SEQ ID NO: 11900 - protein, 98 aa, Glycine max
PIELFSLLITENCCCYHHQETDFSYQNHGLTHHLSLPSSSTKMSSIEMFLQIQGSVPYKIRAKRGFATHPRNIAERERRTRISEGIKKLQDLFPRSEK

SEQ ID NO: 11901 - protein, 1064 aa, Bacillus cereus ATCC 14579
MSFTLNKSIIKEVCGETSYKRGEAYYKSNKVIIDHYDENKEICEATVKGNEDFHVTVAKAKKGDVVAKCSCPSLASFQTYCQHVAAVLIQINYNQQIGGMSSTSSRNDQLTSGMFQLFADKPLRPKSKQHRFDTREILDIEFICTPVATRSGGALLGIQLKLAKVYFINHIREFLSKVEKRESFHCSNEFTYTPDVHSFKQETDAIIQQLIKMYHNEKMYEDTLEVHAKQDESMIFIPPASWKDMLFSLSKAEYVQLKQNEQLFQGLQVSKGLLPLHFEFTKGNNGGFTLHIEGLNRVQVMDMYNNALYDGKLYHLHIEDCMRLIELQKMMSRSNSNQFYIPESKMEHFVAKVVPGLMKLGTVHIDEVISDRVETPSLKAKLYLDRVKNRLLAGLEFHYGNVMINPLEEDGQPSVFNRDEKKEKEILDIMSESAFAKTEGGYFMHNEEAEYNFLYHVVPTLKGLVDIYATTAIKLRISKGDAVPLIRVRRKERIDWLSFRFDIKGIPEAEIKGVLAALEEKRKYYRLANGSFLSLESKEFNEINQFIKESGIRKEFLHGEEVNVPLIRSVKWMNGLHEGNVLSLDDSVQELVENIQNPKKLKFAVPNTLNAEMRKYQVYGFEWMKTLAHYRFGGILADDMGLGKTLQSIAFIDSVLTEVREKKLPILVVSPSSLVYNWFSELKKFAPHIRAVIADGIQAERRKILKDITEFDVVITSYPLLRRDIRLYARPFHTLFLDEAQAFKNPTTQTARAVKTIQAEYRFGLTGTPVENSLEELWSIFHVVFPELLPGRKEFGDLRREDIAKRVKPFVLRRLKGDVLNELPEKIEHLQSSELLPDQKSLYAAYLAKLREETLKHLDKDTLRKNKIRILAGLTRLRQICCHPALFVDDYKGSSAKFEQLLEILEECRSTGKRILIFSQFTKMLSIIGRELNRQAIPYFYLDGSTPAQDRVELCDRFNEGEGDLFLISLKAGGTGLNLTGADTVILYDLWWNPAVEQQAADRAYRMGQKNTVQVIKLVAHGTIEEKMHELQESKKNLIAEVIEPGEEKLSSITEEEIRDILMI

SEQ ID NO: 11902 - protein, 170 aa, Triticum aestivum
  misc_feature (156)..(156): Xaa can be any naturally occurring amino acid
MPRKITLVKEGEPQPVDAAQGEPAPAPAAPTAALTEAEVDELPRAIVRRLVKDKLSHVAGGEGAEVIVNKDAMAAFAESARIFIHYLSATANDMCKESKRQTINADDVLNALDDMEFSEFVEPLKTSLQEFRNKNADKRSEAKNNRRKREGINEKXSRKNQMGTNQKDDK

SEQ ID NO: 11903 - protein, 112 aa, Brassica napus
  misc_feature (93)..(93): Xaa can be any naturally occurring amino acid
  misc_feature (100)..(102): Xaa can be any naturally occurring amino acid
  misc_feature (104)..(104): Xaa can be any naturally occurring amino acid
  misc_feature (107)..(107): Xaa can be any naturally occurring amino acid
MASSMLSSAAVATSPAQATMVAPFTGLKSSAAFPVTRKSNTDITSIANNGGRVSCMKVWPPVGKKKFETLSYLPDLTDVELAKEVDYLLRNKXFPCVEFXXXPXFVXKTCIP

SEQ ID NO: 11904 - protein, 473 aa, Xanthomonas citri
MQHPRAFACLGDRVTDLLVRTSVEEGDAHVCFLRAHKRCRAVRAGQSIECGGVEQEHEIAGWKGINESDMVLLPDAGTAYLDPFFADPTIVLTCDILDPATMQSYERDPRGIAKRAEAYLKSSGTADQAFFGPEPEFFIFDSVRFANDMGHTFFQVGSEEAAWNTGEKYDGGNSGYRPGVKGGYFPVPPTDSLHDLRAEMIKTLEQVGIETEVHHHEVATAGQCEIGTKFSSLVQKADELLTMKYIIKNVAYRNGKTATFMPKPIVGDNGSGMHVHQSLAKGGVNLFTGDGYGGLSQLALWYIGGIFKHARAINAFANSGTNSYKRLVPGFEAPVMLAYSARNRSASCRIPWVTNPKARRIEMRFPDPLQSGYLTFTALMMAGLDGIKNQIDPGAPSDKDLYDLPPEEEKLIPQVCSSLDQALEALDKDREFLKAGGVMSDDFIDGYIALKMQEVTKFRAATHPLEYQLYYGN

SEQ ID NO: 11905 - protein, 156 aa, Pichia angusta
MPAVQDFVVGTIVGSFGEFYRVSLSNFSTPAVLGFYAFPNASKKNRPKLKTGDLVYARVAAVDPDLDVELECFDATTGKEGGFGHLEGGFVFEVRLAYARYLLRQQDAPVLTKLMRKYQFELAIGANGRIWIKSDTLPNTIECMKAIQRAQTDKQS

SEQ ID NO: 11906 - protein, 357 aa, Bacillus cereus E33L
MGNNGVKVGSKWYPTDINTQEPPTLQRNLQMMKNRNADYCVMEVTSQGLHMERVKGCNFKIAVFTNLTQDHLDYHGTFLEYKHVKGLLFARLGNDLSTTEKKIAVLNADDPSVEYFKKITSAEVITYGIHNRADVQAKNINLSPKGIRFLVSSFNGEIEVSLNLVGRFNIYNALAAITVAIVEGIPLTNICDSLSNLKSIEGRMEIIDENQDFFVIVDYAHTPDALENVLSTISEFSKGKVITVFGCGGDRDAKKRSIMGGIAGSYSDFVFITSDNPRSEDPQAIMKDIEKGFSQNNNLNYKVEVDRELAINHAINMASSNDIVLIAGKGHETYQILKDSTIHFDDKEKARQAIINK

SEQ ID NO: 11907 - protein, 444 aa, Vibrio cholerae O1 biovar eltor str. N16961
MSVYYTLCFLSAAAMLIAFINSKISRMQTTIAITAGSMMLSLLILIAGQNDWFHLNQIATETVTSINFENFLLKGILGFLLFAGGLGIKLPNLKDQKWEITVLALGATLFSTFFIGFTLYGFCQLIGIQFDLVYCLLFGALISPTDPIAVLAIVKKLKAPKRISTQIEGESLFNDGFGLVIFVTIFTIAFGHETPTVGSVTLLFIQEAIGGIVYGFLLGLLFHYLISATDDHSMELLLTIGIPTAGYAFADVIHVSGPLAMVVSGIMIGNWTRFIGFSKESEEHLDHFWELVDEFLNGVLFLLIGMSMLLFEFHQEDWILMAFAVPLVLCGRYLSVFVSYIGFKRYRSYNPWSIRILTWGGLRGGLALAMALSIPSGIMVIPEKLIDVKELILVMTYAVVVFSILVQGSTITPMIEKAKKAEKALQAERNTDNQSPMPQQEQQH

SEQ ID NO: 11908 - protein, 1187 aa, Oryza sativa Japonica Group
MEDDDDDQRLLHSLGVTSADIHDIERRIISQATTDPADSSGPTINGGHQPDDALAKLHHKLRSVQIEIDAVASTIKGAKLKQPSGNKPHEHKGKDQPDHHGAGHLQQALAADRLTSLRKAKAQIQKEILQSHPSPSASNRKDKMLAMLVQDEPRHKKPPVGPKNIVKRPMKTVTYDDDNNFDAVLDGASAGFMETEREELIRKGLLTPFHKLKGFEKRVELPEPSHRQDDSAGQTEEAMEASRIARVAQSLKQIAQNRPATKLLDSESLPKLDAPAAPFQRLGKPLKRPVSPSSDEQEKKRPRNKTKRPLPGKKWRKANSIKESSLDDNDVGEAAVSVSDDDEDQVTEGSDELTDVTLEGGLRIPGTLYTQLFDYQKVGVQWLWELHCQRAGGIIGDEMGLGKTVQVLSFLGSLHNSGLYKPSIVVCPVTLLQQWRREASRWYPKFKVEILHDSANSSSKKSKRSSDSDSEASWDSDQEEAVTCSKPAKKWDDLISRVVSSGSGLLLTTYEQLRILGEKLLDIEWGYAVLDEGHRIRNPNAEITLVCKQLQTVHRIIMTGAPIQNKLSELWSLFDFVFPGKLGVLPVFEAEFSVPITVGGYANATPLQVSTAYRCAVVLRDLVMPYLLRRMKADVNAQLPKKTEHVLFCSLTTEQRATYRAFLASSEVEQIFDGNRNSLYGIDVLRKICNHPDLLEREHAAQNPDYGNPERSGKMKVVEQVLKVWKEQGHRVLLFTQTQQMLDIMENFLTACEYQYRRMDGLTPAKQRMALIDEFNNTDEIFIFILTTKVGGLGTNLTGANRIIIYDPDWNPSTDMQARERAWRIGQTRDVTVYRLITRGTIEEKVYHRQIYKHFLTNKVLKDPQQRRFFKARDMKDLFTLQDDDNNGSTETSNIFSQLSEDVNIGVPSDKQQDQLYAASATPTTSGTEPSSSRHGQGKEDHCPDQADEECNILKSLFDAQGIHSAINHDAIMNANDDQKLRLEAEATQVAQRAAEALRQSRMLRSHESFSVPTWTGRAGAAGAPSSVRRKFGSTLNTQLVNSSQPSETSNGRGQSLQVGALNGKALSSAELLARIRGTREGAASDALEHQLNLGSASNHTSSSSGNGRASSSSTRSMIVQPEVLIRQLCTFIQQHGGSASSTSITEHFKNRILSKDMLLFKNLLKEIATLQRGANGATWVLKPDYQ

SEQ ID NO: 11909 - protein, 1018 aa, Debaryomyces occidentalis
MNKKMFKLNKLWLKYKRRLNNDIELENELGLRIRNGIHMVASTIGPYAKIILPNFRAVHYFYIIFMSFLGSILVYPVKNMRYVDALFLTGGASTQAGLNTTDINTLYLYQQIIVYIITTLTTPIFIHGSLLFARLYWFERHFDNIKERSKLNFKMRRSATLAGRRQSFDATRINTVNNQGLGFNQTNQTPSLKNEELTVHNTSPQSSSTIPKLVEKDHNNNSDIDHISEPSDSENEQGVPQDARMVKVSSDKEGPKFGNLPHPSNIRSKEIEPSDMYRSIAMLRDNFKSNSPKNNDDDDVLIIKSPNEIESDCQKPIFTKRSQIHFNVNKQPIKKWKQRKRKLTRGNQQWSKLKKSFSNTTTNSKKRVESLSQSTSDEEDDASIDSENAIDPLSADVNDDLNDEDDNDADDEEAMLDDEDGDEVNDNEDEGYLQDDYVLERAQSNLVIPSTDATGGEKFSKRSNTLDVTPGRKNSFIKSPTFEKMIKKKKRKSKRSTNRLFKIRTPSLYMQKSTASSGNSMNNDDEEGYNGDNDGHSLNKSNEVPTICSWVPTVGRNSTFVHLNEEQKEELGGVEYRAIKLLIKILIFYYVGFHILAFIFLLPWILKMPNYSNIVREQGVSPTWWAFFTAQSSFNDLGLTLTADSMQSFNRSIYVMVVMSFFIVIGNTGFPVFLRFIIWILFKFARPSSLFKESLGFLLDHPRRCFTLLFPSIPTWWLFSILVVMNVVDLVLFIILDLNNTYLEEIPVGYRIMDGLFQAFSTRTAGFTVVDLSQLHPAIQVSYMLMMYISVLPLAISIRRTNVYEEQSLGVYLKEDNNEHEDVEKTPKTFVGAHLRNQLSFDLWFIFLGLFIICIAEGSKLNKNHFRFSVFSILFEIISAYGTVGLSLGFPNVNASFSYELTTLSKLVIIAMMIRGRHRGLPYSLDRTIMLPDDDVERRDEVQEHHAIRRSTTMDTSGGTVNNSNDHNALRRAISRRASNFGFDTNIFRGRSSANNKVKTHFPNYKVIPENHEMNNLG

SEQ ID NO: 11910 - protein, 551 aa, Bacillus halodurans C-125
MERELSISLPHLTNEMVSGARKTKLCAYSVALEGWRRGLKLKWYTIDSGHFDNMITFGVNPPGRLFSLSSEERTHYFFRTRGDKVTNEAVEIGSDKDETKIWLSKAGVPVPEGRKFSEEATDDEIIQYASTLEYPLVIKPVNGSLGNGVITNIKNEQVLRKALNYVRSDLEYLEVIVERYVPGEEYRLYVIEDKVIGAYNRLPANIIGDGQHTIEELIHLKNLQRRKNARLFSCLIEIDLETLDFIEDAGYNLSSIPKDGERILLKEKTNVSAGGDPIDVTDDLSEEIKQIAINAVKAVPGLYHGGVDIIVDPSKPPEKGAVVIELNPTAQIGGILFPMKGKARDIPAAIIDYYFPETKGVKTDKSKIYFDLNTVLEPLQSRSAMEVEVTPAPVGKFYGKKYIVSGSVQRVSYHQWLKKEALSKDLHGFINNLPDGEIEVVVAGTSKEAVAEFKHTLSNTHKAEVKKVAEEVWKNPVKVGFEINEGFNPFSLRSVESALRKMEKELRRLEKDSRRTAKENLQIEQSTSWKYTAPIRQVGDRIKNIFRQASY

SEQ ID NO: 11911 - protein, 529 aa, Bacillus halodurans C-125
MEQKRTWLPHLENSIPEKLNGNKISMYAIALEGWRRGLTLKFSYIFADDKIKVVYSLANEEKEHQFAVSRGDKVTKEAISICINKDITKEYLEKANVPVPEGKGFNEAQADSDIIQYAKELGFPVVIKPTDGLSGKGVVVNIQNEEMLREAISYVREQLAYSNVVVERYFEGEDFRIYIMGDQVIGAVTRVPANVVGDGKRTIKQLIKLKNKARNKNPNLQRRPIKLDHELEKTLNLINYTIDSIPSKGERVILNTKSNISTGGEPVDVTDQLTPEIKKIAVQAAKAIPGLIHCAVDMLVDKENNNGVVLEINSKPQIGAHLFPMEGKAVNIPRAIIDYYFPETKEDPIPHRDMYTFDIMEILNILTNGIAKEVKVPRIPKLRQSFKCYTVSGRVQGVGYQRWVKKIANKLKLHGFVKNLSNGDVQIVVAGYVGNVKKMRSILESESPLKAVVKNVKEQNWEKPVQIGFKQILDEIDLEDYEKLKKDKLTLEQEIKALEQKYKEIASSRTWRISQPVRKILDVLRKTGR

SEQ ID NO: 11912 - protein, 544 aa, Bacillus halodurans C-125
MEQINHQWLPHLSKEIVEDARGPEFDAYLVALEGWRRGLTLRWHTKDSEAFREIKTWFVDRPGKLFSLRLEEKTHYFFRTRGDKVTNEAVAIGADKEKTKEYLAKAGIPIPEGRRFVAEIEDDEIISYAAEIGYPLVVKPTDGSFGRGVVTNIEDEVTFAEQLRHVRHVLNYKDVIVERHVAGKDYRLYVVGDKVVAAIERIPANVVGNGKQTIQELIEAKNEERQKNPRLISCPIKLDQEMKNHLAIQGYGLDTIPEDGEMVFLTNKSNISIGGDPVDQLDSLPEEVKQLAVQALQAVPQLPHGAVDILYDDKQPVEEGAVVLELNPTAQIGSLVFPMKGIARDVPAAIIDYYFPETKGMNGQKSRFYFDFSDVLEPLVTKTASVTTVSAAPLGEVYGKKYTVTGDVQGIDYHRGLRKQAFERKLSGFVKNLENGNIEVIVMGTDPESVNDFKQAIFEDPERSDVVDVFEESWEEPVKVGFEVKADLKMQVDQLKKMKLELETVQKDLKEAERKNIKYKKSLTWRMTLPFRKTLDVLKYFKRK

SEQ ID NO: 11913 - protein, 1124 aa, Vitis vinifera; identical to SEQ ID NO: 8476

SEQ ID NO: 11914 - protein, 621 aa, Nocardioides sp. JS614
MARAVGIDLGTTNSVVAVLEGGEPTVIANAEGARTTPSVVAFAKSGEVLVGEVAKRQAVTNVDRTIRSVKRHMGTDWLTKIDDKDFTPQQISAFVLQKLKRDAEAYLGEPVTDAVITVPAYFSDAQRQATKEAGEIAGLNVSRIVNEPTAAALAYGLDKGDDQTILVFDLGGGTFDVSLLEIGEGVVEVKATSGDNHLGGDDWDARIVDWMVKKFKDNNGVDLAADKIAKQRLQEAAEKAKIELSSSSETTIHLPYITHGESGPLHFEEKLTRSEFQRLTTDLLDRTKGPFQSVLKDGGVAIKDIDHVVLVGGSTRMPAVTEVVKELLGGKEPNKGVNPDEVVAVGAALQAGVLKGEVKDVLLLDVTPLSLGIETKGGVMTTLIERNTTIPTKRSEIFTTADDNQPSVEIKVAQGERQMWAQNQPLGNFELTGLPPAPRGIPKIEVTFDIDANGIVHVTAKDQASGKEQSMTISGGSALGKDEIDRMVREAEQYAEEDAKRREAVETRNQAEQLVYTTEKFLDENSDKLPDDVKTEVRADVDALKVTLEKEDASADDIRAGVTKLGESSQKMGAAMYAAAEADSAAAGGSAGATGESDDDVVDAEIVDEGGADDGAEGESK

SEQ ID NO: 11915 - protein, 565 aa, Bordetella pertussis Tohama I
MQESEFFQLSGTTAVLLLVAFYGATFLMSLMIGQKKENVDGYMVSNSSVGFGLSAASMIATWIWAASFYASATSGFKYGLSGPIQYGFWGALMILFIYPFGKRFRQLAPKAHTLAEVIHARHGASSQMIMAVSNIVGSCISLMVNFTAAGALVSVLSPLSFIQGVLIAGLGVLSYTLWSGFRASVMTDFAQLVAMILAAVIIIPLIFFNAGGPDMLQANMWRLSSEQADFFSTTAILEQGAPYFVAVLAYAIGNQTIAQRLFAVREDLIKPTFLTATIGYGAVVIGLDMLGLLALFVGLEPVNGNMNNIIPQMASTYLPPVGIALFFILVVGSLSSTADSDLAALSAIVITDIYAKNLAGGRPDPRRMLWWGRATMIVATMVGVIFASLRLDILVMLVFVGALWGAIVFPVIASFYWDRVSNSAFFWSVISAVVLFTIVRFELVPIEGAVAVFYEICAAIGGGVVIGLMSFAFFGRVTALTLGTLATLILLPCFVGTLREYIVLLGSLTAYGVSTVVCVALSLRNQERFDFSLLAERVTSFHYEKARMMGAKPAAPAAQPQPARG

SEQ ID NO: 11916 - protein, 469 aa, Mesorhizobium loti MAFF303099
MTTAKDIMKQIKDNDVKFVDLRFTDPKGKLQHVTMDVVEVEEDMFADGVMFDGSSIAGWKAINESDMVLMPDPDTVHMDPFFAQSTMVILCDILDPVSGESYNRDPRGTAKKAEAYMKSEGIGDQIFVGPEAEFFVFDDVKYKADPYNTGFKLDSTELPSNDDTDYETGNLGHRPRIKGGYFPVPPIDSAQDMRSEMLTVLAEMGVRVEKHHHEVAAAQHELGIKFDTLVRNADKMLIYKYVVHQVANAYGKTATFMPKPIFGDNGSGMHVHQSIWKGGKPTFAGNEYAGLSESCLFYIGGIIKHAKAINAFTNPLTNSYKRLVPGYEAPVLLAYSARNRSASCRIPFGSSPKAKRVEVRFPDPGANPYLAFAAMLMAGLDGIKNKIHPGQPMDKDLYDLPPKELKKIPTVCGSLREALQSLDKDRGFLKAGGVFDDDQIDSYIELKMAEVMRFEMTPHPVEYDMYYSV

SEQ ID NO: 11917 - protein, 1100 aa, Debaryomyces hansenii
MSWYKDPSEDSAIQVEDSPKKESSYVQVPTSSPIHVKSSPTKSNNDLMPPSRTQINNGSGDNEDKERKLEAKRQAIRNHKDFPMVKRRFYYLQESDIFKGFVKGKGNLREITQWLTDNYNKAEILGRHEAELKRQRELGQEEKMKQEKERLLREYQRQEEINQRREQEEKERSEKEGQNIDDQYDDEDLSPIKVRGKARIKSAAPPPPPPPVLLESPEKQSSTKVHISKPKVSILDKYKYKPKQQPSIDQVFRPQEDIQPKRRKLVRASTVSSGDDSNRGSPVAATFNYQDQYVPKLKMTMNGHAVESDQSNRGDDGIVEDDDLEKLEEKIKANRRAAKASKNDRVIEVSDNDLEDDDMSDDMSEEDDDEGYKTGLTTIDSQILEFLNNASTQDIIEICNVPPKVSELIITKRPFQNIYVVAEDKFELPSENTEESGNEKKRRVQRKTLGQKIIENTEFSLKGYKAVDSLIKKCSEYGDLISKQMEKWGVTITGEGELEMVDLEPTQNAIEIEDKDDYEEEDEDIIVHHKSKSLTYIKEKPSLLPEDIDLKNYQQVGINWLNLLYRNNLSCILADEMGLGKTCQVISFMAHLKETETKKGPHLVIVPSSTLENWLREFNKFCPDLMVQAYYGSQSEREELRYDLQNSDYDVMVTTYNLATGAAPDFKFLRNQNFNMIVYDEGHMLKNSTSERYNKLMRLNAKYRLLLTGTPLQNNLKELVSLLAFMLPNLFNDKREDLQGLFNQKVSTVDSSEGNYNPLLSLQAIAKAKTMMTPFVLRRKKVQVLKHLPGKIHKIENCELTPTQRAIYDDYLNQGKRTRIERERRKKLSSKENEKAKKNAIPSSSNVMMSLRKASLHPLLFRTLFTDEKVAKMAKAIMNEPEYFDANQTYILEDMKVMADYELNNLCEKFPKTLSKFVLQDEDWLNGGKISKLIEILDKIINKKEKVLIFSLFTQMLDILEKVLTISNMKFLRLDGQTSVDTRQDLIDKFYDDETIPVFLLSTKAGGFGINLVAANHVIIFDQSFNPHDDKQAEDRAHRVGQTSEVVVTKLIAKNTIEENMLQLAENKLQLDQSISSNELTDSKFEEKAASLFEKLLFDN

SEQ ID NO: 11918 - protein, 74 aa, Brassica napus
  misc_feature (55)..(55): Xaa can be any naturally occurring amino acid
NKGQGEAHSLKVEKVLFKDKSDYQEVLVFESATYGKVLVLDGILQLTEKDEFAYXEMIAHLPLCSTPSPKMSWL

SEQ ID NO: 11919 - protein, 286 aa, Synechococcus sp. WH 5701
MDPTAGWVDEIHQGVRYGLEAEVLLEQSSPYQRVTIIESRRYGKGLLLDGCWMTAERQERHYHEPLVHPALCAAASLERVLVIGGGDGGTARECLRHPGVRHLDLVEIDGLVVECAQRYLPSLGGGCWDDPRFQLTVGDGIAWVSAAAAASYDVVIVDGSDPAGPAEGLFNRAFFQQCRRLLRPGGVFATQSESPEAFREVHLATVRLLREVFGHADPLYGWVPMYPSGWWSWTFAAVDGPRYLEPRPERAEAVAAGCEIWSPRWQRGAFEAIPAGIERALDHPQA

SEQ ID NO: 11920 - protein, 219 aa, Oryza sativa Japonica Group
MPDSDNDSGGPSNYAGGELSSPREQDRFLPIANVSRIMKKALPANAKISKDAKETVQECVSEFISFITGEASDKCQREKRKTINGDDLLWAMTTLGFEDYVDPLKHYLHKFREIEGERAAASTTGAGTSAASTTPPQQQHTANAAGGYAGYAAPGAGPGGMMMMMGQPMYGSPPPPPQQQQQQHHHMAMGGRGGFGHHPGGGGGGSSSSSGHGRQNRGA

SEQ ID NO: 11921 - protein, 178 aa, Brassica napus
VDPRVRNNPGGLVKVGLDVAQLWLDGDETLVYTIDREGVTSPINMIDGHAVTHDPLVVLVNEGSASASEILAGALHDNGRAVLVGRRTYGKGKIQSVTELDDGSALFVTVAKYLSPSLHEIDQVGITPDVQCTTDKIDSLTGEILMKMNSSVPLLEADSCVMVAEHELETKQSSGAAS

SEQ ID NO: 11922 - protein, 369 aa, Vitis vinifera
MEGGAGKGLECPKIMDGKASNGKGLKKAIPSCCLKAKASAPENDAKCHSTVVSGWFSEPQSCSDKAGNLMYFNNPMWPGEAHSLKVENILFQGKSEFQEILVFESSAYGKVLVLDGIVQLSEKDECAYQEMIAHLPLCSIESPKRVLVVGGGDGGVLREISRHSSVELIDICEIDKMVIDVCKKFFPQLYVGFEDPRVQLHVGDAVEFLRHVPEGKYDAIIVDSSDPVGPAQELVERPFFETTARALRPGGVLCNMAESMWLHTHLIQDMLSICRETFKGSVHYAWASVPTYPSGVIGFLLCSTEGPPVDFLHPVNPIEKLEGNLKCGRELRFYNSEIHSAAFALPSFVRREVSILHNSPTPAQRICVS

SEQ ID NO: 11923 - protein, 444 aa, Thiomicrospira crunogena XCL-2
MTLEEAKKLLADNDVKYILAQFVDIHGVAKTKSVPANCLEDIVTSGAGFAGFAVWGLGLEPHQSDYLAKADLSTLSLVPWQPGYARVACTGHVNGQPYAYDSRYIMLKQIERLSEKGWTLNTGIEPEFSLLRKDENGQMVPFDKTDVLDKPCYDYKGMSRSRQFLETFVDSLQQVGFDVYQIDHEDANGQFEINYTYSDAKTSADRITFVRMAGSEIANEMGMTCSFMPKPNSSRTGNGFHYHLSITDEQGRNLFSDDSDENNLGLSEMAYHFLGGLIHHAKALCAFSAPTVNSYKRLVVGRSLSGATWAPAFISYGDNNRTAMVRVPYGRLEFRLPDSGSNSYLVTAAIIAAGLDGIEKKMDPGTPKNINHYSLSMEELADLGVETLPQSLSEAIHELERSTLFHEQFGEAFVKEFIDIKRMEWVEYQRHVSDWEINRYVEFF

SEQ ID NO: 11924 - protein, 636 aa, Arabidopsis halleri
MEALRIYLWSLSLCLIIYGANSDPLEDKRALLEFLTIMRPTRSLNWNETSQVCNIWTGVTCNQDGSRIIAVRLPGVGLNGQIPPNTISRLSGLRVLSLRSNLITGVFPADFVELKDLAFLYLQDNKLSGPLPLDFSVWKNLTSVNLSNNGFNGTIPGSLSRLRRIQSLNLANNSLSGDIPDLSVVSSLQHIDLSNNYDLDGPIPDWLRRFPLSSYAGIDIIPPGGNYSLVEPPPPRKQTHQKPKAHFLGLSETVFLLIVIAVSIVVIAALAFVLTVCYVRRNLRRGDGVISDNKLQKKGGMSPEKFVSRMEDVNNRLSFFEGCNYSFDLEDLLRASAEVLGKGTFGTTYKAVLEDATSVAVKRLKDVAAGKRDFEQQMEIIGGIKHENVVELKAYYYSKDEKLMVYDYFSRGSVASLLHGNRGENRIPLDWETRMKIAIGAAKGIARIHKENNGKLVHGNIKSSNIFLNSENNGCVSDLGLTAVMSPLAPPISRQAGYRAPEVTDTRKSSQLSDVYSFGVVLLELLTGKSPIHTTAGRDEIIHLVRWVHSVVREEWTAEVFDIELLRYTNIEEEMVEMLQIAMSCVVKAADQRPKMSDLVRLIETVGNRRTSIEPEPELKPKSENGASESSTPSEI

SEQ ID NO: 11925 - protein, 622 aa, Wolbachia endosymbiont of Drosophila ananassae
MQGKDTKVIENKEGARTTPSIVALTSSGERLIGAPAKRQATTNASNTFFATKRLIGRQYSDPEMKNLSVPYKVFAAKSGDAWVKTTDNKEYSPSQIGAFILQNMKEAAEAYLGEEVKDAVITVPAYFNDSQRQATKDAGKIAGLNVLRIVNEPTAAALAYGLDKKHGHTIVVYDLGGGTFDVSILEIGDGVFEVKATNGDTHLGGEDFDNGVVSYLLDEFKKSNGIDLKNDPMAMQRIKEAAEKAKIELSSAMETEINLPFITADASGPKHLNMKLTRAKLESLVNDLIERTMAPCKKALEDAGLSASQIGEVVLVGGMTRMPKVIEKVKEFFGKDPHRGVNPDEVVAIGAAIQAGIIQGDVRDVLLLDVTPLSLGIETLGGVFTPLIERNTTIPTKKSQVFSTAEDNQTAVTIKVHQGERKLAVDNKLLGQFSLEGIPPAPRGRPQIEVTFDIDANGIAHVSAKDKATGKEQKIRIQSSGGLSDDEINRMVKEAEEKAQEDEKRKKFIEVKNQADSLVHSTEKSLTEYGDKVSPEDRSAIENAVNELKEVSKSDNIDDADSIQQKVTNLSQLSMKLGEAMYQASQQNSAENGFSSEGNPNDKEEKVVDSDYQDIDNKEENK

SEQ ID NO: 11926 - protein, 421 aa, Physcomitrella patens subsp. patens
MKRRNESEERHGVQMNGWNGHSNSDHSHAPTPSGPRARASRSKTVKQTKNCPLTPGHSGIRSPTSSAPTPTSSCRYDSSLGLLTKKFIELIKQADDGVLDLNKAADTLNVQKRRIYDITNVLEGIGLIEKKLKNRIRWKRLGMARNADIKDDGAGTQTEVEDLLNQESNLDESIRHALYFILEFFQVLFEIREQLKNLSEDDHNKQWLYVTEDDIKNLPCFQNETLIAIKAPLGTTLEVPDPDEAVEYPHRRFQILLRSNMGPIDVYLVSRFEGKFEEMNSAEIPIEVEHPVPQAAGPPSPTDAMDQETMTMLPVVGYSLTDLEPPVSHEPASQSSELISSHPDLAGGIMRIAPAEATTDTDYWLLSDAGVGISDIWRSDPSNAMWDEVVRLNAEFGNENMGSPRPHTPTSSNSMEVVPVS

SEQ ID NO: 11927 - protein, 482 aa, Geobacillus kaustophilus HTA426
MKKSTTAALMAISMLIGAGGTYAGLQLADRPMEGSLSTIVSNEPSKSTNDSEEMKKIRQAYELIKNRYVEKVDEEKLTEGAIQGMINTLHDPYSVYMDAETTEQFNESLDSSFEGIGAEVSMIDGKVTIVAPIKNSPAEKAGLKPNDQILRVNGESLEGLDLYEAVLKIRGKKGTTVELDILRPGVKNVMKVKVVRDEIPIQTVYDSIKTYNGKKAGYLQITSFSENTAADFKKKLAKLEAEHIDGLIIDVRGNPGGYLQSVEEILKQLIPKGKPYVQIEERDGDRQKFYSDLTAKKPYPIVVLIDKGSASASEILAGAMKEAGGYKLVGETTFGKGTVQQAIPMGDGSNIKLTLYKWLTPDGHWIHKKGIKPDVAVVQPDYFHVAPLHVEKPLRYDMNDEQIANAQKMLKGLGFNPGRTDGYFSKETEQAVQAFQKANQLPVTGRIDEATADALQTKIMEAVRDPNHDVQLKKALGVLFPS

SEQ ID NO: 11928 - protein, 492 aa, Lactobacillus plantarum WCFS1
MPEEPKQTNPHIKKVPRPKRRVGLWTYIISIVVALGIGVGGTYWLIGRQVNAQLSSMQQTSKAMKKIESVYETINENYYKPVNANKLANGAINGMVNSLGDKFSEYMDKSETESLNDTIDSSFSGIGAQVQKSGNYVQIISPIAGTPAKKAGLKPKDIIKAVNGKSVAGKTLTQAVSMMRGKIGTTVKLTIERSGQTFTVSLKRAKIPVTTVDYKLVGGDKKIGYITVSTFSTNTAKEFKTALKALDKKGAKKLVIDMRGNPGGLMTAALKMASIFLKNGKTIMQVQARDGSTEKYTASKKYDGGFKETKSTTVLIDGGSASAAEIFSAALHQSAGVKLVGSQSYGKGTVQTVTTFNDKTEMKITVAKWLTPNGTWINKKGLTPDVKADEPSYASLTVISKVSDLQADKVNSNVKTFQKYLQALGYFKGTVNGYFGDSTTSAVKQYQKHAKLTVNGKVDKQTLTKIETELANKISDNDRAYDAAMKLIEKTN

SEQ ID NO: 11929 - protein, 144 aa, Physcomitrella patens subsp. patens
MEPPLDWSRTNSFRTAARVGEAGPKLGGLIRHSSLPAPSRPFSGNVDFDDLFADPSAVPLKTIRANRGHATHPRSIAERVRRGKISERMKKLQDLVPSMDRQTNTADMLDDAVEYVKQLQQQVQELSKTVAELQQLQERLGRRD

SEQ ID NO: 11930 - protein, 223 aa, Triticum aestivum
  misc_feature (128)..(128): Xaa can be any naturally occurring amino acid
MAGDMCEGSIAGCELCGGVTGVHCAEDSGFLCVPCDAKVHGANFLVSRHLRRRLVHSAADEDAGSAGSGSGSESSSSSSCVSTADSCAAASAVTRAVGRSRVGCKHRRVRAEVVVEGWAKRMGLAAGXAVRRAGKAVGALRALGRGVSCSGVPIRVGMARLLWSEDGGSGCVEAFLHRRLEASLYFPGKLDDPGCPLAWGPPGFGAPVPRAQQRQGWPLSLQI

SEQ ID NO: 11931 - protein, 659 aa, Phaeodactylum tricornutum
MMFMRIAVAALALLAAPSIRAEEAGEEAKMGTVIGIDLGTTYSCVGVFKNGALEIIANDQGNRITPSYVAFMPSGERLVGDAAKNQATINPENTVFDVKRLIGRKYSDKSVQADKKLVPYEIISDKDKPMIEVIQNEKTFKFAPKEVSAMVLQKMKLTAETFLGKEIKHAVVTVPAYFNDAQRQATKDAGTIAGLKVERIINEPTAAAIAYGMDKTGGESNVLVFDLGGGTFDVTLLTIDNGVFEVLATNGDTHLGGEDFDQRVMQYFIKMMKKKSDVDISKDKRALQKLRKEVERVKRALSSQQQARLEIEDLAEGFDLSETLTRARFEELNNDLFKKTMGPVARVMEDADLSKSEIDEIVLVGGSTRIPKVQQLISEYFGGKEPSKGINPDEAVAYGAAVQGGILSGEGGDATSEILLLDVTPLSQGIETVGGVMTKLINRGTTIPTKKSQTFSTHQDNQNVVLIQVYEGERSMTKDNHNLGKFELTGIPPAPRGVPQIEVTFEVDANGILQVSAEDKGTGKAEKITITAEKGRLSEEEIERMVREAEEFAEEDKKVKERIDARNGLESYLYNLKNTLDDDEKGLADNLSAEDKKELQDMIDETLDWMDGNPEADKEDYDEKLKEVEQVANPIMRNVYSGGAGGGAEDDADFADDEL

SEQ ID NO: 11932 - protein, 160 aa, Pseudomonas fluorescens PfO-1
MSAFHDLKLTALDGQELPLAPFKGQVVLVVNVASKCGLTPQYAALENLYQQYKGKGFSVLGLPCNQFAGQEPGSEQEIQEFCSLNYGVSFPLSKKLEVNGHDRHQLYRLLAGEGAEFPGDITWNFEKFLLGKDGRVLARFSPRTAPDDPSVITAIEKALS

SEQ ID NO: 11933 - protein, 469 aa, Rhizobium leguminosarum bv. viciae
MATASEILKQIKENDVKFVDLRFTDRRASLQHVTMDVVCVDEDMFADGVMFDGFSIGGWKAINESDMVLMPDTETVHMDPFFAQSTMVIVCDILDPVSGEAYNRDRRGTAKKAEAYLKASGIGDTVFVGREAEFFVFDDVKYKADPYNTGFKLDSTELPSNDDTDYETGNLGHRPRVKGGYFPVPPVDSAQDMRSEMLTVLSEMGVVVEKHHHEVAAAQHDTLVRNADELGIKFKMQIYKYVVHQVANAYGKTATFMPKPIFGDNGSGMHVHQSIWKGGKPTFAGDEYAGLSESCLFYIGGIIKHAKAINAFTNPSTNSYKRFVPGYEAPVLLAYSARNRSASCRIPFGSNPKAKRVEVRFPDPTANPYLAFAAMLMAGLDGIKNKIHPGKAMDKDLYDLPPKELKKIPTVCGSLRQALESLDKDRKFLTAGGVFDDDQIDAFIELKMAEVMRFEMTPHPVEYDMYYSA

SEQ ID NO: 11934 - protein, 253 aa, Alteromonadales bacterium TW-7
MKNNNVIPAFKKAGYVFSLLLFTFTLVLNNAFASSVKNLKSQQIDEILFNIHAYYVDDLELQNSHYVQYNNKQFERLYSKLDPYSKYLNEHELDALFDNTNGQYTGLGIEVKKVDTDIKIVNVVNNSPAKEAGILAGDIIVSVNQKTVNLLSVSEVATLIKENKFTTVNLTIKRNESPEVLSFNVARTQIQLESVTSKVLESGIGYLAINSFSNHTLHEVALQIAAMQNNYDYPLLGLVIDLRDNPGGTLKSA

SEQ ID NO: 11935 - protein, 165 aa, Cyanothece sp. PCC 8801
MTTAQAPASIYDLSATSINGTPVSLSDYKDKVLLIVNTASQCGFTPQYKGLQALYDQYASQGLVVLGFPCNQFGQQEPGTADQIQSFCEVNFGVSFPLFQKIDVNGSNAHPLYQYLTKAVPGILGIEAIKWNFTKFLVDRSGKVVKRYPPTTKPEDIAKDIQALL

SEQ ID NO: 11936 - protein, 521 aa, Mycobacterium marinum M
MSEVESVLRPSAGPGVPLAELAVQVGAVLADGPHRAAAVPDTLITGMTLRAQAVQPGDLFAALAGSATHGARHAADAIERGAVAVLTDPAGVTAISALGCVPGTVPVLVHPAPRGVLGEAAALVYGHPSDRLTVVGITGTSGKTTTTYLVEAGLRAAGRVAGLIGTIGIRIDGADIPSTLTTPEAPALQAMLAAMVERGVDTVVMEVSSHALTLGRVDGIRFAVGGFTNLSRDHLDFHPTMADYFEAKALLFDPASALRGHSVVVCIDDEAGRAMADRAGAAITVSATGQPAHWRATDVAPVGAGGQEFTALDPAGVGHRVRIGLPGHYNVANCLLALAILDAVGVSPEQAAPGLRETRVPGRLEQVDRGQDFLALVDYAHKPGALREVLSTLRNPQRRLAVVFGAGGDRDPGKRGPMGRIAAELADLVVVTDDNPRGEDPGAIRRTIVAGAAESGGAAQVVEIADRGEAIGYAVDWARTGDVVLIAGKGHETGQRGGAEVRPFDDRVELARALEALESCT

SEQ ID NO: 11937 - protein, 549 aa, Xylella fastidiosa Temecula1
MVSCMHSIQIVLAMLLVVAASGYLVRIIPFSMPLPLLQIALGAVISGVFDGGYELQPEAFFLLFLPPLLFLDGWRIPKQGLFRDKNVILELALGLVVFTVLGIGFLIHWMIPTMPLPLAFALAAILSPTDPVALSSITSRVPIPKRMMHILEGESLLNDATGLVCFQFAVAAVLTGHFSLATASLTFVWVLVVGLSLGIATTYVLSRVQRWVWRHFGGEPAAAILFNLLTPFAAYLLAESMQASGILAAVAAGITMSYVELSGNAQATIRVQRWAVWETVQFTFNGIIFVLLGEQLPGILDDLVHSAQQAGYMNVGWLLVDVAVISAGLMLLRFLWVWLSLQWNLFKAVCCGKQRISPPWQIVVAMSLSGVRGAVTLAGVLTLPLLMPDGTPLPARQLVIFLAASVILVSLLLASVALPYLLRGLELPEKSSYDKEEDFARRVSAQAALEAVERLRQRLVEDSANAERYNEAAHQVSQLYQRKLGAVDLANVDPQETKVFEQVVRRFRQVGLAAERDELFRLAREHNISDELLQRMVRNLDLIEARRRS

SEQ ID NO: 11938 - protein, 725 aa, Ralstonia eutropha JMP134
MSIIVDVLVLAGVLLAIVAVVQVAAARLVLPESTLLSAIGIAIGAGYVAIDAAHPAFAQHFLHPLIDPELPPEAYLWIFLPPLLFHAALTADVRSMLPDAAPILLLAVVAVIVATGVIGVATSAASGMPLAACLLLGAVVATTDPAAVIAIFRDVGAPARLIRLVEGESLLNDAAAIAIVGVLVAMLTGHSAQATLGAGVRELAWSFIGGVLCGALAGRLVAEVLPRLSGLAMAESALTLALPYPLYLLADQLLDVSGVVAVVCAGLMVSALGPTRLTPANWRHLRMIWEQFAGIAGAVVFLLAAVRVPSLLAGVTPHHGWLLLVLVAAALGARLLTLFGLLPVLSWLRLSAPISGAFKLAIAWGGLRGAVTLVLALGIAENTALPLQVRHFIAILATGFVLVSLLLNGTTLRALIHRLGLNQLSPQERALQQQAIRLSTEEVEAMLGRVAETFDLPPAAAREVAQHYRRGIELGSVEFDFDSALSERDRLTIGLVTLATRERELIPEYGDGVISVANLDAMMRNTSHMIDAAREQGRIGYKRAARAILQYHLGYRIAFFLHKWLGLDRPLARALADRFELLICRQTVLDRLRRYNRSLLTPVFGARMTTVLDGVLEERFHSAGEGLAQMREQFGDYTVALERRLLMLFALRKGQRSLATMREEAVISKEAFNQIDQIMQHAWQANLVRPPLRAAPDRWARWHKPPQTETRTPEETMPEPPRERR

SEQ ID NO: 11939 - protein, 293 aa, Paulinella chromatophora
MNHDPISFTSKISGAQEWVDEVYGNVRYGMKGCILLKKQSPFQRITIFDSIAYGVGLLLDECWMTAEYQEHCYHEPIVHPALTSAENIKNVLIIGGGDGGTARECLRYKNVQSVKMVEIDGLVVELSQKYLPTLGKQAWSDSRFHLVIEDGISWVTQVPSNSYDVIIVDCSDPVGPAKGLFNQSFLEQCKRILAPGGVFTTQSESPEASRKIHLDTVRLIRKVFGYADPMYGWVPMYPSGCWSWTFASVEGPRYLHPKINRTATISGIYNVWSPRWQKGAFNVMTASIEQELK

SEQ ID NO: 11940 - protein, 520 aa, Xanthomonas campestris pv. campestris str. ATCC 33913
MGLATLDIVIVLVYLAGIFVLAQWVSREKAGHSKSAEDYFLASKSLPWWAIGASLIAANISAEQIIGMAGSGYAIGLAIASYEWMAALTLLIVGKFFLPIFLRNGIYTMPQFLEQRYGKWIRTLMAVFWLLLYVFVNLTSILWLGSIAVSQVTGMDQTLALTLIGVFALVYQLYGGLKAVALTDIVQVTLLVLGGLLVTGLTLSRIGDGAGVLAGFKQLWSAHPEHFHMILSKDNPFYKDLPGLSVLLGGLWVMNISYWGFNQYIIQRALAAKNIGEAQKGMVFAAFLKLLMPVVIVVPGIAAVVLAPDLAKPDQAYPTMMQLLPTGILGLVFAALVAAIVASLASKINSVATIFTLDFYAKFRPQTEQKQLVRVGRIVAAVSVLIGILTARPLLGNFDQGFQFIQEFTGFFTPGVVVIFMLGLFWKRANEAGALTAAIGSVVLSFALKILWPALPFMDRIGVVFVAALVLAVVVSLLTPATQARDLIRTKDVAYGTTLGFKIGAVGVVAILIALYAVFW

SEQ ID NO: 11941 - protein, 1193 aa, Aspergillus nidulans FGSC A4
MQGVGLEASKTSPPADESTSVQSSSGPADEATRLKELHADIRDQDALERDITRQADRLLMEQADERDNKRLDKTNQEKEKLESQILRLHQRLAQPIGTSARVRLQNDLAKLEERNTALANDLKEIQQRIDERHQEQEMNMEPSGTGRMPNESRRDYLIRTGKITPFSRMGTGSSAGPLASLQDALIDAEDERDELEALEQVKARSAVSHRNLVRPSFGFDETSESTAAEEQAHERPGKRRKLEKSTQSSKVSVKTEDTDLGMETLSDGPASEDQDDSASYIEDPEQEFSEDDEDFVTEEKPVRAKKAKSSDEVEDFSGLDDGNEKLYQSRLQNWVSRRSAARKRARQPRELDTNQVPDIGEADFRDSEDEEWFKPHPTQPDLHLDNGYRIPGDIHPLLFDYQKTGVQWMWELHQQQVGGIIGDEMGLGKTIQAIAFLAGLHYSKRLTKPIIVVCPATVMKQWVNEFHRWWPPFRVSILHTSGSGMVNIKSESSREDALMYGTYWSGGSSSGLKAARKVVKRVVEEGHVLVTTYSGLQSYASLLIPVEWGGTILDEGHKIRNPNTSITMHAKELRTPHRIILSGTPMQNNLTELWSLFDFVFPMRLGTLVNFRNQFEFPIRQGGYANASNLQVQTAAKCAETLKDAISPYLLQRFKIDVAADLPKKSEQVLFCRLTKPQRQAYEAFLGSEEMQSILRGRRQVLYGVDILRKICNHPDLQNHKLLYAKPNYGNPTKSGKMQVVRSLLELWKETGHKTLLFAQHRIMLDILEKFVKSLSGFNYRRMDGTTPIQHRQTMVDEFNKDPDLHVFLLTTKVGGLGVNLTGADRVIIYDPDWNPSTDVQARERAWRLGQKRDVTIYRLMTAGTIEEKIYHRQIFKQFLTNKILKDPKQRQTFQLSDLYDLFALGEEGQGPTETSKLFKEAEVTYEENRDKDAPKERDASYQRDVEAEKQDISKVTGVAAIEQFQGEPEQQAKQESGESGTNSESRLMEGIFARSGVHSALEHDQIVNGKRVVRADPKIIEAEAKRVAAEAAEQLRRAGEAAKSVPIGTPTWTGQFGVAGKPEESPMPMRGPFGGRSSTARRALAGPSSASIIANLSSRTPSSRSATNSPAPGNEPSGKDFITMIRDFITTHGGSVYTQNLIDHFNRYCTTPQKSAEFKEMLKQIAVLDKGGRNAFDLYSTPADFWTRDNSF

SEQ ID NO: 11942 - protein, 575 aa, Bacteroides fragilis YCH46
MSTKNSSRFTPVIIAISVVIGILIGTFYAKHFAGNRLGIINGSSNKLNALLRIVDDQYVDTVNMADLVEKAMPQILAELDPHSTYIPAQNLEEVTSELEGSFSGIGIQFTIQDDTIHVNSVIQGGPSEKVGLMAGDRIVMVDDSLFVGKKVTNERAMRTLKGPKGTQVKLGVKRATEKDLLNFTITRGDIPQNTIDAAYMLTDDFGYIQVSKFGRTTHVELLNAIALLNHKNCKGLIIDLRGNTGGYMEAAVRMVNEFLPEGKLIVYTEGRKYPRADEFANGTGSCQKMPVIVLIDEGSASASEIFTGAIQDNDRGMVVGRRSFGKGLVQQPIDFSDGSAIRLTIARYYTPSGRCIQRPYQNGKDRNYEMDWLTRYEHGEYFSKDSIKLDENLRYSTALGRPVYGGGGIMPDVFVPQDTTGVTSYLTEVLSKGLTIQFTFHYTDNNRDKLKKYEDEESLLNYLRRQGLVEQFIRYADSKGVKRRNILIQKSYKLLEKSIYGNIIYNMLGKEAYIQYLNQSDQTVKKAVELLESGEAFPKAPVSVEPQKEEKKDGKKKTTAQVDSTGEEEILRLYA

SEQ ID NO: 11943 - protein, 612 aa, Oceanobacillus iheyensis HTE831
MSKIIGIDLGTTNSCVSVMEGGEAVVIPNPEGNRTSPSVVAFKNGERQVGEVAKRQAITNPNTIQSIKRHMGTDYKVKIEEKEYTPQEVSAIILQYIKSYAEDYIGEKVEKAVITVPAYFNDAERQATKDAGKIAGLEVERIINEPTAAALAYGIDKEDQDQTILVYDLGGGTFDVSILDIGDGTFEVVSTAGDNRLGGDDFDQVIIDHMVQEFKKENAIDLSQDKMATQRLKDAAEKAKKDLSGVTQTQISLPFITAGDAGPLHLEMTMSRAKFDELSSDLVERTMQPTRKALSDASLSKSDIDKVILVGGSTRIPAVQEAIKKELGQDPSKGVNPDEVVALGAAIQGGVLQGDVKDVLLLDVTPLSLGIETMGAVTTKLIERNTTIPTSASQTFSTAADNQTAVDIHVLQGEREMASDNKTLGRFQLTDIPPAPRGMPQIEVSFDIDANGIVNVRAKDLGTNKEQSITIKSSSGLSDDEVDRMVKEAEENADADKQRREEVDLRNEADQLIFTTDKTIKDLDDKVSEEDKQKAESAKDELKQALESGDMEQVKAKKDALEEHVQQLSAKLYEQVQQEAQQASGEQGEESGNQDDDVVDADYSEVDDDDKK

SEQ ID NO: 11944 - protein, 809 aa, Solibacter usitatus Ellin6076
MAKQNPITPVVAGDARRHLPLLLLLFAGSGCSALIYEIVWYQLLQLVIGSSAVSLGVLLATFMGGLCLGSLLLPRLKAAGQHPLRVYGKIEFGIAVCGILVLFVMPLVDSVYTSAVGHGLPAILLRALVCALCLLPPTFLMGASLPAASRWLKATPEGVSWLGLLYGANTVGAVMGCLLAGFCLLRVFDMATATFIAAAINVTVGLVSFGLAKRSPEYPPASDSRVVIAPGAWPVYVTIALSGATAMAAEVVWTRLLGLMLGATVYTFSIILAVFLVGLAIGSTGGAMAARTAKSPKALLGWSQMLLAAAIAWTAYMLSESLPYWPVNPLLSTSPWYTFQIDLVRCIWAIFPAALLWGASFPLALAAAASEEGDPGRLVGGIYAANTGGAILGALGTSLILVPAIGTASSQSVLIALCAVSGLLMLVPLLKSMRISNALMVGAALVIAIMLAGSVSPVPGMLIAYGRRMMTSMGRSKVLFTGEGINSSIAITEWDDGAVQFHVSGKVEASTESYDMRLQRMLGHLPALMHKEPKSVLIVGFGAGVTAGSFVPYPSIQRIVICEMEPLIPPTATKYFGKQNYFVMNDPRTQVIYDDARHFVLTTREKFDIITSDPIHPWVKGSATLYSKEYFELVKQHLNPGGVITQWVPLYESDPETVKSEIATFFDAFPNGTIWGNDISGGGYDIVLLGQVDPAKIDLDAMQARLDRPEGARVQESLREVGFGNVVQLLATYAGQEPDLRPWLAGAQINRDGNLRLQYMAGLALNVSREGAIYSEMLGYRRWPDSLFTGSEDKRRALRYALDPRSVGQ

SEQ ID NO: 11945 - protein, 654 aa, Burkholderia thailandensis E264
MTKTSAGETCDSRVFIGGPRLFDSSCRQASSKLRAHSRGAAPRRPRPGTDAARASHHACMPAGIARTITVHPRSRVASRRPSRAHATLRTVVSSPFRSSMAIVFTVLILLLAVALSGIATRVLPLRLPLPLMQIAIGAALAWPKFNLHVTFDPEIFMLLFIPPLLFADGWRIPKRELYLQRRAILMLAFGLVFMTVLAVGYFAHWLIPGLPLPIAFALAAVLSPTDAVALAGIAGKGRIPPQLMHILEGEALMNDASGLVALKFAIAAALTGVFSLRDASISFVIVASGGLATGAALSWLFSALSTRFLNAAQEGDPAPGIVMTLLVPFASYLIAEHLGLSGILSAVASGMMMNYTSFSKSSTVAARVRAESTWAMIEFVFNGMVFIMLGLQLPHIIGRALVDAHHTSDALVGAMIGYVAAMLAALYAIRFAWVWLLRWIASRRAAKQGLAGTMAGLRTIAVMTVGGVRGAITLAGVLSVPVALGDGTPLAGRDTAIFVASGVILGSLVVAVIALPLLLRGVRPMRNPHAEEERAARAAAAQAAIRAVDAAHDALAVDLDETAAARCADVTARVMDLYRRRLAGLAADGATPREEARQTEKIELALKIAAIRAERAVLYRLRGEQKINDETLAKLMREIDLSETALSTRKKGIV

SEQ ID NO: 11946 - protein, 293 aa, Oryza sativa
  misc_feature (31)..(31): Xaa can be any naturally occurring amino acid
RGVRAECTRTHLFCVPPVIIALAKHGKAGKXDLSSLKFIGSGAAPLGKDVMEVVAKKFPDSEIVQAYGMTETCGIISLEYPEKGQAREFGSTGTLVSGVEAKIVDIKTLKHLPPNQVGEICVRGPNVMQGYFNNVQATEFTIKQGWLHTGDLGYFDGGGQLFVVDRLKELIKYKGFQIAPAELEGLLLSHPEILDAVVIPFPDAKAGEVPIAYVVRSTDSSLTQADVQKLSKTTWRPTPSENNSFVAASPLASAPSCKRYSQSTPVDKNRSLDHGILAFPSNCPRSLSHTIFI

SEQ ID NO: 11947 - protein, 682 aa, Escherichia coli CFT073
MNMFFRLTALAGLLAIAGQTFAVEDITRADQIPVLKEETQHATVSERVTSRFTRSHYRQFDLDQAFSAKIFDRYLNLLDYSHNVLLASDVEQFAKKKTELGDELRSGKLDVFYDLYNLAQKRRFERYQYALSVLEKPMDFTGNDTYNLDRSKAPWPKNEAELNALWDSKVKFDELSLKLTGKTDKEIRETLTRRYKFAIRRLAQTNSEDVFSLAMTAFAREIDPHTNYLSPRNTEQFNTEMSLSLEGIGAVLQMDDDYTVINSMVAGGPAAKSKAISVGDKIVGVGQTGKPMVDVIGWRLDDVVALIKGPKGSKVRLEILPAGKGTKTRTVTLTRERIRLEDRAVKMSVKTVGKEKVGVLDIPGFYVGLTDDVKVQLQKLEKQNVSSVIIDLRSNGGGALTEAVSLSGLFIPSGPIVQVRDNNGKVREDSDTDGQVFYKGPLVVLVDRFSASASEIFAAAMQDYGRALVVGEPTFGKGTVQQYRSLNRIYDQMLRPEWPALGSVQYTIQKFYRVNGGSTQRKGVTPDIIMPTGNEETETGEKFEDNALPWDSIDAATYVKSGDLTAFEPELLKEHNARIAKDPEFQNIMKDIARFNAMKDKRNIVSLNYAVREKENNEDDATRLARLNERFKREGKPELKKLDDLPKDYQEPDPYLDETVNIALDLAKLEKARPAEQPAPVK

SEQ ID NO: 11948 - protein, 428 aa, Clostridium perfringens str. 13
MSRNKDEKNKYNNIIKNLKKKKGFRALAMGVALTLIIGVSVYAGNRLTAFGILPITSVSAVQSSLEKVNDTENFKKVLEVREMLYRWYDGEIDDSKLAEGAIKGMVSSLGDQYTYYMNEKEFSDFKEKSQGNYMGIGIQVAVKDGKIVVISPIQGGPAEKAGIKTGDIILKVNGEPVSGNELDKAVSMMKGTTKENIKLTLYREGKGEFDVDVMRDVIKTFNVKSEMIDGDIGYIEVLAFDEGTAKDFETQLKALEEKGMKGLILDLRGNPGGFMKECVDLVSNFVPKDKVIVSTIDKYGNKEESVSKGGIAQGMPLVVLIDGGTASASEIVAGAIRDYDLGTLVGTTSFGKGIVQVVLDKIGQEKDGTALKVTISKYYTPNGENIHKKGIGPDVTIEYPKELKEKTYSRSTDPQFEKALEIIQEKIK

SEQ ID NO: 11949 - protein, 191 aa, Zea mays
MGFSEAQEELVLRSWKAMKSDSESTALKFFLRIFEIAPGAKQMFSFLRDAGDAPLEKHPKLKAHAVTVFVMACESATQLRSTGDVKVREATLKRLGATHARAGVADAHFEVVKTALLDTIRDAVPDMWTPEMKAAWEEAYDQLAAVIKEEMKNAAAAEEQTKNAATAAEETTNAAAAEEETTNAAAAVDAS

SEQ ID NO: 11950 - protein, 551 aa, Limonium gmelinii
MALSSILPKMNMLSTSDHASVFSMNLFVALLCACIVIGHLLEETQWMNESITALLIGLCTGVFILLFSGGKSSHLLVFSEELFFIYLLPPILFNAGFQVKKKQFFRNFITIMMFGAVGTLVSCTIISLGAMEFLKKLDIGTLDLNDYLAIGAIFAATDSVCTLQILNQDETPLLYSLVFGEGVVNDATSVVLFNAIQSFDLTRFDHRIGFKFLGNFMYLFAASTLLGAAAGLLSAYIIKKLYFGRHSTDREVALMMLMAYLSYMLAELFYLSGILTVFFCGIVMSHYTWHNVTESSRVTTKHAFATLSFVAETFIFLYVGMDALDIEKWRSVSDSPGTSVAVSSILMGLVMVGRAAFVFPLSFLTNLFKKSSSEKVTLNQQVVIWWAGLMRGAVSMALAYNQFTRSGHTHLRANAIMITSTITVVLFSTVVFGILTKPLIRFLLPPPKHFLSSSTISTDLGSPKTSLQMPLMDGRRDSEGIFGSSQDFSGQINAPGSLRMLLNAPTHTVHRYWRKFDDAFMRPVFGGRGFVPFVPGSPTERSMNNLTERVS

SEQ ID NO: 11951 - protein, 473 aa, Prochlorococcus marinus str. NATL2A
MSKTSQDVLRQIKDEGIELIDLKFTDLHGKWQHLTVASDLIEESSFTEGLAFDGSSIRGWKAINESDMAMVPDPSTSWIDPFYHHKTLSLICSIQEPRSGEPYARCPRALAQKALDYLGSTSVADAAFFGPEPEFFIFDDVRYNSGEGSSFYSVDTIEAPWNSGRVEEGGNLGYKIQLKEGYFPVSPNDTAQDMRSEMLLLMGELGIPIEKHHHEVAGAGQHELGMKFAPLINAADNVMIYKYIVRNVAKKYGKTATFMPKPVFNDNGTGMHVHQSLWKGGQPLFYGEGTYANLSQTAKWYIGGILKHAPSFLAFTNPTTNSYKRLVPGFEAPVNLVYSQGNRSAAVRIPLTGPSPKAKRLEFRSGDALANPYIAFSAMMMAGIDGIKNQIDPGDGVDVDLFELPSEELSKIDTVPSSLNDALEALKNDSQYLTEGGVFTEDFINNWIELKYEEVQQLRQRPHPHEFTVYYDA

SEQ ID NO: 11952 - protein, 68 aa, Physcomitrella patens subsp. patens
MTTSKRLADKKSAKFQKNVHRRGSVPETTIKKKNQYPVGPMVLGLFVFVVIGSSLIQILRTATTGAMA

SEQ ID NO: 11953 - protein, 531 aa, Tropheryma whipplei str. Twist
MDNCRFIHCPWYWFILCGLAIFVTLQGKPYRLSDLIKQTGVRLTDCSNQFSDRFVSGITQIAQSVERDDIFVAFQGKTRHGVEFLDQVQSCAAVLTDNKGRHIMQSDCLPTRSTPILVTDSPRSDLIVLAKRVYPIDDIRIFGITGTNGKTSTMHIAAKLLEMMGISCGISTTIGSSASESDSCLTTPELCQLYARIFTAKQARADFFALEASSHAINRGRLGDIVLEVAAFTNLTPEHMEEHKNMEAYYQAKKALFLNKRSNSAVINIDTPYGIRLFKETGCSASVISENTKYGLDHKLFWQASVRRVGLSFGFTLISPSGYRVESSISLLGKAFALNTCMAIVILCNLGIDIERIDSVLRKAGGLKMVLPGRMEVFQTGNSPRVIVDHGHTVDAVETALVAAKSITRGRLITIINADGQRDPSKRKHLGQLCGAYSDKLFITDGHSRFENPAEIRRMILDGVEGPRRQVEQIPSMTQAVLAAIDIARSDDTVLCSGFGDDPYLDVLGKKIPYSLRDEVRRGLERFAQGT

SEQ ID NO: 11954 - protein, 682 aa, Gibberella zeae PH-1
MARSRSSMALGLGLLCWIALLFSPLAFVQTVQADDVDSYGTVIGIDLGTTYSCVGVMQKGKVEILVNDQGNRITPSYVAFTEDERLVGDAAKNQAAANPTNTIYDIKRLIGRKYSEKTLQGDIKHFPFKVVNRDDRPVVQVEVDGAKKQFTPEEISAMVLGKMKEVAEGYLGKKVTHAVVTVPAYFNDNQRQATKDAGIIAGLNVLRIVNEPTAAAIAYGLDKNDGERQIIVYDLGGGTFDVSLLSIDDGIFEVLATAGDTHLGGEDFDQRVINYFAKQYNQKNNVDITKDLKAMGKLKREAEKAKRTLSSQKSTRIEIEAFHAGKDFSETLTQAKFEELNIDLFKKTMKPVEQVLKDAKLKKSEIDDIVLVGGSTRIPKVQQLIEDFFNKKASKGINPDEAVAFGAAVQAGVLSGEEGTSGVVLMDVNPLTLGIETTGGVMTKLIPRNTAIPTRKSQIFSTAADNQPVVLIQVFEGERSLTKDNNILGKFELTGIPPAPRGVPQIEVSFELDANGILKVSAHDKGTGKQESITITNDKGRLTPEEIERMVAEAEKYAEEDKATRERIEARNGLENYAFSLKNQVNDEEGLGGKIDEEDKETVSSHTTLNNKSKTHANKSQLLDAVKETNEWLDEHGADATAEDFEEQKEKLSNVAYPITSKMYQGAGGAGGEQDDNIHDEL

SEQ ID NO: 11955 - protein, 69 aa, Zea mays
LMVHKFATAAAGFKTGNAADARTPTLLQAAATVTLTITIKNTNNFKFHITALTRSQYLSASWHLLRSLF

SEQ ID NO: 11956 - protein, 1151 aa, Limonium gmelinii
MAAVNGLPLPFRLTLEETSSSEAAALESESSPTDAVLFVGVSLVLGIACRHLLRGTRVPYTVALLILGIALGSLEYGTKHGVGRLGDGIRIWENINPDLLLAVFLPALLFESSFSMEIHQIKRCIWQMVLLAGPGVLLSTFCLGAALKVSFPYDWNWTTSLLLGRLLSATDPVAVVALLKELGASKKLSTIIEGESLMNDGTAIVIYQLFFQMVLGKSFGWAEVLKFLVQVALGAVAVGIAFGIASVVWIRCIFNDTVIEITLTLAVSYIAYFTAQEEAGVSGVLTVMTLGMFYAAAARTAFKGEGLQSLHHFWEMVAYIANTLIFILSGCLIAEGVLSNGNLFKNSGGVSWGYLVLLYVYVQVSRTVVVGALFPLLQYFGYGFNWKEAIILIWSGLRGAVALSLSLSVKRSSGGSSTISSETGTLFLFFTGGIVFLTLIVNGSTVQFVLRLLGMNKLSAAKRRILEFTKYEMHKKALEAFGDPGEDEDLGPADWPTVKKYLKCLDNVEGERLQLHDAAEPGDTLDPMSLADIRVRLLSGVQAAYWDMLDEGRITQSTANILMQSVDEALDSVTHEPLCDWRGLKSQVHFPNYYKLVQMSIPCKLVTYFTVERLETACYICAAFLRAHRTARQQLIDFIGDSEYAAIVILESEAEAEEARNFLEDVRETFPQVLRAVKTRQVIHAVLTHLIEYVIDLEKSGILEEKEMLHLHDAVQTDLRRVLRNPPMVKVPKIGEMISTHPLLGALPDTARDVLVGSTKEIVKPRGMSLYKEGSKPSGIWLISNGNVKWSSKNIRSKHALHPTFTHGSTLGLYEVLTSKPYICDMITESVVFCFYIETEKIQGVLSAYPAVEDFLWKESIIVLSKILTPRVFEKIPVHDLRLLISERSTITTFLRGETIEAQPHSVCILLEGFVKSHGHELLITPPAALIPPNPDLILRSQEGAGIKAGSNCYIGTLYHVESRAKVMVLDMASLEIDKALKRRQSSIILQKRDSATSINPREHSGLLSWPDHRFEAPAKQDGDAEELDYETNNLSARARQLSMFGSMVGVPRRAQSFKRGMSELSSHSLSFPRVPSTHDQRGLTTVRSEGSTTLGKMSSEGDSKRSTLPTIAHSGKPSLVLDLPSDGSGGEEDVIVRIDSPSGLTFRQAP

SEQ ID NO: 11957 - protein, 476 aa, Haemophilus ducreyi 35000HP
MSVNRVLDLIKENDIKFVMLKFTDIKGKEHGVSLPVSLVVDDLEALFEEGKMFDGSSVEGWKAINKADMLLMPISETAVVDPFAQIPTMTIRCSIYEPNTMQPYDRDPRSIATRAENFLKSTGIADSVMFGPEPEFFLFDDVRYATEANNVSYKIDDIEAMWNTNRKYEDGNNAYRPLKKGGYCAVAPLDSAHDIRSEMCLIMEQMGLIIEAHHHEVATAGQNEIATKFNSLTLKADETQIYKYVVQNVAIAHAKTACFMPKPFAGDNGSGMHCNMSLSKAGKNIFMGDKYAGLSETALYYIGGIIKHAKALNAFTNPTTNSYKRLVPGFEAPVLLAYSASNRSASIRIPAVTTPKATRIEARFPDPMANPYLCFAALLMAGLDGIINKIHPGDAMDKNLYDLPPEELQDIPAVASSLAEALDALSTDFTFLTQGNVFSKAFIDAYIAIRRKEVERLNMTPHPVEFEMYYAYSGLK

SEQ ID NO: 11958 - protein, 528 aa, Lactobacillus plantarum WCFS1
MMVSSFILVLAAVVSIFISRVMPQISVNYLSLIVGIGLFFIPVLSNHIENFNSEIFIGLIVAPLLFFEGQATRLNAVGKELKHIIQTTVGLVILALIVAGFSLAGLGLVGLPLAFILAAISTPTDATAMESVTNGLEMPSTEGTFLKMESLFNDASGIILLNMAVLWYANGYINYGQTIIDFIISAVGGVLFGFVSAWIMVLFRQVLLRSSYNSLNASLLMYVITPFILYYAAEAIHVSGIITVVVAGLVHNAEAQRSRLINAQQVHFAFDLVSMITEIFNSMVFVVLGFMFIKILVNEQFGHGSLNFLLIGLVLYISNVLVRYSYGRLRLSFKNRPAWIFALGGVHGAVTLALAYTLTDTAVGRGDFNLVLMAASTLIILSMVVPTIIFRWLLKPALTDDEATSEIDQIRVAMVHHAIDTVQKMYLPPNVKESVIFDLMTQKQRTRTRDFARAWVDVVRRPEFTGAEKELEMRAFMNALEQERQYLDMISQREVKYQKYVFKLYNETLLAESLVIGPTIFDKDKATE

SEQ ID NO: 11959 - protein, 502 aa, Rhodococcus sp. RHA1
MVHWKRERRLPAVHSAEAAARDGAPPRLLGGTLRVRRGSGDGYQPGLSSRPGRRRVRGAAGAAPARDRVRGRGRGARCCRDAQRPRVGRAADDRGGRSASCSRSVGSVGVRQSVRGTRRLRCDGDEREDQHRVSPGRGIACGGCRHRHDDGDRRPGTERVTHRDPDNSGGVELQQTLAAFAEHRIGAVAMEVSSHGLALHRIDGTSFRVGVFTNLARDHLDFHPDMDAYFAAKARLFEPGRCAAAAVGVDDEFGRRLAATVTVPRVTFSSRTTAADFHASAVHADEGGTSFTLHGAGARKPVRLRLLGVHQVDNALAAIAAIAVRGVDLDSAVAGIESPDTVPGRLEAVDAGQPFLAFVDYMHNPAGQRRLFPYLRSLTRGRVIAVVGATGERDPGKRVPLGATAARFADTVIVTDESPCSDDAQRLREDVARGARSGGDAEVLVVPDRAEAIVAAVTLAAPGDVVVVAGRGHDRVQAYGPRRRVFDDRIALHEALLRLVAR

SEQ ID NO: 11960 - protein, 1177 aa, Vitis vinifera
MALWNLSKLITLDPLDYGIVQIPPKLQKYVAITSLIGPFTWNGGVNNQTFSRLDRFLFNEGWENHFGDVRQCVLPRPVSDHFPILLDVGGGRRGPSPFRFENMWLKMEGVKELMKSWWEGVSFNGSTSFILAEKIKVLKVKLKEWNRDSFGRIELRKNAALEQVQFWDAREKISRLNLEELEARKEAREDYKKWVLLEEISWRQKSREVWLKEGDRNTGYFHKMVNAHRRRNNVDRIKINGAWCIEENEIREGIGNAFKVLLSSSGDWRPSISGLQLGTLDQLDANTLESPFTEEEVFNALLSCNGYKAPGPDGLSMAFWQFAWDFVKADVLCFFKEFYENGKFVKSLNATFLVLIPKKVGAEDLGDFRPISLVGSLYKWLAKVLANRLKKVVGKVISKAQGAFVEGRQILDAVLIANEAIDSTLKNNESAILCKLDIEKAYDNVDWTFILTVMQKMGFGEKWIQVDKMVHIHCKFFCVGQWNPYRIFPKLKGIEIGVKGRSEEGALISHLLFVDDTLVFCKPSQDHLTHLSWLLMWFEAASGLRINLDKSELIPVGRVENMDDLAWEFGCKVGSLPSTYLGMPLGASFKSTSVWDGVEDRFRKRLGMWKRQYLSKGGRTTLIRSTLSNLPIYLMSLLCLPSVVRRRLEKIQRDFLWGGVVCLSKKKGGLGVKNLSILNKALLAKWNWRFANEREALWNQVIRGKYGEERGGWSSREVREAHGLGLWKGIRMNWELVSNRLVFIVGNGRRVRFWRDKWCGDSPLCSSFPSLFALTDDKEESVANVWDSLAEGGWGGWNPCFVRAFNDWEVEEASSFMERLHRSRVIEDVEDRVSWTETKSGKFSVKSLYLAIEAGGSARFPSSLIWNANVQPKISFFAWEATWGKALTLDKVQKRGWALANRCFLCLENEETIDHLLLHCSRTKVLWDLLFTIFGVSWVLPCSVKETLLSWNGSFVGKKRKKVCMLGLFVLLAFSCWRVYRLDGRTEGSERQKLVERFNDPLNKRVKCTLISTRAGSLGINLHSANRVIIVDGSWNPTYDLQAIYRAWRYGQTKPVFAYRLMAHGTMEEKIYKRQVTKEGLAARVVDRQQVHRTISKEEMLHLFDFGDDENPDILPERGKEEEHTTNQNMTGQVGNSLKDKLSLSHGSCSSDKLMESLLVRHYPRYILLTLTFVDVD

SEQ ID NO: 11961 - protein, 745 aa, Clostridium thermocellum ATCC 27405
MKKRLLLFILVLGVCLFTSCGNFVKTNIYFSAAESAFDSGKYEDAIKYYDKVIEADSGNAMAYLGKGLALDALGKYEEALEFFDKAIEINKDLAKAYNAKGTTLASLERYEESLENFKKAAELKPKNSAYQNDVAYGLNNLGRFEEAIQYAEKALKLNPRSGVAYSNKGFALDALGKLDEAIECYDKAIELSPTYTNAYYNKSIAVFKMGKTEEAIELLDKVLEIDPDDLDAITSKGYCLNELGKYEKAIECFDTAIEKYPKDPYPYVCKATSLYYLGKYDNALEECNKAIKLEYTFPDSYIWKAKILVEKGDIEEARKSCDEFLAIAEDASVYDMKGQIYLHEYNYPEAIKLFDKAIEVDPSYEDSYINKIYCLYLQKNYKECIEFATKVQTIFPNSADIPWYIGDCYSIMMEPEKAIEYLKKAHELNPKDVGILTSIAWEYYSLEDYAKASEYAEKAAEISADDESVKYIREKLENQKLPEAEQIVEFVKNNYLYYDKIANFEALANEFKAKGEVGVKDICNFIESIRQKDDMFTFVIHGDDYDLLKYEESISQVTSQQLEPNIHYIKIKSFTASVSWEFKEIIDSIENPEEKVLVIDLRDNLGGLATSSADILDYLLPACTTSYIVYRDGYMYSYYSDAAQTKFKKILVLVNEYSASSSEILALGLKKHLNNVVIIGRPTVGKGVGQLVYENKSKKYMIYLVSFYWNVMEENILGKRIEPDVYVNSSSDAAYMNEVKRQAAR

SEQ ID NO: 11962 - protein, 547 aa, Flavobacteria bacterium BBFL7
MKGTINIKRQILLPILGASIFFTTASFQNDFFEIAKQIEIFTEMYKQLNMNYVDETNPADLMDNAIEGMLSELDPYTKYWTEQEVEKSIINRRGAYTGIGAVVSTRDDKVIIVEPWKDHPADVAGLKAGDEIIEIDGIKLADYKENAGDLLKGSADTEISIVYKRQGKEKSAKVKRQAVEVNAVPFYEMATPEIGYVVLSKFNEKASRETKAAIVALKEKGATKIILDLRGNPGGLLSEAVAVSNLFIEKDKLITSTQSVVEQYNKTYLTKRPAYDPDIPVAVLINGRSASASEIVSGSIQDYDRGVVIGARSFGKGLVQRPKPLSYGTQVKITISRYYTPSGRCIQALDYWNRDEDGNAVRTKKEDYNAFKTVNSGRTVYDGGGVQPDIELASAAYSPITTALLKDNAIFDYATVYYYNHQVADMDSFRFTDTDFNDFVNWVERKGFDFNTETESAFAKAFKTAEKEELDDDINSSYKAMQEAINNAKKKDMKDKKAEIMSLLTDEIVKRYFYRDGLYNYQLKFNPEILEAVNVLEDQNKYNRILK

SEQ ID NO: 11963 - protein, 453 aa, Prochlorococcus marinus str. MIT 9303
MPISRSLRSLGRQRSSWLLLLGAGGAATAIALASPSLGLPSSSSSAMSDSPKEVIDQVWQIVYRDYLDSTGQYNPEDWKGLRKDLLAKNYSATSESYEAIRGMLASLDDPYTRFLDPKEFKEMQIDTSGELTGVGIQLSLDKDTKELVVVSPIEGTPASKAGVQPKDVIVFINGQSTKGMSTADAVKLIRGKEGSEVTLGLRRKGDVIQVPLIRARIEIQAVDIQLNTTVDGTKIGYIRLKQFNAHAAKGMRSAIKNLEKDGVQGYVLDLRSNPGGLLEASVDIARQWLDEGTIVRTKTRDGIQDVRRANGSALTKLPVVVLVNEGSASASEILSGALQDNDRGVLVGQKTFGKGLVQSVRGLSDGSGLTVTIAKYLTPSGTDIHKNGIKPDIKAVMSEKEINNLKLEDLGSGKDSQYKVAETTLIKALKKVLDGPSYKPVGINLPQAIPSTL

SEQ ID NO: 11964 - protein, 229 aa, Brassica napus
TGKTLARNLARHNSSPAGLFSSIDVETAYAAVMKNMGGFGVMNMSNNSTEASSLTPRSKLPPPSMGSIPEVDDVKPVFSSRLPPRTLSGGFNQGSASSKRMAIARTQSGGLDQYKTKDEDSSASRRPPLAHHMSLPKSLSDIEQLLSDSIPCKIRAKRGCATHPRSIAERVRRTKISERMRKLQDLVPNMDTQTNTADMLDLAVQYIKDLQEQVKGLEGRPTRPRCSCA

SEQ ID NO: 11965 - protein, 846 aa, Coccidioides immitis RS
MAVDNVLGTVQNHTSLEKLTKPFKCPGSATRSRASDKPLRKRRKVDYTEAGGNGKDGDEQAWISEERTPLSNRDVNKFPIYKVKDKEIAFKQRFSIPLIDKNSTSYDPGRPAPLLGMRRGATFVVKPLHDPSGEFAIVLYDPTVDEKPEFKPETEQKQNEEAAKPKLNEPLVHKSLAEILGIKKNVEERPKVPVVIDPRLAKVLRPHQVEGVKFLYRCTTGLIDPNANGCIMADEMGLGKTSPEAGKPTVQKVVIACPATLVGNWANELVKWLGKDAVNPFVIDGKASKAELTSQLRQWAIASGRQVVRPVLIVSYETLRLNVGELKETPIGLLLCDEGHRLKNGESQTFTALNGLNVARRVLLSGTPIQNDLSEYYSLLNFTNPGVLGSRSEFHKRFEMPILRGRDADGTEEERKKGDECLAELLGIVNKFIIRRSNDILSKYLPVKYEHVVFCNLAPFQMDLYNHFIQSPDIKSLLRGKGSQPLKAIGILKKLCNHPDLLNLSADLPGSEQFFPDDYVPPEGRGRDRDVKSWYSGKMMVLDRMLARIRQDTNDKIVLISNYTQTLDLFEKLCRSRGYGSLRLDGTMTVKKRQKLVDRFNDPDGEEFVFLLSSKAGGCGINLVGANRLVLFDPDWNPAADQQALARVWRDGQKKDCFVYRFIATGSIEEKIFQRQSHKQLLSSCVVDSAEDVERHFSLDSLRELFQFKPGTTSDTHDTFKCRRCRPDGTQFIKAPAMLYGDTSSWNHLVNNGDKGPMSKIQDLLLRQETSEKDLSYSGYVTPPKHANLVGAPESFFCSAFDSNRPQEAARPHHHLDRSSHEGLMPKCSIGIRPAPEGPRQTSRRS

SEQ ID NO: 11966 - protein, 1070 aa, Synechococcus sp. WH 7803
MSLLHATWLPAIRTPSSSGRAALLVWADTWRVAEPLGPGATPALHPFTLSAEDLRAWLTERDLLPDGIIDATACLTLPSRSVKPRRPRGSAAATPQIEEQPPWCGLPLQAGEPIPKTTEWWPWQVQGLAIEPMAATAWLAKLPLSGHHPDLADELRWWSHMQRWALSLVARGRWLPQVELSRGEGYPHRARWVPLLNREDDRRRLEDLAARLPLVATCALPWREPTGKRSNRITRLRPEAMRAANPVACCRPRSGRLRVATLLEDLVDAQLRKGFHPDDEGLDPLLCAWENALSSDTGVIDLNDEDAERLATASHHWREGVAGNVAAARACLELATPNEGEELWDLRFYLQAEADPTLKVPAGAAWAAGPGGLQLGEIPVEHPGEVLLEGMGRALTVFAPIERGLESATPEAMQLTPAEAFVLVRTAARQLRDVGVGVDLPPSLSGGLASRLGLAIKAELPERSRGFTLGENLDWSWELMIGGVTLTLRELERLAGKRSPLVRHKGAWIELRPNDLKNAERFCAANPDLSLDDALRLTASEGDTLMRLPVHAFDAGPRLQGVLEQYHQQKAPDPLPAPEGFCGQLRPYQERGLGWLAFLHRFDQGACLADDMGLGKTIQLLAFLQHLKMEKELKRPVLLVAPTSVLTNWKREAAAFTPELTVLEHYGPKRPSTPAALKKALKDVDLVLTSYGLLQRDSELLESFDWLGTVIDEAQAIKNPSAKQSQAARDLARTRKGSRFRIALTGTPVENRVSELWALMDFLNPSVLGEEEFFRQRYRMPIERYGDMSSLRDLKSRVGPFILRRLKTDKAIISDLPEKVELSEWVGLSKEQKSLYAKTVEDTLDAIARAPRGKRHGQVLGLLTRLKQICNHPALALKEEVASDDFLQRSVKLQRLEEILDEVIEAGDRALLFTQFAEWGHLLQGYLQRRWRSEVPFLSGSTSKGERQAMVDRFQEDPRGPQLFLLSLKAGGVGLNLTRASHVFHIDRWWNPAVENQATDRAYRIGQTNRVMVHKFITSGSVEEKIDRMIREKSRLAEDIVGSGEEWLGGLDMGQLKELVSLETNETRNP

SEQ ID NO: 11967 - protein, 638 aa, Bacteroides thetaiotaomicron VPI-5482
MGKIIGIDLGTTNSCVAVFEGNEPVVIANSEGKRTTPSVVAFVDGGERKVGDPAKRQAITNPTRTIFSIKRFMGENWDQVQKEVTRVPYKVVKGDNNTPRVDIDGRLYTPQEISAMILQKMKKTAEDYLGQEVTEAVITVPAYFSDSQRQATKEAGQIAGLEVKRIVNEPTAAALAYGLDKAHKDMKIAVFDLGGGTFDISILEFGGGVFEVLSTNGDTHLGGDDFDQVIINWLVQEFKNDEGADLTQDPMALQRLKEAAEKAKIELSSSTSTEINLPYIMPVNGVPKHLVKTLTRAKFESLAHGLIQACLEPCKKAMSDAGLSNSDIDEVILVGGSSRIPAVQKLVEDFFGKTPSKGVNPDEVVAVGAAVQGAVLTDEIKGVVLLDVTPLSMGIETLGGVMTKLIDANTTIPARKSETFSTAADNQSEVTIHVLQGERPMAAQNKSIGQFNLSGIAPARRGVPQIEVTFDIDANGILKVSAKDKATGKEQAIRIEASSGLSKEEIEKMKAEAEANAEADKKEREKIDKLNQADSVIFQTENQLKELGDKLPADKKAPIEAALQKLKDAHKSQDLAAIDTAMAEINTVFQTASAEMYAQGGAQGGAQAGPDMDAGQNAGQDNSKHGDNVQDADFEEVK

SEQ ID NO: 11968 - protein, 1187 aa, Arabidopsis thaliana
MEEDEDQFLLSSLGVTSANPEDLEQKILDEATKKPDNDEGGSVEEKSTQLEGTNLLSSSQNELLNKLRAVKFEIDAVASTVENVDEIAAEKGLKKDDESDLQGLHSGSALQHALATDRLRSLKKRKIQLEKELTGLHGQSASSSADHGNLLRDLVKEKPSLKRKLKEIRKPSRRDGKKVKVVSFREDTDFDAVFDGASAGFVETERDELVRKGILTPFHKLDGFERRLQQPGPSNSRNLPEGDDENEDSSIIDRAVQSMSLAAKARPTTKLLDAEDLPKLEPPTAPFRRLRKLYKTPNSPDNEAKKRKAGKKSKKTRPLPEKKWRKRISREDSSLQGSGDGRRILTTSSCEEEELDDFDDADDNERSSVQLEGGLNIPECIFRKLFDYQRVGVQWLWELHCQRAGGIIGDEMGLGKTIQVLSFLGSLHFSKMYKPSIIICPVTLLRQWRREAQKWYPDFHVEILHDSAQDSGHGKGQGKASESDYDSESSVDSDHEPKSKNTKKWDSLLNRVLNSESGLLITTYEQLRLQGEKLLNIEWGYAVLDEGHRIRNPNSDITLVCKQLQTVHRIIMTGAPIQNKLTELWSLFDFVFPGKLGVLPVFEAEFSVPITVGGYANASPLQVSTAYRCAVVLRDLIMPYLLRRMKADVNAHLTKKTEHVLFCSLTVEQRSTYRAFLASSEVEQIFDGNRNSLYGIDVMRKICNHPDLLEREHSHQNPDYGNPERSGKMKVVAEVLKVWKQQGHRVLLFSQTQQMLDILESFLVANEYSYRRMDGLTPVKQRMALIDEFNNSEDMFVFVLTTKVGGLGTNLTGANRVIIFDPDWNPSNDMQARERAWRIGQKKDVTVYRLITRGTIEEKVYHRQIYKHFLTNKILKNPQQRRFFKARDMKDLFILKDDGDSNASTETSNIFSQLAEEINIVGVQSDKKPESDTQLALHKTAEGSSEQTDVEMTDKTGEAMDEETNILKSLFDAHGIHSAVNHDAIMNANDEEEKMRLEHQASQVAQRAAEALRQSRMLRSRESISVPTWTGRSGCAGAPSSVRRRFGSTVNSRLTQTGDKPSAIKNGISAGLSSGKAPSSAELLNRIRGSREQAIGVGLEQPQSSFPSSSGSSSRVGSLQPEVLIRKICSFVQQKGGSADTTSIVNHFRDIVSFNDKQLFKNLLKEIATLEKDQNRSFWVLKSEYKD

SEQ ID NO: 11969 - protein, 485 aa, Bacteroides fragilis YCH46
MKLKEILTSIQPVKITGNQDIEITGVDIDSRQVESGHLFMAMHGTQTDGHAYIPAAVEKGATAILCEELPVELAEGVTYIQVADSEDAVGKAATTFYGNPSSKLELVGVTGTNGKTTIATLLYNTFRYFGYKVGLISTVCNYIDDEAIPTEHTTPDPITLNRLLGRMADEGCKYVFMEVSSHSIAQKRISGLKFAGGIFTNLTRDHLDYHKTVENYLKAKKKFFDDMPKNSFSLTNLDDKNGLVMTQNTKSKVYTYSLRSLSDFKGRVLESHFEGMLLDFNNHELAVQFIGKFNASNLLAVFGAAVLLGKKEEDVLVALSTLHPVAGRFDAIRSPQGYTAIVDYAHTPDALVNVLNAIHGVLEGKGKVITVVGAGGNRDKGKRPIMAKEAARASDRVIITSDNPRFEEPQDIINDMLAGLDTEDKKKTLSIADRKEAIRTACMLAEKGDVILVAGKGHENYQDIKGVKHHFDDKEVLKEIFSLTV

SEQ ID NO: 11970 - protein, 165 aa, Mycobacterium sp. MCS
MTESYLLDIELNTLDGTSTSLRELADGAVLVVNVASKCGLTPQYSALEKLAQDYGDRGLTVIGVPCNQFMGQEPGTAEEIQTFCSTTYGVTFPLLAKTDVNGADRHPLYAELTQTPDAGGEAGDVQWNFEKFLLAPGGEVVNRFRPRTEPDAPEVISAIEAVLPK

SEQ ID NO: 11971 - protein, 866 aa, Aspergillus nidulans FGSC A4
METETGNDGQSEAVENEEDMDVKTKALMHLLNTSEVFVAIMAEKMKKQQEEARLEAAKKQEQQQKEQQADTSEESRKASAQPTERRGTRASTRQAAAAEATDNNEKKEEPAKSKRGRGRKAPAKGNTISNYFKKADLNVDEAKNTTVQEALEHAADEFEAKPTVLGEQELVATQQPAPVTGGKMRKYQLEGLEWLKSLWMNGLCGILADEMGLGKTVQAISLIAFFKEHNVSGPFLISAPLSTVSNWVDEFARWTPGIKTVLYHGTRDERAQLRKKFMNLRDQKSPDFPVVCTSYEICMNDRKFLAQYQWRYIIVVSLHYVSRFGLLTVAQDEGHRLKNMNCRLIKELLSYNSANRLLITGTPLQNNITELWSLLHFLLPEIFNDLNSFQNWFDFSSVLDNNGQTDMIERRKRTLVSTMHSILKPFLLRRVKTDVESALPKKREYILYAPLTLEQKDLYREILNGTGRQYLEEKATERLMAKNGMISRPRSLKRSASSSVVSTPNKSVRSSRDSTPGSRASSTRRRKAPQTYKDISDREFNSKLRKLEQGLEEDLDIEESIDESEQEEIERANTIKLAKREIAQKKMQNPVMQARLACNSPHNFYWPWAEDPSSIDETLVTASGKMLLLDRLIPCLLNKGHKILIFSQFKTQLDILQDWATHLRSWNCCRIDGAISQADRQAQIKAFNTDKDYKIFLLSTRAGGQGINLVAADTVILFDSDWNPQQDLQAQDRAHRIGQTKPVIVYRLATKGTVEQTLLEKADSKRRLERLVIQKGKFKSLLSESTMSRDDVDELKRALGEDEFERFEASADPASILSDEDLRVLTDRSEEAYALAEKGLDVDGKAFKAVETKRDGDNLMDQLKRK

SEQ ID NO: 11972 - protein, 1240 aa, Coprinopsis cinerea okayama7#130
MFLTTGARALRRFASGSSSVARSRTWTSVTTAKDGLKVHSLNDTVFPYVWLRDSCQGPESVHPSNRQKLHRSSDIPLDIKPVEVKEGESFAAGRPSAGVKVAEEGIEIRWVDGRTSFFHRDFLKTHASTSALYASHLVEYTSPTPWTLETVTKTPSLFVPYESLQETRGLVGAMTQLLKYGLVFVTGVPTEGKTNDECELKKLANRFGEIRETFYGELWDVININNSKNIAYTNLDLGLHMDLLYFQHPPRFQALHCLRNRVIGGTSVFVDALQASHALFHANREHFDLLTRTPVAFQYVNDGHHLYMQHPTIQLEDARDIHSYSTSSAVPPPISHINYSPPFQGPLPLNTPREFFPALKHFSDILNDPKNTYTYTLREGDCVLFDNRRVLHARTAFEEKTGNDREEGLKFGSGDATTNRWLKGCYLEADAVADRMRKATMEQLRERFARDPRFFAVGQAPRPPPRPDPISIGSTDSESSTRQKSKARGPSRPIIISDDEDEDEEEDEGDDEPEIVPQPPKLSHPLKPSNQYNAVPSHRQNEYIRPAVFDPSQFPKPLETSKTNVQRLNIGEDISLPKFPEEHQFMTSAETEKALKELIGNSMNEDIQVDVDPEDAIVEGFREGIELLPHQILGRKWMKEREDVSRKAYGGILADDMGLGKTIQTLTRIVEGKATKSDREDGYSGSTLVVCPLALVGQWASEIEKMTQLRVIKHQGTSRTTDPMILRRYHVVVTTYETVQSEYNVYTPPIKDGSATAKKKKSSDSDEDSGSDDDDLVAKLKAKRTRKAPAKKCALFEVKWIRVVLDEAHNIKNMKTKTAIACCELQSKFRWCLTGTPMQNNVTELYSLIKFLRIKPLSNWTTFNEQVAKPITSGRGAGVAMKRLQVVLKRIMLRRKKTDTVNGKTLIDLPNRTVEVVACPFDPYEQAFYTALEAKMESALDKLMSRDNGNKAYMSVLLLLLRLRQACNHPLLVSKDYKKDAEAVEPTPAKSKDDADADADDLVAAFGQMGVTRKCQVCTTTIDDSTAGEGEWKNHCRDCVDLAKQARQAELERPTSAKIRMVLKLLAKIDRDSNGEEKTIIFSQFTSMLDLIQPFLEEKGIKYTRYDGSMAPKDREAALEKIRNSKSTRVILISFKAGSTGLNLTACNNVILVDLWWNPALEDQAFDRAHRYGQKRDVYIYKLKVDATVEDRILALQDKKRALAAAALSGDKIKNMRLGMDDLLALFRPGARDGDDSDDD

SEQ ID NO: 11973 - protein, 1618 aa, Gibberella zeae PH-1
MIYKSENPEIFFSSKQTVWSWLFDSKTFGSGDNAPGFTDAITKKHISYGLLRDYATSLSSVLVAQYGLKQNDTVIVYGRNSIWWPVATLSTVRVGGVACGVSPDYTIDELAYSLKTSQSKIMFATVDNIDNAQAAAAKVGIPKENVILLEGSAKGCASIQTLLEKSHNVAEVPAFQIPAEKTNAEVCTFLCFSSGTTGLPKAVMISHANIISQCLQVADLTLASHSRILAALPFYHITGIVHQLHFPIFLNANVYVLAKFTLDTLLQTASENKIKELLLVPPIIIRLVRDPKLVAKYDLSHVQRFSSGAAPLSREILTLLEKAFPGTGFKQGYGMTESCSCIVAHPPGKYAYKYADRVGTLVGSTELRIVDIETGKDCEVNKPGEIWARGPQMAMGYLNNPKATQDTFDKDGFLHTGDIGYINEEGFLAITDRLKEMIKVKGIGVAPAELENLLQGQPQVDDVAVCGIPDERAGERPKAFVVLKASHASRPVEAAREIFENVKKETARHKWLEEIEIVSAIPKSPAGKILRRKLQDKSPLSGVNARIFTDVIDRTMQLTRIDYKPTSSQMHPEVPSRIDVPGDHPPTGPRSYIPSVRCGYRLSTNTPTDQLDNMRLSRCQLLTSTAAVGVVVGQSILPSSNHDSTIKGFEAPAMEYRPRFRYWLPDADVDHDILKNDIQDLKKLGAGGLEFVPFYNYGFGGVNDSKLETYAFGSPAFKNVLQIALEATKANGLSIDVALGASQGQGVPSKPLTPGLAVQLVYGKTSVKGGAKFDGALPAADINWNENLGYIHPQEKFGGNRLIGVSAAAVASKNVSGDNTYVSLHEKSLVDLTKHVKDGKITWTAPTDHKEYVLFAHYERYTNQRSADGVPTSVIANGSWVTDHFSATGAKLAAQFWEKNLLSTQIRQLLKEVGKHTWEDSMEIQASLYWSPGFLDNFKTKRGYNVIKYLPLLFHKSTSFQAARAPYNTTFILDNIPDNGQSKYLQDYRTTLNEGYQEYLQEFENWAESLGLSHSCQVGYGVPLDVLADVPIVSVPELESLGFLTPDQMSQFVGPAHLGRRNIISTEIGAVSAGAYSQTIPSLVNLFHEAFAGGVNAMMIHGMTYTGQQLGSTWPGFTPFQFIYTEMWSPKQPAWNYMSAMIDYTARNQFVLQKGVPKKDLVFYLYKNPYGMEDQYNGTDLRTRGFTYEYLSPANSGSKALKVSNKVLDPSGAEYRALVLDQQHFITAEAAQKLVELADAGLPIVVIGSLPNTTIGSNGQDIVSKSVAKLQGSKHSNVAFIKSSDDLFGALDKLSVQPRVKTGSEAAGNLYTVWRSDKGSDYLFLVNQGSSATFEITAEVEQGKVPYRLNAWTGQQVAMVSFKPSSGKVTFEVSLKKDQTAIIAFTSKKSKTSIVSQSKNVIDTSYDSTGDGLTVVLGDTKAASLTLSNGQTKKVPAMSSSDKKKLLNIDISNWNLTLESWVPGPDETKSASIKKAMNLGIQKTLKPWSEISGAQNVSGVGTYTTTFQVPQVPSKDSIVVLQFGPVLNTIQAWVNDKQLPAIDIYDAQVDVSDYLVSGSNTIRVEVASTLFNAVKARVNYVKANGIGPAAPALYTSADWQKHGLVGPVSLKSLRKVNL

SEQ ID NO: 11974 - protein, 477 aa, Enterococcus faecalis V583
MKNKRTVPFYQYIISLLCVAFLAGGSSYIYFDHRVKKMSQEGAITNADLSKVQDLYNEISTNYVGEVDKNELVEGALKGMSEAIGDPYSTYLNESAANDLNESLSGDFEGIGATMTMKDGEPVVAEAPVADSPAEKAGIKEGDIIEKVDGTATKGMKLAEVVSKVRGKKGTSVELTIQREGETKNISIKRGKIPVKTVTGELDKNDAQIGSIKITSFGKKTYQELKETITNLRDKGAKSFVIDVRQNPGGLLDQAERMASMFLKNGETIVQFEDKKGRTMKEVASKELDGGFKVKEPVAVIIDGNSASASEIFAAALHESANVPLIGTKTFGKGTVQTVKDLNDQTEIKLTVLKWLTPKGEWINEKGIEPTIKADYPEYAYLKLIPRDKTLKEGDQSEDIQNLNAILAVLAYPVDENNANYTAETKAAVSDLQQKNGLPVTGEIDNETATKIEATLGKLILENDAAYDTAVKEIQKN

SEQ ID NO: 11975 - protein, 550 aa, Rubrobacter xylanophilus DSM 9941
MSGPALLQLKVSVDESWVDYLIIGIYFLFVLGIGALLRDKMRTSEDYFLSGRSLPSWVTGLAFLGANLGALEILGMGAGAAQYGLMQAHFYWIGAIPAMVFVALFMIPFYYGSRVHSVPGYLKLRYNEATRGFNAVLFAIFMILLSGINMYAMAIVFKLLLGWSLTASILLSAAITMAYILLGGLSSSIYNEVLQFFLITLGLVPLVVFALIDVGGWAGLQEAVDREGYFHLWAHTGTTDNPMAVRWFGIVLGLGFVLSFGYWCTDFLVVQRALAAEDAAAAQRTPLIAAFPKLLYGILAIFPGLVALTIVPNLGQGGGGLANSYNMAIPYAMAHYFPSGMLGLGLTALLAAFMSGMAGNVTAFNTVWTYDIYRSYIRRDAPDRHYLNMGRIATVAGVVLSVGTAYIVLGFASIMDYVQLLHGLFLAPLFGTFLLGMFWKRTTPWGGFAGLVSGTAAGLVLYGLELLGTIQYGAPMAGNFWRAWWAWLVCFVVTIAVSLVTRPKEERELRGLVYGLTEKKEGVEQAWYKKPGVLAAAVLLITLVLNVIFF

SEQ ID NO: 11976 - protein, 138 aa, Magnaporthe grisea 70-15
MSDNEFGANDDLSLPKATVQKIVSEILPQSDGITYSKEARDLLIECCVEFITLISSEANEISDKEAKKTIACDHITKALEVLGFSEYVPAVLEAAAEHKEVQKGREKKANKFEQSGLSLEELERIQAEEFAKAASRHH

SEQ ID NO: 11977 - protein, 336 aa, Pseudomonas aeruginosa
MGRRYLSGAAGAIRRRGSTCHCRQRRMRAFLRGAGKSRCQIAALPGRSRPMSDYQETLYQGYGQRFSIDNMLHEVRTEHQHLVIFENARMGRVMALDGVIQTTEADEFIYHEMLTHVPILAHGAARRVLIIGGGDGGMLREVAKHKSVERITMVEIDGTVVDMCKEFLPNHSQGAFDDPRLNLVIDDGMRFVATTEERFDVIISDSTDPIGPGEVLFSENFYQACRRCLNEGGILVTQNGTPFMQLEEVRTTAARTDGLFADWHFYQAAVPTYIGGAMTFAWGSTHEGLRRLPLETLRQRFRDSGIATRYYNADIHLGAFALPQYVLQAIGKQDND

SEQ ID NO: 11978 - protein, 673 aa, Bdellovibrio bacteriovorus HD100
MSSFSKGVRGFIIAGSLAVSSLASAQLKEGLECRYLTVIEQGFLANHVKYSNRDTDLQNRVIEQYLKRLDPSKIYLTQGDVDAIRKSAGNVFDKTKNRDCSFLDAAQKIVLERVKDRSEFAKKYLGKDFKFESSTEFTFDPEKKTWPKDSADANEYLKKYIQFQIGNYMATDMKMDEAKKNVIKNYERAVKRTADTTQDDLFSGYLDSFARALDPHSSFFSRDVLEDFEIQMRLSLEGIGATLSSQDGFTVVEQLVPGGAAAKSGLIEPQDKIVAVGQEKGAMENVIDMDLKDVVKKIRGNKGTKVRLTILRKSGEGKKRFDVTLTREKVNLEDEAASIIYQDREINGQKKKIGVINFPSFYADSRRGGRSSAADMKKLIKEANEKKVDGLVLDLSNNGGGSLEDAVKIAGLFFQTGNVVKQSSKNEGRAESALRDTDPMVDWSGPLVVLTSRISASASEIVSGTLQDYKRAVVVGGDHTYGKGSVQSVLPIPNNLGAIKVTVGMFFVPGGKSTQHRGVDADIVLPGPFSADDIGEKYMDYSLPPKTIESFLSPDAYVKEGPGAWKEIKPEWLKSLRERSGERVAKNDEFKKIVEELNKAKARGKVIRVSEVLKDKNEKEKKDKAKKTASKAKKNEEYLKRPDIMEAENVLLDLIQLEDGKSLVPQQKQANAK

SEQ ID NO: 11979 - protein, 463 aa, Novosphingobium aromaticivorans DSM 12444
MHAHSRKAPRAMKSASFKFAGLLRVTALVSAVALIPATTAGLAAVDARTGPEFGKLIAVYERVKANYVEPVDDEKLLKGAIDGMLATLDPHSSYLDARDFENLRTQTEGSYGGLGLSVTMDDGAVKVIAPTKGSPADLAGVKAGDFITHLDGKLIYGGSLDEAVDQMRGVPGTKIRLSVFRPGRDEPFDVTITRQIIELKPVEWEMRGNVGVISVSSFSADVGTSVQKAWNEIRARSGGKVAGLVLDLRGNPGGLLDEAVALSDLFLDKGTIVSQRGRYARDNEVYPAEIDTKGDIAKGTPMIVLIDEGSASASEIVAGALQDQHRAVVMGQRSFGKGSVQTLIPLTRDTAIKLTTARYYTPSGRSVQEGGIEPDIAVPQISDPDLRKRQLRSYRESDLRGHLINEIKLEDKDLEKDKTEDPRFKMTAEELKAKDIKDFQLYYAVQTLSRTAPRGALAAKVKG

SEQ ID NO: 11980 - protein, 647 aa, Chlamydomonas reinhardtii
MAKTRRRKKRTHVETDAAEAKKPDPKTFVFKRGKHGAILADLEQDMRRMLLPNTALNLRESRKNSLRDFVSVAGPLGVTHFVMLSATDNSSYIKFAKTPRGPTMTMRVRNYSLIRDVQSAAVRPRVPANAFKTPPLVVMNGFSGNDTLRLVTTLFQGVFPPINVQRTKLSACQRVVLLSRDKESGLIRLRHYGISVAPSGLRKSVKGLLSRREVPDLSAFRDVSEFVTKSGYGSVQCVMVWWSGGLVEEGLCEGAVLFHAHDANVRRKAAEAARKAAAQADEMRQQGKLPAGQKQCTPPATVSVTPAGGEDFYLCVNVKEALDLEPGVSLMGATCDPFVRVVLARPGSLPLAEAETRVILRNSHPLWEEWLPFSLDNVTEDMLVALRVMDKDIGHFISFCGMVSLPIKEVLSTITDMGEEVVYRMPLMDKSGTTRRPGVLVFGISILAKDQYDEMRKVITAIQDPDQIHAQLHEYQLHIKVHGVKGLAALGSGSAAASAGLALQFSTVRSFLGAFACNVASAMAAVAGGSGTQVLDKGAAGVSGPQKPELEVSMQLVRVAVLVKGDGGWVVENRITPNVPPVVGQHVGAGKTRLTVSLRTEWFKSGMMVNVVKGKVESATPPDAVKFFNTLKTELAAKYAGAQREGV

SEQ ID NO: 11981 - protein, 162 aa, Pseudomonas putida GB-1
MAASMLDIPCVTLGGEHKTLADYPGKVLLVVNTASQCGFTPQYKGLEQLWQTYRERGLVVLGFPCNQFGKQEPGDAREIAQFCERNFGVSFPLFRKIEVNGPGTHPLYVELKQRAPGLLGSQKIKWNFTKFLIDPASGQVTRYAPTTKPQALEADIERLLSR

SEQ ID NO: 11982 - protein, 412 aa, Physcomitrella patens subsp. patens
MAKMHRGCELCDSVACLYCSADEAYICWTCDAKVHGANFLVARHTRSVLCGTCGISTPWRISGANPTPLTGFCTDCSQGESQGECTTYKDGTVLDSRRVALRLIPGVVERSDSVCESGCSSSIRKICEGVEGVEGTLPPSLCASSLSQLSSGDMGSNRSDQASPSSGICQSLKRKRSFECCSGESSPQSKQIATRTTEDVKRTATHSQKSTASGEPMERLDHPDQKSLKIWAFVKCCIRCFAKVLQCECDSVSSSSLGCRTSPTHAHQDPFFETRDCIRSQPQAFRSSSRALTTLLTSSTKRHRMEDRTQMRPSFPRNQQQAPWYSSPCVAHISQGNQNHGSRCSLKFRRACHSGRLPAVGCSIRRSPNYVPKASEVAACARVSTRKLVMTEIQLLAILRWRRCPIWAGVRR

SEQ ID NO: 11983 - protein, 186 aa, Vitis vinifera
MFMEAKLTRKRMVDDIGTNADRDYDHKYNYAGGSSVSAEDGIIKEQDRLLPIANVGRIMKQILPPNAKISKEAKETMQECVSEFISFVTGEASDKCHKEKRKTVNGDDICWALGTLGFDDYAEPLKRYLHRYRELEGEKANQSKASEENDEPSNYRGEPPMKHTVSPAPLKFNVLERSNSSLSKRL

SEQ ID NO: 11984 - protein, 162 aa, Shewanella oneidensis MR-1
MTSTIYRHNAIDIQGNPTPLTQYQGKVILIVNTASECGFTPQYKGLEALYQEYKARGFVVLGFPCNQFGAQEKANEQGIKSFCELNFGVSFPLFSKIEVNGEHTHPLYQYLKKAAPGMLGTERIKWNFTKFLINRQGEAVARFAPTTKPEDIRDKIESLLNK

SEQ ID NO: 11985 - protein, 1465 aa, Adiantum capillus-veneris; identical to SEQ ID NO: 8551

SEQ ID NO: 11986 - protein, 1172 aa, Arabidopsis thaliana; identical to SEQ ID NO: 8555

SEQ ID NO: 11987 - protein, 205 aa, Arabidopsis thaliana
MAEGSMRPPEFNQPNKTSNGGEEECTVREQDRFMPIANVIRIMRRILPAHAKISDDSKETIQECVSEYISFITGEANERCQREQRKTITAEDVLWAMSKLGFDDYIEPLTLYLHRYRELEGERGVSCSAGSVSMTNGLVVKRPNGTMTEYGAYGPVPGIHMAQYHYRHQNGFVFSGNEPNSKMSGSSSGASGARVEVFPTQQHKY

SEQ ID NO: 11988 - protein, 631 aa, Oryza sativa Japonica Group
SSGKLVLLDKLLVRLRETNHRVLIFSQMVRMLDILAEYLSLRGFQFQRLDGSTRADLRHQAMEHFNAPGSDDFCFLLSTRAGGLGINLATADTVIIFDSDWNPQNDLQAMSRAHRIGQQETVNIYRFVTCKSVEEDILERAKKKMVLDHLVIQKLNAEGRLEKKESKKGGSMFDKNELSAILRFGAEELFKEDKTDEETKKKLESMDIDEILERAEKVETKGGEGEEGNELLSAFKVANFSSGEDDATFWSRLIQPDASDMVEETLAPRAARNKKSYVEDHQLDKNSNRKRRGIDAQEKPRRRSSRTMDTAVSLPLIDGSAHQVREWSFGNLSKKDATRFVRAVKKFGNPSQIGLIVDDVGGAIAKSSVDQQLELFTLLIEGCQDAVKNNMDAKGTVLDFFGVAVKAHELIARVEELQFLARRIARYKDPVRQYRIQAPYKKPQWSASCGWTETDDARLMVGIHWYGYGNWEKIRLDPKLSLTAKIAPATLGERETFLPRAPNLDNRASALLQKEFANLRGKSSKAKGGPRQAIDNESNGGARSLRGRQKDTKIKEDNNSIKDDFKKRKVVEPEAREEGEISESEAETKYRQDKEEKWLEWCSEVLDDEQEILKRLDRLQNTSVNLPKEKV

SEQ ID NO: 11989 - protein, 468 aa, Azospirillum brasilense
MSDISKVFDLIKEHDVKYVDLRFTDPRGKLHHTAQHVSTIDEDVFEDGIMFDGSSIAGWKAINESDMILQLDPTTAVMDPFSAQPTLNILCDVYEPSTGQPYARCPRGIAKAAEKYMASAGIADTAYFGPEAEFFVFDDVKFKVEMNKVSYEFDSEEGPYTSDKDYEDGNLGHRPGVKGGYFPVAPVDSGSDLRAEMLSVLAEMGVPVEKHHHEVAASQHELGIKFDTLVRTGDNMQYYKYVVHNVAHAYGKTATFMPKPVFGDNGSGMHMHQSIWKEGQPLFAGNQYADLSELALYYIGGIIKHAKALNAFTNPTTNSYKRLVPGYEAPVLLAYSARNRSASCRIPYVASPKGKRVEVRFPDPSANPYLAFAALLMAGLDGIQNKIHPGEAMDKNLYDLPAEELAKVPTVCGSREALDSLKADSAFLQKGDVFTKDMIESYIDLRTEELLAFETMPHPIEYKMYYSV

SEQ ID NO: 11990 - protein, 444 aa, Bacillus cereus
MARYTKEDIFRLAKEENVKYIRLQFTDLLGVIKNVEIPVSQLTKALDNKMMFDGSSIEGFVRIEESDMYLYPDLDTWVIFPWTAEKGKVARLICDIYNADGTPFEGDPRNNLKRVLKEMEALGFSDFNLGPEPEFFLFKVDEKGNPTLELNDNGGYFDLAPMDLGENCRRDIVLELEEMGFEIEASHHEVAPGQHEIDFKYANAIRSCDDIQTFKLVVKTIARKHGLHATFMPKPLYGVNGSGMHCNLSLFKNGENVFYDQNGDLQLSDDARHFIAGILKHAPAFTAVANPTVNSYKRLVPGYEAPCYVAWSAQNRSPLVRIPASRGISTRVEVRSVDPAANPYLVMATLLAAGLDGIKNKLTPPAAVDRNIYVMTKEEREEAGIVDLPATLAQALVTLQSNEVISNALGDHLLEHFIEAKEFEWDIFRTQVHQWERDQYMSLY

SEQ ID NO: 11991 - protein, 156 aa, Zea mays
PAGTCPWLPAPGPGRSRSSCTRRRARPGRRRSSSSPTRCPRAPTGTPDWRRPGSWLLQAAATVTLTITIKNTNNFKFHITALTRSQYFKSLDVANRVSRSVRAGTVWVNCYFAFDPDAPFGGYKMSGFGRDQGLAAMDKYLQVKSVITALPDSPWY

SEQ ID NO: 11992 - protein, 297 aa, Candida albicans SC5314
MAQELTHPAIKDGWFAEISDTMWPGQAMSLKVEKVLHVEKSKYQDVLVFKSTTYGNVLVLDNCIQVTERDEFSYQEMITHLALNSHPNPKKALVIGGGDGGVLREILKHESIEEAWLCDIDETVIEVSKKYLPNMAKSYDDPRTRVHIGDGFKFLEEYKNQFDVIITDSSDPEGPAESLFQKPYFQLLKDALTEKGVITTQAENMWIHMDIISKLKKDCNEIFPVAEYAYTMIPTYPSGSIGFMVCSKDPNANVSKPIRFDWSDEFVAKNLKYYNKKIHEAAFVLPTWADQVLNKKD

SEQ ID NO: 11993 - protein, 241 aa, Glycine max
MKGKTCELCDQQASLYCPSDSAFLCSDCDAAVHAANFLVARHLRRLLCSKCNRFAGFHISSGAISRHLSSTCSSCSPENPSADYSDSLPSSSTCVSSSESCSTKQIKAEKKRSWSGSSVTDDASPAAKKRQRSGGSEEVFEKWSREIGLGLGLGVNGNRVASNALSVCLGKWRWLPFRVAAATSFWLGLRFCGDRGLASCQNLARLEAISGVPVKLILAAHGDLARVFTHRRELQEGWGES

SEQ ID NO: 11994 - protein, 57 aa, Zea mays
  misc_feature (43)..(43): Xaa can be any naturally occurring amino acid
SPSLFQGWLYLISPMWPCEAHSSMVEKVLFQWMLDYQNVIVLXSSTFGKVLVLYGSI

SEQ ID NO: 11995 - protein, 402 aa, Cyanobium sp. PCC 7001
MPTIESVELLLLVAAVVAMVARRLRLPYSVGLVLGGIALAWLPFGPGIALTRELIFNAFLPPLIFEAALYIAWPSLRRDLPVVLTLATAGVVLSAGVTTVGMHVLAHWSWPAALLFGVLISATDPVSVIATFKEAGVHGRLRELVEAESLLNDSTAAVAFGIAIAFATGAPITPMGTLQVLAVTVAGGVACGALVAAALLALAGRTEDPLVEITFTTVAAYGSFLLAEHLGVSGVLATLTAGILLGNIGPLGAISPQGREAVQSFWDYAAFVVNSLIFLLMGMLEAHQSFNRVLLPIGIAIALVIAGRALSTYLCCALFRFSALRVKASHQHVLVWGGLRGALALALALGLPTSLPYRDAVVTVAFAVVAFSVIVQGLSITPVMRALGEIGPGIGEQLPSAS

SEQ ID NO: 11996 - protein, 1161 aa, Debaryomyces hansenii CBS767
MASDEPSQNIINLSSDDDEEVDENVSLKDIQINGHEIHERGNNQDWRQANSNSNTTHINQPPKRQRLDSLYLNNGPFRSPSKQGNDLSHIGNSNHIQQRQLYPKTLPNAVLDRTVFGPRSVLSNTTIQNHPRQSEPQSIPKNNLIQNQYMQADPQSIPNNNTIQYQSRQADPQEDVIILSSEDEDMDSDGDIMILDAEEASRIGKFKTSSFERNANRSSRDMGNYEAPANTGPYYSVPAVNPNEMHVTYNNPAPVPHFTKDDGPEVEKLNFQRAQETLEENVRRKDELLYKHEQLTSDFTKSLRQANELLQHLTLLQSHLKREEIQENRDENTILSLKNEISFKGAEYHNFRRSKDATATSLSGIASKLSWLTVSIRDAKSRIHNYGKHRNGVNIIDNPFVLNNNSGRNNSDYENESIMNNPFGNIPGFSANVYSDNDQQHLQNLLNNIRPDEELDEEGLSLTPSELAITLLKHQRMGLAWLLRMEESKSKGGILADDMGLGKTVQTIALIMAHKSDDDNRKTNLVIAPVSLLRQWAAEIESKIKPNAQIKIAIYHGSVKKNLRTFNSLKKYDVVLTSYGTLSSEWKKHYQGPLEEARLSRNQNVIPDLDAGGTSYTSPFFATDAVFYRIILDEAQNIKNKSAIASKALYCIKGIHRFCLSGTPIQNNVEELYPILRFLRIKPYNDESKFRSDIVLPIRSKSSGYDDFDKKKSMQKLRALLRAILLRRSKNSLIDGKPILSLPDKLVTEDTVQMEDEELTYYRELEQGIQKKAKTLLASEKLGSTSSILTLLLRLRQACCHSFLVEMGRMKAAESEATKTLITRDWKSMYVNIQKFDEDTINRIRNEVHQGNLLKGENEGESNTNSDEDLFTCPICYDVLGYESIVLFSGCGHMICNNCIENFFERFETGDGSEGNRLASCFSCSKSIKENELIDYNMFHMIHQEGYDRDKIAEFYNINYSSNGKTTNMQKIRQLIQENKGFTPSAKMEKCMHLIKDVLENYPDEKIIIFSQFLSLFDLMKLVLANEKIPFLRYDGSMSLDEKNSTIKQFYQGSTKVLLISLRAGNVGLTLTCASHVIIMDPFWNPYVEEQAMDRAHRIGQQRDVRVHRILTEGSVEGRIMTLQNEKKEIISGALDEKGMKSVSKLGRQELGFLFGLNELR

SEQ ID NO: 11997 - protein, 536 aa, Mycobacterium avium subsp. paratuberculosis K-10
MFGLVLIVALVSTVIVGTVIGRRYRVGPPVLLIVLGVLLGLVPQFGHVRIDGEIVLLLFLPAILYWEGLNISFREIRANARIIVFLSVALVIATAVAVSWTARALGMDPHAAGVLGAVLSPTDAAAVAGLAKKLPRRSLTVLKAESLINDGTALVLFAVSVHVAIGAPAISPPEVTLRFIGSYLGGIAAGLLVGGAVTLVRKRIDAPQEEGALSLVTPFAAFLLAQSVECSGVVAVVVSALVLAYSGPVVIRARSRLQSYAFWDIATFLLNGSLWVFVGVQIPGALRGIAGVDGGVRHALFVALVITGVVIVSRIFWGEFTTMLIRLIDRRAVQRERRVGWRQRFVTAWAGFRGAVSLAAAVAVPMTTLSGAPFPDHSLLIFIVTVVILVTVLVQGSTLPAVVRWARLPADVAHAEELQLARTRAARAALAALPAVADEVGVSDELRRRLHKEYEEKAALVLATENGSPDNRILKTREKVRQVRLGVLEHKRREVTALRNQNRIDDTVLRELQNEMDLEEVQLLAAAADEDDGDTE

SEQ ID NO: 11998 - protein, 514 aa, Triticum aestivum
MGSLLHVSFSATQHSKLHRAYQLLFFHVHPFWLQLLYFVSISFFGFVILKALPMKTGMPMDLDLIFTSVSATTVSSMVAVEMESFSNPQLLLLTLLMLLGGEVFTSMLGLHFTYLKSKTKEAQAPHEHDDADKGKPAPSSSLQLTATTCMDDVNRVEQGFKDQPRYDRAFLTRLLLFIVLGYHVVVHLAGYSLMLVYLSVVSGARAVLAGKGISLHTFSVFTVVSTFANGGFMPNNEEMVAFRSFPGLLLLVMPHVLLGNTLFPVFLRLAIWALRRVTRRPELGELQSIGYDHLLTSRHTCFLAFTVAMFVLAQLSLFCAMEWGSDGLHGLTAAQKLVTALFMSVNSRHTGEMVVDLSTVSSAVVVLYVVMMYLPPYTTFLPVEDDSDQQVGADQHHQKRVTIIWRKLLMSPLSCLAIFIAVVCITERRQISDDPLNFKVLNITVEVISAYGNVGFSTGYSCGRQVTPDGGCRDTWVGFSGKWSWQGKLVLIAVMFYGRLKKFSMHGGEAWMIV

SEQ ID NO: 11999 - protein, 492 aa, Bacillus anthracis str. Ames
MKIEIMVSLAIYMAGMLYIGYWSYKKTSDLSDYMLGGRGLGPAVTALSAGASDMSGWMLMGLPGAMYATGLSSVWIAIGLLIGAYANYLILAPRLRTYTEVANDSITIPDFLENRFKDRTKILRFVSAIVILVFFTFYASAGLVSGGRLFENSFNLDYKIGLFVTVGVVVAYTLFGGFLAVSWTDFVQGCIMFIALVLVPIVAFTDVGGVTETFNTIKQVDASHLDMFKGTTILGIISFLAWGLGYFGQPHIIVRFMAITSIKDLKTSRRIGIGWMTISIIGAMLTGLVGIAYYAKNNATLQDPEMVFVTFSNILFHPYITGFLLSAILASIMSSISSQLLVISSAVTEDFYKTFFRRKASDKELVFIGRLSVLVVAMIAVVLAYHPSDTILTLVGYAWAGFGSAFGPAILLSLYWKRTNKWGVLAGMIVGALVVITWVQIPSLKASMYEMVPGFFCSLLAVIIVSLVTKEPVKAIHREFNEMEAVLEEETK

SEQ ID NO: 12000 - protein, 409 aa, Xylella fastidiosa Ann-1
HSAVRGLLSDLDPHSTYFDKEDADAFDEQTSGVYDGIGVELQEQSDNTLKVIAPIDDTPAARAGLRPGDLIVAINGKPLANVDAMKPLRGAPGSQVTLTIVRDKNGKPFDMTIKRETIHIASVRSRMLEPGYGYIRISVFQADTGNDFHKHLGQLKQQAGGKLRGLLLDLRSNPGGLLTAAVQVADALLDKGNIVSTRGRISASDTRFDATQGDLLDGLPLVVLVDAGSASASEVLVGALSDNHRARVIGSCTFGKGSVQTLLPLDNGDSVKLTTARYYTPSGRSIQARGIVPDLLLKPDGVGAADLSGSGIDRSEAGLPGHLRGTDEGGPGCTSSDPLPGDTPIMTALLELKQPGSAVQAKKAIPVKVVSDVKSATKSPLSVFGKDRAVKRVPVVSPTSEQVDGQPSK

SEQ ID NO: 12001 - protein, 225 aa, Kluyveromyces lactis NRRL Y-1140
METTTHVLGHVDGSSVVSNSGTKVICSVSGPMEPKSRQELPTQLALEIIVKPAEGVQSTREKLMEDQIRSVLTPVLARYLHPRQFVQICLQVLEAGESRDYTVKEVSVCVNAAVLALVDAGVPLLSMCSGTCIGITTEGKQLVVNPTESQLAKCESVHVYCLELGTNENGDIDVRNLLLLDSLGSFDESQLFKVLETGEKECIRLYTELRSVIKDKVAKDFVWRQ

SEQ ID NO: 12002 - protein, 656 aa, Ralstonia metallidurans CH34
  misc_feature (622)..(622): Xaa can be any naturally occurring amino acid
MGKIIGIDLGTTNSCVSILEGNTPKVIENSEGARTTPSIIAYMEDGEILVGAPAKRQAVTNPRNTLYAVKRLIGRKFEEKEVQKDIGLMPYAIVKADNGDAWVGVRDQKLAPPQVSAEAVRKMKKTAEDYLGEPVTEAVITVPAYFNDAQCQATKDAGRIAGLDVKRIINEPTAAALAFGMDKNEKGDRKIAVYDLGGGTFDISIIEIADVDGEKQFEVLSTNGDTFLGGEDFDQRIIDYIIGEFKREQGVDLSKDVLALQRCKEAAEKAKIELSSSQQTEINLPYITADASGPKHLNLKITRAKLEALVEELITRTIEPCRTAIKDAGVKVSDIDDVILVGGMTRMPKVQEQVREFFGKEARKDVNPDEAVAVGAAIQGSVLSGDRTDVLLLDVTPLSLGIETLGGVMTKMINKNTTIPTKHAQVFSTADDNQPAVTIKVYQGEREMATGNKMLGEFNLEGIAPAPRGTPQIEVSFDIDANGILHVGAKDKATGKENRITIKANSGLSEDEIQRMVKDAEANAEEDKRARELADARNQADALIHSTRKALGRVRREARSWREGKDRSRDQGPGRRRPRVNKAEIDAKVNALSEASQKLGEKVYADMQAQAGEGAAAGAGAXRFSSRPSRRRQRVGCRVQGSERQEVIGDGGWRRG

SEQ ID NO: 12003 - protein, 682 aa, Salmonella enterica subsp. enterica serovar Typhi str. CT18
MNTFFRLTALAGLLALAGQSFAVEDITRADQIPVLKEETQHATVSERVTSRFTRSHYRQFDLDEAFSAKIFDRYLNLLDYSHNVLLASDVEQFAKKKTVLGDELRTGKLDVFYDLYNLAQKRRFERYQYALKVLERPMDFTGNDTFNLDRSKAPWPKDEAELNALWDGKVKFDELSLKLTGKSDKEIRETLTRRYKFAIRRLAQTNSEDVFSLAMTAFAREIDPHTNYLSPRNTEQFNTEMSLSLEGIGAVLQMDDDYTVINSLVAGGPAAKSKSISVGDRIVGVGQAGKPMVDVIGWRLDDVVALIKGPKGSKVRLEILPAGKGTKTRIITLTRERIRLEDRAVKMSVKTIGKEKVGVLDIPGFYVGLTDDVKVQLQKLEKQNVNSIVINLRSNGGGALTEAVSLSGLFIPSGPIVQVRDNNGKVREDSDTDGVVYYKGPLVVLVDRFSASASEIFAAAMQDYGRALIVGEPTFGKGTVQQYRSLNRIYDQMLRPEWPALGSVQYTIQKFYRVNGGSTQRKGVTPDIIMPTGNEETETGEKFEDNALPWDSIDAAKYVKSDDLAPFGPELLKEHNARIAKDPEFQYIMKDIARFNAMKDKRNIVSLNYAQREKENNEEDALRLARINDRFKREGKPLLKKLDDLPKDYQEPDPYLDETVKIALDLAHLEKEKPAEQAATDK

SEQ ID NO: 12004 - protein, 143 aa, Brassica napus
MVKLCELCGAEAHLHCDADSAYLCRSCDVKFHASNFLFSRHVRRAICPGCSSLTGDIVSGSLSPWPAKITCSCCGTSSSSASSCCSELSSSTTRKTIVNRGPRRREKGVNAVADGIFVNWCDELGLNGDSKNEVVSLASLALA

SEQ ID NO: 12005 - protein, 470 aa, Geobacter sulfurreducens PCA
MTPQEVVSFAKENGALMVDYKFMDFVGIWQHVSVPISEFGEDTFEEGQGFDGSSIRGWQPIHASDMILLPDPATAKMDPFIAVPTLSLICNVFDPITKEDYTRDPRNIARKAEAYLKSTGLGDTAFFGPEAEFFIFDDVRYDSTSNQSFYMVDSVEGAWNTGREEFPNLGYKPRHKEGYFPVSPTDSQNDLRNEMVMELQKVGIRVECQHHEVASGGQAEIDMRFSSLVDMADQLQWFKYVIKNVAYRNGKTVTFMPKPLYGDNGSGMHCHMSIWKDGQNLFAGDKYGGLSQMALWYIGGIIKHAKALCALTNPTTNSYKRLVPGFEAPVNMAYSSRNRSASIRIPMMSTNPKAKRIEYRTPDPSCNGYLAFAAMLMAGLDGIENKIDPGQPLDKDIYGLSPEELKNIPSAPGSLEEALKALEADHEFLLKGDVFTPDVVEKWIEYKMEAEVNPVRMRPVPLEFALYYDI

SEQ ID NO: 12006 - protein, 1121 aa, Pisum sativum; identical to SEQ ID NO: 8575
  misc_feature (28)..(28): Xaa can be any naturally occurring amino acid

SEQ ID NO: 12007 - protein, 468 aa, Pseudomonas syringae pv. tomato str. DC3000
MSKSVQLIKDHDVKWIDLRFTDTKGTQHHVTMPARDALEDDFFEVGKMFDGSSISGWKGIEASDMILLPDDETAVLDPFTEEPTLILVCDIIEPSTMQGYDRDPRAIARRAEEYLKSTGIGDTVFAGPEPEFFIFDEVKFKSDISGSMFKIYSEQGSWMSDQDVEGGNKGHRPGIKGGYFPVPPFDHDHEIRTAMCNALEEMGQTVEVHHHEVATAGQNEIGVKFNTLVKKADEVQTLKYVVHNVADAYGRTATFMPKPLYGDNGSGMHVHMSIAKDGKNTFAGEGYAGLSDIALYFIGGIIKHGKALNGFTNPATNSYKRLVPGFEAPVMLAYSARNRSASIRIPYVNSPRGRRIEARFPDPAANPYLAFAALLMAGLDGIQNKIHPGDAADKNLYDLPPEEAKEIPQVCGSLKEALEELDKGRAFLTKGGVFSDDFIDAYIALKSEEEIRVRTFVHPLEYELYYSC

SEQ ID NO: 12008 - protein, 437 aa, Chlamydomonas reinhardtii
MPCAAGSPGSHTGGCRYDSSLGMLTKKFLNLINTARDGILDLNQAAETLKVQKRRIYDITNVLEGVGLIEKKSKNNIRWKGAGDGGRGGDADPDLDRLRSDMSKLDEQERELDDNIRFMTSAIQALSENPLNKPRLYVTDEDVMGLPCFANDTIFAVKAPPGTTLEVPDPREAADPRDGQMRYRIVLRSTKGPIDVYLVQHTNNVGTTSQQGQQGGAGGGQQPSASAEPAGSTVGPAGAAGGAMSGGAMGAPAVAPAASGAAAAAAVGGAPAAAGPAGVAPAAAAAAAAPAAAAAAEPVPSAVKQEQQPPAVRAPVPGLAGQGVISPAAFHFMPQSGTPLSAMAGGASGHNFFAPMSPNAVDLAALAASFGGAGPGGALGRVSGLIPGGGPAGHGGLGGHGGVELDPGQWFDAPGDGAGGGAAAYFGADGDNFFAEL

SEQ ID NO: 12009 - protein, 174 aa, Nicotiana tabacum
AFLKSVAAGTYDAVIVDSSDPIGPAQELFEKPFFESIARALRPGGVVSTQAESIWLHMHIIEEIVANCRQIFKGSVNYAWTTVPTYPSGMIGFMLCSTEGPAVDFKNPINPIDADASHNKTLGPMKFYNSELHKASFCLPSFAKRVIESKGNDLENSSRTMEAANHNNNGQEGD

SEQ ID NO: 12010 - protein, 181 aa, Arabidopsis thaliana
MASSMLSSTAVVTSPAQATMVAPFTGLKSSASFPVTRKANNDITSITSNGGRVSCMKVWPPIGKKKFETLSYLPDLSDVELAKEVDYLLRNKWIPCVEFELEHGFVYREHGNTPGYYDGRYWTMWKLPLFGCTDSAQVLKEVEECKKEYPGAFIRIIGFDNTRQVQCISFIAYKPPSFTEA

SEQ ID NO: 12011 - protein, 469 aa, Xylella fastidiosa Temecula1
MSLENVEKLVKDKKIEFVDLRFVDMRGVQQHVTFPVNILEQSLFKDGKMFDGSSIAGWKGINESDMVLLPDASTAYLDPFYADPTLVMTCDILDPATMQSYVRDPRGIAKRAEIYLNSLGIADQAFFGPEPEFFIFDSVRFANDMGHAFFQIASEEAAWNTGAEFEGGNSGYRPTVKGGYFPVPPTDSLHDLRAEMVKTLEQVGIETEVHHHEVATAGQCEIGTKFDSLVKKADQLMTMKYILKNVAYRNGKTVTFMPKPIVGDNGSGMHVHQSLSKGGVNLFSGDDHAGLSQLALYYIGGIFKHAHAINAFSNSGTNSYKRLVPGFEAPVMLAYSARNRSASCRIPWVSSPKARRIEMRFPDPLQSGYLTFTALMMAGLDGIKNKIHPGPPNDKDLYHLPPEEEKLIPQVCSSLDQALEALDKDRDFLKAGSVMSDDFINGYIALKMQEVTQFRAATHPLEYQMYYAN

SEQ ID NO: 12012 - protein, 889 aa, Saccharomyces cerevisiae
MPTAKRTSSRASLALPFQLRLVHKKSWGHRLRDFISGFLKSCRPIAKYVFPNFIVVHYIYLITLSIIGSILLYPCKNTAFIDVLFLAAGASTQGGLATKSTNDFNLYQQIVVYVITLLSTPILIHGFLAFVRLYWFERYFDNIRDISKQNFKLRRTMTLQQRELSGSSGNAARSRSFKDNLFRGKFVSREDPRQSASDVPMDSPDTSALSSISPLNVSSSKEESSDTQSSPPNFSSKRQPSDVDPRDIYKSIMMLQKQQEKSNANSTDSFSSETNGPAFIVQERHERRAPHCSLKRHSVLPSSQELNKLAQTKSFQKLLGLRRDEGDHDYFDGAPHKYMVTKKKKISRTQSCNIPTYTASPSPKTSGQVVENHRNLAKSAPSSFVDEEMSFSPQESLNLQFQAHPPKPKRREGDIGHPFTRTMSTNYLSWQPTFGRNSVFIGLTKQQKEELGGVEYRALRLLCCILMVYYIGFNILAFVTIVPWACTRHHYSEIIRRNGVSPTWWGFFTAMSAFSNLGLSLTADSMVSFDTAPYPLIFMMFFIIIGNTGFPIMLRFIIWIMFKTSRDLSQFKESLGFLLDHPRRCFTLLFPSGPTWWLFTTLVVLNATDWILFIILDFNSAVVRQVAKGYRALMGLFQSVCTRTAGFNVVDLSKLHPSIQVSYMLMMYVSVLPLAISIRRTNVYEEQSLGLYDSGQDDENITHEDDIKETDHDGESEERDTVSTKSKPKKQSPKSFVGAHLRRQLSFDLWYLFLGLFIICICEGRKIEDVNKPDFNVFAILFEVVSAYGTVGLSLGYPNTNTSLSAQFTVLSKLVIIAMLIRGRNRGLPYTLDRAIMLPSDKLEQIDRLQDMKAKGKLLAKVGEDPMTTYVKKRSHKLKKIATKFWGKH

SEQ ID NO: 12013 - protein, 784 aa, Gibberella zeae PH-1
MLNLVTRRTLYLLLGSIRNYAYRFNWDWDADLREEHPRLDAVATKVWMVVPPINFITIHYAYFIFGSLIFSVIFWGSSQPSQSIDYIDCLFLVVSSFCDTGLNTVNLSQLTTWQQVLLFILFIIGSALWVSFWTVMARKHAFEKRFEDIVRTEREARKRRAALRRSKPLGRFISFDKYKTSPASTGTSGILPGLGTKQKSETEITDTNTNTNDLFTTTKPIRRAVTAPGEPISSDSDDNDSNRTHVAASSRIPPPTPSSGDHIQFASNLSPRSGGRDRDSVSIYRRNDDTELDRHPSRASVADSDESEDFLLHWKKILGSHNTSKRGQFYDLSSDEREALGGCEYRALKVMSVTVPLYGFAWQAICGIALGAWINNNRPSAATVNAQNPWWCGIFLSASAFNNAGMSLNDAGMAAFQDGYFVLIVVGLLVLAGNTAYPLLLRFFLWCSLRLLQLTTQPKTLGPWKETIEFILKYPRRVYTTLFPSGATWWLFLVIFVINTIDWVAFEVLNIGNKVVESMPVSDRIIAGWFQAIAVRAAGFAVVSIGSLYPAVQLLYMIMMYVSVYPVSITMRHSNVYEERSLGIYEDDPQVLEAENGTGHLPTISEAPEKPALRRRVTAAAQKTVKKSMTFHGVGVRPPPKGPDDNSRISFIAQQMRGQLAHDLWWLILPVLIIMIIETDHFNQQPLAYSIFNVLFEVVSAYGCVGLSVGAPGQSYSLAGGMHRGSKFVLCLVILRGRHRGLPVALDKAVRLPGENLAREEEEDSKIRRTNTMFRMASRESRAV

SEQ ID NO: 12014 - protein, 181 aa, Arabidopsis thaliana
MASSMLSSAAVVTSPAQATMVAPFTGLKSSAAFPVTRKTNKDITSITSNGGRVSCMKVWPPIGKKKFETLSYLPDLSDVELAKEVDYLLRNKWIPCVEFELEHGFVYREHGNTPGYYDGRYWTMWKLPLFGCTDSAQVLKEVEECKKEYPGAFIRIIGFDNTRQVQCISFIAYKPPSFTEA

SEQ ID NO: 12015 - protein, 1017 aa, Geobacter sulfurreducens PCA
MPILITALIYLIFFLSGATALVYEVVWVRKLSLVFGGSHLAVTTVLAVVMGGLALGSWLFGRRVRTTRNLLRLYGALEIGIAFFALLFIALLNLYSLMPAYSFESLTEHSHQLPRVALLTLRIVLAAIALIVPTTLLGGTLPVLAAFMVRGRRAVGRGVAYLYALNTFGAVAGCFGAGFYLLGRFGVSNTMAGAITVNVLLGIACFALQGPAARYLEAGEDEAPAPLSAVTLPEEKARIGLVVWGIGVSGFCALGYEVLWTRVLGIVIGTNVYGFTLMLAAFLTGIAAGSGAYGLWARRLRPPEEGGCPVSKLIGGFGVVQIVIGLSALLVTILIRDLPTRVFFLQDLFLSQSTDLFRARQFANFALVFSYLFIPAFFMGVAFPLAGTLDACRRRKVGHAVGEVLTCNTIGAILGTVVSGFVLIQVFGIERSLYLLATVNAGFGLLILARLLRGTPRRLATAGTVLAVVGVMAVAGTMPRIWDAKYFAIYRTNQPEVFRTPDLIAEAKRHTDVLYYAEGIQSIVSSIRIRGGYQAFLRNGRIEASDHNESLQNQYALGHLPMLLHRNPRKVLVIGAGSGITLGAVSLHPSVSEMTLAEVEPKVLGVTRSFAAYNHGVLGDRRLRVAFSDGRNYLATTGERYDVITADPIHPWLSGAGYNYTREYFELAAEHLRAGGIMCQWLPLYDLSADDLRSVVRTFRQAYRHVLVWMTQGDAMLIGSNAPILLSEDELAARIAVPAVAADLARVQMGSATDLLSYFVMGTAGADRFSRTGRINTDDNLYLEFSVPRSTGKSALPEVNVNALARHRESVLAYLDDSVPPADRLARENRWMRLDRAAALALEARAIFLGGRYDSPRFGLLVSELEGNYAAFAPWRFLRSEYLEEMASSPLPLDQLALALLDESGRRVVVNVAAVMSRVSRELTVVDFVDSDERVIIGQADINGRGRDGSAKRLAAEVMEAVRLAYNEELSGAEARGKPLPDQAEFVRRMREIIATMTGRQHGNPYPAQGRPIKESA

SEQ ID NO: 12016 - protein, 443 aa, Clostridium saccharobutylicum
MAKYTKEDIINLVKENGVKFIRLQFTDIFGTLKNVAITDKQLEKALDNECMFDGSSIDGFVRIEESDMNLRPNLDSFVIFPWRPQQGKVARLICDVYKPDGTPFEGDPRHVLKRANADAKELGYTMNVGPECEFFLFETDENGRATTNTQDKAGYFDLAPTDLGENARRDMTLALEEMGFEIEASHHEVAEGQNEIDFKYGDALTTADNIMTFKLVVKSIAQRHGLHASFMPKPIFGINGSGMHVNMSLFKDGKNAFVDENDKNGLSKVAYQFIAGLLKNIKGMAAVTNPLVNSYKRLVPGYEAPVYLAWSCKNRTALIRVPAARGAGTRVELRCPDPSSNPYLVLACLLQAGLDGIKNNLQPPAEVEANIFAMTEQERKENGIDNLPNNLYEAVNYMKENELAKKALGDHVYGNYVAGKAAEWDDYRTKVHDWELENYLNKY

SEQ ID NO: 12017 - protein, 308 aa, Shewanella violacea
GTSYEGGNKGHRPSVKGGYFPVAPVDSSQDIRSAMCLVLEEMGQVVEAHHHEVATAGQNEIATRFNTLTLKADEVQVLKYVVHNVAHAYGKTATFMPKPIVGDNGSGMHVHISLAKDGTNLFAGDKYGGLSEMAIYFIGGVIKHARAINAFSNPATNSYKRLIPHFETPVMLAYSAANRSASIRIPLVPSPKGRRIELRFGDPMANPYLAFSAMLMAGLDGIQNKIHPGEAMDKDLYDLPPEEAAEIPTVATSLENALECLDADREFLTRGEVFSNDFIDSYITLKSEDVERVNQTTHPVEFELYYSL

SEQ ID NO: 12018 - protein, 514 aa, Corynebacterium glutamicum ATCC 13032
MITMTLGEIADIVGGRLTGGAQEDTLVSSSVEFDSRSLTPGGLFLALPGARVDGHDFAATAIEKGAVAVLAAREVDVPAIVVPPVKIQESNADIYAHDPDGHGAAVVEALSRLARHVVDICVAGHQLNVVAITGSAGKTSTKDFIATVLDQDGPTVAPPGSFNNELGLPHTALRCTTDTKYLVAEMSARGIGHIKHLTEIAPPRIAAVLNVGHAHLGEFGSRENIAQAKGEIIEALPSKKTGGVAVLNADDPFVARMAPRTKARVVWFTTDAGQAKKSDYWATSISLDAVARASFTLNTKDGSWPVTLQVFGEHQVANALAAAAIAMEAGVAPELVVAGLEAHSAASAHRMDVKTRADGVTIINDSYNANPDSMRAGIAALAYTASGRSEATSWAVLGQMGELGDDASEAHAELGAELAKYNVQELVAVGENPNCAALAESAASLGVSTHVVSDVDAALELLAGHIKRDDVVLVKASNADRLWRVAEALHGMVPGLKNTGGSVNDDSRRNVEGQ

SEQ ID NO: 12019 - protein, 391 aa, Acalypha californica; identical to SEQ ID NO: 8588

SEQ ID NO: 12020 - protein, 595 aa, Coprinopsis cinerea okayama7#130
MAPKIYRSPLPDVPVFNRSIFTHLFPPTSPPAHIGQWNESVPAYIDAPSGTTITRGQTKKLSLALAYGLRNHRNLQAKRGDTVLIYSQNSLTWPIALFGSVAAGLRATLANSAYNARELAFQYTDSRAHLLFTSEEGIPVVLEMFKSLGVSSAEAQKRIIVMTTSLHWAGGPTIPVSPAARGLTTVASLLQLGTLEAEEKFDGELANETAYLCYSSGTTGKPKGVETTHRNLTSVLDQVRPAFPPLDSNTDKVLGVLPFYHIYGAIKLLHHPFLCGAPLVIMSRFDPVQFCANIEKYKITMALIVPPVLVVLSRHPAVDEYDVSTLEVLFSGAAPLGAALTQQVKERLEARKKNGQPVYILQGYGLTETSPTTHLLEKPDAVRKVGSIGILLPNLEARLVVDGEGDGNIDAEEGQPGELWIRGPSVMKGYLNNPKATKESITHDRWFKTGDIAIRDSEGYYTIVDRRKELIKYKGFQVPPAELESVLLTHPEIADTAVIGVDSAKEATELPRAYVVHANPTALKSDSDKLAFAASVQKWIQTKVARHKFLRGGVVVIDAIPKSASGKILRRELREKAKQELAGRDPADDIIRAKL

SEQ ID NO: 12021 - protein, 672 aa, Vibrio salmonicida LFI1238
MNCRFRVSLIAAGVMLAASAHALEAKVLEAKYSETDLPVLAAETQHATASKRVTSRFTRSHYKHFSLNDDFSVAIYERYLDMLDYNRNVFIQADLTSFAPLSTKFDDQLKVGDTQAAFDIYNLSLKRRFERYVYALSLLDKEFDYTVDESFELDRSDAAWPKDDAELNELWRKRVKYDALNLSMTGKDWPEIQKMLGKRYNNALKRLTQSHNEDAFQLYINAFAREVDPHTSYLSPRNAEQFQSEMNLSLEGIGAVLQATDDYTVIRSLVAGGPAQNSKQLSEGDRIIGVAQEGEKSVDVIGWRLDDVVQLIKGPKGTKVYLDILPEGKDSKSHVVTIVRDKIRLEEDRAVKSEVIEQDGKKIGVLEVPSFYVGLAEDTKKQIAELKEKNITGIVVDLRNNGGGALTEATALSGLFITSGPVVQVRDSYGRVNVNADTDGEIAYTGPMTVLVNRYSASASEIFAAAMQDYGRAVILGENSFGKGTVQQHRSLNHIYDLFDKPLGHVQYTIQKFYRINGGSTQNLGVVPDIAFPTAIDAKDTGESVEDNALPWDSIKAAEYKQTNQIANTIAPLAQKHVERIKSDEEFGFIQEDIARYKAEKDITSMSLNKKVREKESDDADVRRLDRVNQRQKHLEKEAFKSIDDIPKDYEAPDAYLDEAVSITIDLATMER

SEQ ID NO: 12022 - protein, 391 aa, Atuna racemosa; identical to SEQ ID NO: 8591

SEQ ID NO: 12023 - protein, 990 aa, Yarrowia lipolytica CLIB122
MVDTNSIKRLKYLLSLTDLFRHFINKRMEGDPKFRKLVNELDRASKAQKKTRGRGGRGRRKTEKEEDEELLNDNTQMATVYTESPPFINGTLREYQVQGLNWLISLHENSISGILADEMGLGKTLQTISFLGYLRYKCGINGPHIVIVPKSTLDNWRREFEKWTPEVKTVVLRGDKTERAEIIANEVLTADFDVVISSFEIVIREKSALKKVAWEYIIVDEAHRIKNEDSMLSQIIRLFHSTNRLLITGTPLQNNLHELWALLNFLLPDIFSEAETFDQWFEEKEAEGEEGENDEDSVVKQLHKVLRPFLLRRVKNDVEKSLLPKKELNLYIGMSDMQVQWYQKLLEKDIDAVNGQLGKREGKTRLLNIVMQLRKCCNHPYLFEGAEPGPPYTTDEHLVFNCGKMVMLDKLLKRLKSQGSRVLIFSQMSRMLDILEDYCSFRDYEYSRIDGSTAHEDRIAAIDEYNAEGSEKFVFLLTTRAGGLGINLTSADIVILYDSDWNPQADLQAMDRAHRIGQTKQVYVFRFVTENAVEEKVLERAAQKLRLDQLVIQQGRTQQKAAANNSESKGDLLSMIRHGTEDIFKSSKGTLKTEDDIEAILLHGEKRTKQLNDKFAELGIDDLQKFSTDSAMVWNGEDFQHRVGANGIGAPDPNGKGWINPPKRERREQHYGVNSYYKDIFLLQQQQPRTMRPPKQVPLAEHQFFPPGLKALQDQELAFYRKQINYKVPYADIDVDALEEGETKESKRAALNKEIADAEPLTEEQEALKRDYESEGFTNWTKRDMNNLVHLIGRHGRDNMEAVARAFRGKGEEEVLRYAKTFMERHTEVEGYEKYIAVIEQGEEKLKRQRQQQELIKTKLKECKVPMNELPIVYPANNSKRVYSEEEDRFILMMVNKYGLEHPKLFEKIRKEIKKSPHFRFDWFFLSRSTSELSRRCTTLMLTLSREVEGPRTIKRKSLGKGKLDDDKRRRESGTMTPDTEDRGTPMSVE

SEQ ID NO: 12024 - protein, 466 aa, Debaryomyces hansenii CBS767
MVSNSPRYSEESARPEHHAMYDPTVFQINRRFRIKLSQLKYFTFTIIGIALLWPWNCFLSASAFYSERFEHSPQLVRIYSSTMMSVSTITSALYNYYLSQVQVGVNYNHRVNVGFSMTIGVFIIMAFSCVLNVFITMDDYLFFTGLMIMVFISAAATCLAQNGTMATVNVMGSLYANGVMVGQAIAGVLPSSALIISILIVGDKKADADKENQYMDKNYGVFIYYITASLIAVLSISLLYFTNHYKIESTYKTLNHMVEEQQPLNSSDDDSEGEPEVTQKKYVPFMVLWSKLKLIVLTIFLTFGITLIFPVFASTVESVHKDSDHTLLQRKIFIPFIYLVWNLGDFLGRVCCGKPRLAVLIKNPKVLLMYSIARLIFIPLFLTCNVNSASSGKSNAIINSDTWYIMLQFLFGLSNGQLCTSCFMIVGNNCDTDDEKEAAGGFTTVFLSVGLAFGSVFSYLLVLMIN

SEQ ID NO: 12025 - protein, 665 aa, Oryza sativa Japonica Group
MDRVRGCAFLLGVLLAGSLFAFSVAKEETKKLGTVIGIDLGTTYSCVGVYKNGHVEIIANDQGNRITPSWVAFTDSERLIGEAAKNQAAVNPERTIFDVKRLIGRKFEDKEVQRDMKLVPYKIVNKDGKPYIQVKIKDGENKVFSPEEVSAMILGKMKETAEAYLGKKINDAVVTVPAYFNDAQRQATKDAGVIAGLNVARIINEPTAAAIAYGLDKKGGEKNILVFDLGGGTFDVSILTIDNGVFEVLATNGDTHLGGEDFDQRIMEYFIKLIKKKYSKDISKDNRALGKLRREAERAKRALSNQHQVRVEIESLFDGTDFSEPLTRARFEELNNDLFRKTMGPVKKAMDDAGLEKSQIHEIVLVGGSTRIPKVQQLLRDYFEGKEPNKGVNPDEAVAYGAAVQGSILSGEGGDETKDILLLDVAPLTLGIETVGGVMTKLIPRNTVIPTKKSQVFTTYQDQQTTVSIQVFEGERSMTKDCRLLGKFDLSGIPAAPRGTPQIEVTFEVDANGILNVKAEDKGTGKSEKITITNEKGRLSQEEIDRMVREAEEFAEEDKKVKERIDARNQLETYVYNMKNTVGDKDKLADKLESEEKEKVEEALKEALEWLDENQTAEKEEYEEKLKEVEAVCNPIISAVYQRTGGAPGGGADGEGGVDDEHDEL

SEQ ID NO: 12026 - protein, 603 aa, Yarrowia lipolytica CLIB122
MDEDRQNRSKKLKYLFDPRQDVLRFGQPKKQVFCPLCPLDITGLSISERNAHAEKCLGVECLDDDGVTCATPTKGDLTFDTSTITPATVKMEEMQAVGTPIFLADEFLHLLKGGVKSKVKEEIKDEVYFSADETMDTTVVETQSLTRAVETPTKKPRRAPQRKAKAKEPTSTQSMMVCNSQGEMTSAVVEPVKKQKRAKKPAPSFKIIKMGETNVAVDSFMHGPLEGINLYFLSHFHADHYGGLRKSWNHGPIFCTPITAALCKMKLGVQDEWLVPIPIHIPFCVGNDVEVIFFDANHCPGAAVMLFTSPTKTAVHCGDFRANMNLVREIKLKLKQRELDEVYLDTTYLGPSHAFPSQNRVVQVCADFCVRLNNLKMEQLEKAQRQSTIGRFFTSSPNSPVHQLRTLFVVGTYTIGKERLAIEIALRLGSKLFADTTKRRILKTFNDPVISELLTSDPLEAQVHLVPLGQTRKDQLFEHLKSFKPHFSKIVAFAPTGWSYRPPKSAIQANEQATDLRPSYYDFGDLEYNVENLDRNLERSAIEPVQKYNVPYSEHSSFVELRAFCLNMAATTIIPTVNMSADESVRRQMYWLEMWTGQAREGV

SEQ ID NO: 12027 - protein, 156 aa, Glycine max
MEPMDIVGKAKEDASLPKATMTKIIKEMLPPDVRVARDAQDLLIECCVEFINLVSSESNEVCNKEERRTIAPEHVLKALGVLGFGEYIEEVYAAYEQHKLETMQDSLKGAKWSNRAEMTEEEALAEQQRMFAEARARMNGGAITSKQPDAHQSLES

SEQ ID NO: 12028 - protein, 468 aa, Pseudoalteromonas tunicata D2
MSQSVLQFIKDNDVKFIDLRFTDTKGKEQHVSIPHHQVDEDFFEDGKMFDGSSIAGWKGINESDMVLMPDASSVKLDPFTEEVTLIVRCDVVEPGTLIGYTRDPRSVAKRAEEYMRSTGIADTVLFGPEPEFFVFDDVKYKTDMSGSMFKIDSKQAAWNSDKEYEGGNTGHRPGVKGGYFPVAPVDDFQDWRSATCLVLEEMGHVVEAHHHEVATAGQNEIATRFNTMVTKADEIQEMKYVIHNMAHLYGKTATFMPKPIVGDNGSGMHCHQSLAKDGVNLFAGDKYAGLSEEAIYYIGGIIKHAKAINAFANPATNSYKRLVPHFEAPVMLAYSARNRSASIRIPVVPSAKGRRIEVRFPDPAANPYLAFSAMLMAGLDGIKNKIHPGDAMDKDLYDLPAEEAAEIPQVAGSLQEALDCLSADREFLTQGGVFTDDLIDAYIDLKTKEVQKLNTSTHPVEFEMYYSC

SEQ ID NO: 12029 - protein, 490 aa, Thermotoga maritima MSB8
MNISTIVSNLKDLILEVRAPYDLEITGVSNHSSKVKKGDLFICRRGEKFDSHEIIPEVMEKGAVAVVVEREIDLDFPYIQVFDSRYFEAKVASLFFEDPWKDVLTFGVTGTNGKTTTTMMIYHMLTSLGERGSVLTTAVKRILGNSYYDDITTPDAITILSAMKENREGGGKFFALEVSSHALVQQRVEGVRFDVGIFTNISRDHLDFHGTFENYLKAKLHLFDLLKDDGVAVLNESLADAFNRKSRKITFGTSKNADYRLGNIEVSWEGTQFVLETPDGLLKVFTRAIGDFNAYNAAAAIAALHQLGYDPKDLASSLETFTGVEGRFEVVRGAKKIGLNVVVDFAHSPDALEKLLKNVRKISQGRVIVVFGAGGNSDRGKRPMMSEVASKLADVVILTTDDPRGEDPEQIMEDLIKGIDKRKPYLVLFDRREAIETALTIANRGDSVVIAGRGHERYQIIDEEKKVPFQDREVVEEIIRDKLKGRKYAQ

SEQ ID NO: 12030 - protein, 464 aa, Candida glabrata CBS 138
MAKRRQKKRTHVQVVPDEERGIPKSMVIRVGQTSLGNHSLNQLVKDFRQIMQPHTAIRLKERKSNKLKDFVVMCGPLGVSHLFMFTQSEKTGNVSLKIARTPKGPTITFQVMDYSLGRDIKKYLRRPKSLTKEDVMNPPLLVLNGFTTKPKDENDEKEVERANVDKIVVSMFQNIFPPLNPSRIHINSIKRVFMINKDKETGEISMRHYFIDIREVDISRNLKKLYKAKNNLSKAVPNLHKKEDISSLILDHDIGAYTSESEIEEDSIVKVMDTESVKVKRSVKHKEDDTVEEAKDVDGDEDMKDFESSNIPLEEDDENEQEQAPVSTPRKKAVRLTEIGPRLTLKLVKLEEGICSGKVLHHEFVQKTDSEIRALEKRHKEKMRIKEQRRKEQEENIAKKKAHKEAKRQRKLERRAARKAAAEEGSEEGKDISESESDSSSSESENEYKDVPEDIDSDLYSDIE

SEQ ID NO: 12031 - protein, 159 aa, Synechococcus sp. CC9311
MAPNISNVSVNTPDGANKTLGSYSGKVLLIVNVASRCGFTRQYSGLQALQDSYAAQGLQVLGFPCNDFGGQEPGSLEEIKSFCSTTYNASFELFDKVHATGSTTEPYTTLNKTEPAGDVAWNFEKFLVGKDGTVIARFKSGVEPDSDELKTAIESALNA

SEQ ID NO: 12032 - protein, 493 aa, Bacillus thuringiensis serovar konkukian str. 97-27
MKLKELTSLLLIKDTVGDMNIEITGLEMDSRKITSGNLFICVSGINGFLEDRHQFVEDAVKNGAVALIVERDVNIEIPKIIVKDARYAMAVIASHFYDYPSNKMKLIGITGTNGKTTTSYLLEKILSDYGYHTGLMGNNGVKVGSKWYPTDINTQEPPTLQRNLQMMKNQNVDYCVMEVTSQGLHMERVKGCNFKIAVFTNLTQDHLDYHGTFDEYKHVKGLLFSRLGNDLSTTDKKIAVLNADDPSVEYFKKITSAEVITYGIHNRADVQAKNITLSPKGIRFLVSSFNGEIEVSLNLVGRFNVYNALAAITVALVEGIPLTNISDSLSTLKRIEGRMEIIDENQDFLVIVDYAHTPDALENVLSTISEFSKGKVITVFGCGGDRDAKKRSIMGGIAGSYSDFVFITSDNPRSEDPQAITKDIEKGFSQNNNLNYKVEVDRELAINHAINMASSNDIVLIAGKGHETYQILKDSTIHFDDKEKARQAIINNR

SEQ ID NO: 12033 - protein, 925 aa, Synechococcus sp. PCC 7335
MKVLKTQTLRGPNYWSIRYGKLIVVRLDLEDLAERPSDTIDGFYDGLVSALPSLVEHFCSPGVRGGFLSRLQTGTMMGHIVEHVALELQTLAGMRVGFGRTRETSDPGVYQVVFQYENEAAGRYAARAALRLCESIIETGFYPDSEIRKDLEDLKELRAAAALGPSTEALVRAAEARNVPWLELDVRNLLQFGYGVHQKRVQASLTSHSNILSVELACDKEATKRMLGNAGIPVPKGTVVYSLRELEESLDYLGGYPIVVKPLDGNHGRGITLNISSWEQAEAAYDLARQVSDGVIVEHHYQGRDHRILVVDNKMVAVAERVPAHVVGNGIDTIEALVDRENQDPRRGEGHDNLLTQIRLDRTSDQLMESQGYNLDTVLRKGEICYLRATANLSTGGIAIDRTDEIHPETIWIAERAARLLGLDVAGIDVVTTDISKTLAVADGVIVEVNAAPGLRMHVSPSQGLARNVGAPILDMLIPPDQPSRIPIVAITGTNGKTTTTRLTAHIFRQVYSMVGYTTTDGIYIGNHLVEKGDTTGPQSARLILEDPTVEMAVLETARGGLLRSGLAFDQSDVGIVLNVAADHLGIGDIDTIDQLAKLKAVVAESVAGSGYVVLNADDHRVAAMAERVKAAKVAYFSMDSKNPLVRSHLANGGIAAVYEEGYLSIIQQDWLHRIIKAERVPLTMGGRAPFMIANALAASLAGFVQGVKIEQIRAALHSFQPSASQIPGRMNLFDMGNYHALVDYAHNPAGYAAIGSFVKNWPGPAIGVVGAPGDRRDEDLIELGQLSVDIFDQVIIKEDKDRRGRSPGAVAALIEQGILQTDESQRSTDFSYHIELDESEAVNHALDSAPDNCLVVILPESISRAISLISAKGPVSEGFSPANSSGPILKSDSDTSGAEPAEDLDNTSRKELQLFNGATASSIL

SEQ ID NO: 12034 - protein, 446 aa, Methanococcus voltae
MTSLEMALEYIKINNVKFLRFQFVDIHGEPKNIAYPVKLGTADGEEELMGVLENGLFFDGSSIEGFVEIEDSDMVLKPDLSTLSVLPWRPSEKSVARIICDVYRKNGKPFEGDPRGCLKRVLAEFKEEFKGEYFVGPEPEFFILKNENGKWVPGDDAGYFELEPLDEGNDLRRNIVFALENLGFHVEASHHEVAPGQHEVDFKYDNAVKTADSVITFKTTIKTLAKQSGVLATFMPKPFFGMNGSGMHCNQSIWLDGKPSFYDENNAHQLSDICLSYIGGILEHTKALVSVTNPTVNSYKRLVPGYEAPVNIAWANSNRTSIIRVPAARGKGTRVEFRAPDPACNPYLAFTVMLAAGLDGVRRKLIAPEPVEKNIFAMSEAEKREANIDSVPSNLYDAIEELRQDKVLKKALGDHIFNKFIEIKTKEYDAYRTAVTDWEFNKYVRI

SEQ ID NO: 12035 - protein, 161 aa, Kluyveromyces lactis NRRL Y-1140
MSKFYELAPKDKKGEPFPFTQLEGKVVLIVNVASKCGFTPQYKELEALYKKYEDKGFIVLGFPCNQFGHQEPGTDEEISQFCQLNYGVSFPILKKVDVNGSEADPVYDFLKNEKSGLLGFKGIKWNFEKFLVDKKGTVVERYSSLTKPSSLEEPIEKLLNE

SEQ ID NO: 12036 - protein, 391 aa, Austrobuxus megacarpus; identical to SEQ ID NO: 8613

SEQ ID NO: 12037 - protein, 472 aa, Neisseria gonorrhoeae
MSIKNAVKLIEKSKARFVDLRFTDTKGKQHHFTVPARIVLEGPEEWFENGQAFDGSSIGGWKGIQASDMQLRPDASTAFVDPFYDDVTVVITCDVIDPADGQGYDRDPRSIARRAEAYLKSSGIGDTAYFGPEPEFFVFDGVEFETDMHKTRYEITSESGAWASGLHMDGQNTGHRPAVKGGYAPVAPIDCGQDLRSAMVNILEGLGIEVEVHHSEVGTGSQMEIGTRFATLVKRADQTQDMKYVIQNVAHNFGKTATFMPKPIMGDNGSGMHVHQSIWKDGQNLFAGDGYAGLSDTALYYIGGIIKHAKALNAITNPSTNSYKRLVPHFEAPTKLAYSAKNRSASIRIPSVNSSKARRIEARFPDPTANPYLAFAALLMAGLDGIQNKIHPGDPADKNLYDLPPEEDALVPTVCASLEEALAALKADHEFLLRGGVFSKDWIDSYIAFKEEDVRRIRMAPHPLEFEMYYSL

SEQ ID NO: 12038 - protein, 679 aa, Staphylococcus epidermidis ATCC 12228
MEIFETLLIFVALVIVSSFVHTFIPKVPLAFIQIFLGMILYLTPIPVEFNFDSELFMVTLIAPLLFVEGVNVSRVHLRKYIKPVMMMALGLVITTVIGVGLFIHWIWPELPIGAAFAIAAILCPTDAVAVQAITKGKVLPKGSMTILEGESLLNDAAGIISFKIAVGVLITGTFSIFDAIQQFLIASIGGAIVGLIIGMALVRFRLTLMRRGIENINMFTFIQLLTPFVTYLIAELFHASGIIAAVVAGLVHGFERDRIAQTRTQLQMSYNHTWSILGYVLNGFVFSILGFLVPEVIVKIIKTEPHNLLFLIVITLLVALAVYLFRFVWVYVLYPYFYLSVSPFQKMISKNDEDKVTESKPKRSLYALIMTLCGVHGTISLAIALTLPYLLANHETFAYRNDLLFIASGMVILSLIIAQVILPLVTPDSPEVKIGNMSFKEARIYILEHVIDYLNQKSTFETSYRYGNVIKDYHDKLTFLKTVEKEDENSKELERLQKIAFNVETKTLEKLVDDGEITESVLENYMRYAERTEVYKQASLLRRIIVGLRGMLLKRRVKTKINSASSLSVTDNLLELGKINKLVHYNVVSRLAKEATTDNKLEVGMICDGYLMRIDNLTPNNFFNSRHEDTLTKIKLNALREQRRILRELIENDEITEGTALKLRESINYDEMVIVDSMT

SEQ ID NO: 12039 - protein, 391 aa, Balanops vieillardii; identical to SEQ ID NO: 8616

SEQ ID NO: 12040 - protein, 1166 aa, Triticum aestivum; identical to SEQ ID NO: 8617

SEQ ID NO: 12041 - protein, 129 aa, Brassica napus
QALVEKPFFETLARALKPGGVLCNMAESMWLHTHLIEDMISVCRQTFKTVHYAWSSVPTYPSGVIGFILCSTDGPAVDFKNPINPIEKLDGAMTYKREMKFYNSDMHRAAFALPTFLRREVASLLSSSS

SEQ ID NO: 12042 - protein, 469 aa, Proteus vulgaris
MSLEHVLSMIEEHKVRYIDLRFTDTRGKEQHLTIPAHQVNDDFFEEGKMFDGSSIGGWKGINESDMVLMPDASTAMLDPFFQDPTLIIRCDVLEPGTMQGYDRDPRSISKRAEDYLKSSGIADTVLFGPEPEFFLFDDIRFKNDISGASYAINDIEAAWNTNTKYEDGNKGHRPMVKGGYFPLPPVDSSQDIRSTMCNIMEEMGLVVEAHHHEVATAGQNEVATRFNTMTKKADETQIYKYVVQNVAHVFGKTATFMPKPLVGDNGSGMHCHMSLSKNGTNLFAGDKYGGLSEMALYYIGGIIKHARALNAFTNPTTNSYKRLVPGFEAPVMLAYSARNRSASIRIPVVASMKARRIEVRFPDPLANPYLAFAAQLMAGLDGITNKIHPGDAMDKNLYDLPPEEAKEIPTVAGSLEEALNALDADREFLTHGGVFTNDSIDAYLALLRTDVQRVRMAPHPLEFEMYYSA

SEQ ID NO: 12043 - protein, 214 aa, Vitis vinifera
MDLQEGLEALVEEVATKAAPLRSSSKRSRAAEVHNLSEKRRRSRINEKMKALQNLIPNSNKTDKASMLDEAIEYLKQLQLQVQMLSMRNGLSLHPMCLPGVLPPVQLSQMRIGIGEENGSLHMDMTGTLPVNQETMEYRLANQGTSSSHPSVPNLTDIMNSETSFGLESSIQAHLGPFQLQTSSADICREDVLPHQQLNISCAGTNSLGGSSKP

SEQ ID NO: 12044 - protein, 390 aa, Bergia texana; identical to SEQ ID NO: 8618

SEQ ID NO: 12045 - protein, 727 aa, Xylella fastidiosa Temecula1
MSLRILNSLKVALLTLAITTAPALMAKSDSASPQVATPDQTTATKLVYGLLSDSRYAYRLRPLDETMSKDIFKRYLEALDNNKQFFTEADIDNFSAFKAEIPDSIRNGNLKPAFSIFTVYKKRVAERVTYANQLLKQNFDFSGQEKYEYDRSKAPWPASPQDLDDIWRRSIMNDWLRLKLAGKKPEDIRKTLKKRYANLLKTVNELKGEDVFQLYLNAYTNSIDPHTDYFTPRTADAFNQQMSLSLEGIGAQLQKQEDMVIIREVIPGGPTALDGTLKPGDRIVGVGQGKGGPIEDVIGLRIDDVVSKIRGKKDTQVRLEYIPAESGIDGAHRIVTLTRQKVRLAEQAAKGETITIEGSNGDAQRRIGIIKLPTFYEDFEGRRRNLANYTSATRDVAKLLTNFKTDKVDGVVLDLRNNGGGSLDEAIQLTGLFIEQGPVVQVRESGGRVTVNGDRDDKVTWDGPLAVLINRGSASASEIFAGAIQDYGRGLVIGETSFGKGTVQNIVDLDRWPANESRRFGQVKLTIAQFFRISGSSTQHKGVLPDIAFPASVGATEFGESTYENALPWTRIASLQHTQYGNFSPILSKLKKIHISRTANDIEFKWWQEDVHNFSLEKEKKYVILNEAERLAERRKQETQHRERQTIRKNLGLQLDPLSEESDDGLIGNERDIAKDTAREKLADKRPDPLLHESAAILTDTINLLEKDQILSAQVLLQSTTPGHWAN

SEQ ID NO: 12046 - protein, 607 aa, Zea mays
LITTYDIVRNNYKLIRGNSYNNSNDDDDEEGTLWNYVILDEGHLIKNNKTQRAQSLYEIPCAHRIVISGTPIQNNLKEMWTLFNFCCPDVLGDKQQFKIRYETAILRGNDKNATAREKHVGSNVAKELRERIKPYFLRRLKSEVVFDTGASEEKTLAKKNELIVWLKLTPCQRKLYEAFLNSELVHLALQPKASPLAAITILKKICDHPLLLTKKGAEGVLEGMGEMLNDQDIGMVEKMAMNLADMAHDDNALEVGQDVSCKLSFIMSLLRNLVGEGHHVLIFSQTRKMLNLIQEAIILEGYAFLRIDGTTKVSDRERIVKDFQEGCGAPVFLLTTQVGGLGLTLTKATRVIVVDPAWNPSTDNQSVDRAYRIGQTKNVIVYRLMTSATIEEKIYKLQVLKGALFRTATEQKEQTRYFSKSEIQELFSLPQQGFDVSLTHKQLQEEHGQQVVLDESLRKHIQFLEQQGIAGVSHHSLLFSKTATLPTLSENDALDSKPRGMPMMPQQYYKGSSSDYVANGASFALKPKDESFTVRNYIPSNRSAESPEEIKARINRLSQTLSNAVLLSKLPDGGEKIRRQINELDEKLTSAEKGLKEGGTEVISLDD

SEQ ID NO: 12047 - protein, 454 aa, Vibrio sp. Ex25
MIKVTLSQIANITRGELFGDDLLIDAVSTDTRAIDNGALFVALVGERFDAHNFCQQAVDAGAGALLVQKHLDVNVPQVVVSDTKMALGELASWVHQTCQTPTVAITGSCGKTTVKEMVASILQLKGKVLFTAGNFNNDIGVPLTLLRSQQDDDYAVIELGANHIGEIAYTTQLVKPDIALVNNVAAAHLEGFGSIDGVKQAKGEIYQGLAAGSIAIVNLDSSGETKWESVLADKEVITFSQSNSAADYYASNIVMNAAGEASFNLHIAASSQEIELSLGIIGQHNVANAIAASIIALQMGATLEEVRAGLKHLNKVKGRVEVEALSEKIKLIDDSYNASVPAMKAAVDLLAAFPGQRWLILGNMAELGEESLALHRQVGEYAAPQKFEHVLTYGADAKVISELCQGIHFETHQEMIEYIKQHLDQAVPENHTILVKGANGARMFEVAAALKEYY

SEQ ID NO: 12048 - protein, 589 aa, Burkholderia cenocepacia J2315
MHHFRAHAPPVRAHPSRRHATLRTIVSFCLSAVSMEIVFTVLILLLTVALSGAVTRLLPLQLPLPLMQIAFGAMLAWPKLNLHVTFDPEIFMLLFIPPLLFADGWRIPKRELYLQRRAILMLAFGLVFMTVLAVGYFAHWLIPELPLPIAFALAAVLSPTDAVALSGIAGKGRIPPQLMHILEGEALMNDASGLVALKFAIAAALTGVFSLRAASVTFVIVAAGGLATGAIVSWLFSALSTRFLNAEQEGDPAPGIVMTLLVPFAAYLFAEHLDLSGVLAAVSAGMMMNYTSFSRKSTVASRVRAESTWAMIEFVFNGMVFIMLGLQLPHIIGRALVDAHHTSDALVGRMIFNVCAMMLALYAIRFLWVWLLRWFASRRAARQGLAGTMAGVRTIAVMTVGGVRGAVTLAGVLSIPVALSDGAPLPGRDTAIFIASAVILGSLIVAVIGLPLLLRGVRSSRNPLGDEERIARSAAAQAAIRAIDSSHDAISADLDESGAARCADISARVMDQYRRRLAALAEDGPTPRAEAKQAETMELQMRIAAVRAERSALYRLRSDSKISDETLTKLIREIDLSETALSTRKKGIL

SEQ ID NO: 12049 - protein, 390 aa, Bergia texana; identical to SEQ ID NO: 8622

SEQ ID NO: 12050 - protein, 469 aa, Rhodobacter sphaeroides 2.4.1
MSKVADALKLMKDEEVEYVDIRFTDPRGKLQHVTLVADLVDEDFFEEGFMFDGSSIAGWKSIDQSDMKLIPDAGSVYIDPFYAEKTLCVHCNVVEPDTGEAYSRDPRGTAVKAEAYLKASGIGDVAYFGPEAEFFIFDDVRYSVTPAKVAYQIDADAAAWNTDSEYEMGNLAHRAGHKGGYFPVNPIDEAQDLRGEMLSTMKRMGMKVDKHHHEVATCQHELGLIFGGLTEQADNILKYKYVIHNVAAAYGKTVTFMPKPMKGDNGSGMHVNMSIWKDGKPLFAGDKYADLSQEALWFIGGILKHAKALNALTNPATNSYKRLIPGFEAPVLRAYSARNRSGCVRIPWTESPKAKRVEARFPDPSANPYLAFAALLMAGLDGIKNKIDPGPASDKDLYDLPPEELAAIPTVCGSLREALEELEKDHDFLLAGDVFTKDQLEGYMALKWEEVYAYEHTPHPVEYQMYYSC

SEQ ID NO: 12051 - protein, 511 aa, Geobacter metallireducens GS-15
MRLEDLARVINPSEAGGSLALEIEGLYCDSRQVRSGGLFFALRGVATDGHDYIVASRDRGAVAVVVEDPSRVPEGMTWLKVDDARLAMSRAAAAFYGNPTDGIPVVGITGTNGKTTTTYLVEAVMARAGIPVAVLGTISYRFGDKTIPAPHTTPESVDLQRTIRDLVDRGAQGVVMEVSSHALEQRRVDGCRFDVGVFTNLTRDHLDYHRDMESYFESKARLFTELLAADDTKPRRAAVINVDDPYGARLASDAVAPVVSYGLSPSVMVRAEMVTFSVDGISGTLVTPLGTIPFHSRLLGRFNLYNILAAVAAGVALGLSPDAIRGGIEGDVRVPGRLERVDNDHGITVLVDYAHTGDALENVLKTVAEIATGRIITVFGCGGDRDRGKRPVMGEIAGRFSDLSIVTSDNPRTEDAGAIIGEILGGIRSLGLREYGAEELITGFDAKGFAAVESRREAIRLAARVARPGDVLLLAGKGHEDYQIIGTMKHHFDDREEVAAAFRELSSKGQG

SEQ ID NO: 12052 - protein, 391 aa, Calophyllum soulattri; identical to SEQ ID NO: 8627

SEQ ID NO: 12053 - protein, 163 aa, Triticum aestivum
DQLTTELDWTEGKEILLMSGNVRVKQREALMEAFNDMNSEAKVMLASTKACCEGITLVGASRVVLLDVVWNPSVGRQAIGRAYRIGQEKIVYTYNLIAEGTKEKVKYDRQATKDHMSKLLFSNEPQPTGSNLSPELISNDRILEKMAAREELKDMFVQILPSH

SEQ ID NO: 12054 - protein, 545 aa, Xanthomonas oryzae pv. oryzae KACC10331
MHSIDVVLAMLLAVAASGYLIRILPFSLPLPLVQIALGAVVSGVFDAGHELEPELFFLLFLPPLLFLDGWRIPKQGLFRDKAAILELALGLVIFTVIGAGVFIHWLIPAMPLAVAFALAAIISPTDPVAVSSIASKVPIPKRLMHILEGESLLNDASGLVCFQFAVAAVLTGTFSVAAASLTFLWVALAGLALGVATTFGLSRIQAWIWRHFGEEPGSAILVNLLTPFAAYLLAEAFHASGILAAVAAGITMSYVEMAGNAPGNMRLQRSAVWDTVQFTFNGIIFVLLGEQLPGILDGAVRSVQEAGHLNPWWLAVYVATISASLMALRFVWVFLSLRWNIFKAQRRGEAHVSPPWRIVVAVSLAGVRGAITLAGVLTLPLMLEDGSPFPARQLAIFLAASVILVSLLVASVALPRLLRGLELPEEEDEQLKEDLAAKAASQAALDAVEKLRQRLVDGSKHAERYNAAANQVSQRYQRKLGSVDMAETDPEEAVAYEKALRQFRHAALVAERNELFKLARRREISDELSRRLVRNLDLIESRKRA

SEQ ID NO: 12055 - protein, 1028 aa, Oryza sativa
MDPPNHVPAPPRPRGTLGLKRTAPSAAFARTSFAPPSRVAAAPSPAATTKRARLILPTQNLDPDDSVPSPTAAADPVLESPATHTLLLSRNASPHTRTASPAPDTSAPGSSRRSGPFYLCTWRKPQAKKHKTWDGDAILIVKDAGERCALICSETGKELVGSARFAHGQLASGDELALGGKEIEVDRQIDEPEYRRLVAFTRGELSPVKKGPPPTAVRTPKPFVAPIKRFAIKPVDINALAPARAETFYGKPAPKPARSHLLDESRVSGLINPGQGRTPHPRFDPNEHGAIVMKRLDEGHQERHNPKGLPVVDVVLDPQLAKALRPHQIEGVKFLYERVMGMHADGEKGQGAILADKMGLGKTLQTIALVLTLLKQSCYYTPASCTIERAIIVCPLTLVKNWKREFKKWIGTSALNVLCIDEGRGCQDVARFVRSKSYHVLVIGYEKLRTCKDLFKDAPVGLIVCDEGHRLKSKEAKTTQMFDELSAERKIILSGTPIQNDLSEFFAMIDFVAPGMLNSYASFKKISEEPIMRSRAQHCSKHTKATGQARASALMTITNDIILRRTADILSNFLPPKKEMVLFCSPSPEQIRIYQSILASNDVRSLLRGDAGNGLLQIGVLRKLCNTPELLLRDSEADGTSAIKALVGDMARYFPPNFVRNDARFSGKLVCVMQLLEKLRAETDDKVVLVSNFTSTLDIVEAMMRKKRYSYLRLDGKTPQDERMDMVNQFNRDGVDSSFVFLLSAKSGGVGLNLIGANRLVLIDSDWNPSTDLQAMARIHRDGQKKVCYIYRLLLSGTMDEKIYQRQISKLGLTDSLIKGDKSSSDTFSQEELRDIFTLHLDSPCISHRQLVCDCDRRGGGASLDGLAEGMDASQTSVASSDDDLPGFVAASQHVVDRAQKDKLDKRKRLLALYKWAHYDCVQHPESFEEDEMVAALVRQSNSSVRANGAKKSEDEWSTSMADRADDLFLGSDDSGRDEDGIGEQQMDGGEGFRLDNMQTGRILFVFAKNSDKTSDKVESETTPPASD

SEQ ID NO: 12056 - protein, 293 aa, Saccharomyces cerevisiae YJM789
MTQEITHPTIVDGWFREISDTMWPGQAMTLKVEKVLHHEKSKYQDVLIFKSTTYGNVLVLDNVIQATERDEFAYQEMIAHLALNSHPNPKKVLVIGGGDGGVLREVVKHDSVEEAWLCDIDEAVIRLSKEYLPEMAASYSHPKVKTHIGDGFQFLRDYQNTFDVIITDSSDPEGPAETLFQKEYFQLLNSALTEKGVITTQAESMWIHLPIIKDLKKACSEVFPVAEYSFVTIPTYPTGTIGFMVCSKDKTCNVKKPLREISDEKEAELYRYYNKKIHEASFVLPTWAAKELN

SEQ ID NO: 12057 - protein, 220 aa, Picea sitchensis; identical to SEQ ID NO: 271

SEQ ID NO: 12058 - protein, 1517 aa, Aspergillus nidulans FGSC A4
MVIPSTSEPGVTSAFANGYSVSPVTDAAGLHNELAANDHGNTVFQSPEDDAVSESSDNADPADDSYNTDSPDAEGEDDESGTENSAKASSPPVAENSSSPQTTRGTKRKSPSVDDADFIRQNPDLYGLRRSGRARTTRRVAESSSESESDDVAPRSKRRRPLASQISKAPTRSATQSTFSDDSDSDEYGGSRARASKAKRRRLLQASANNVPSHAEVRFSTRNAAKVSNYNEDDDDSMFEDDADDLTPNYWVNTVEDDRPAIDIVLNHRPKPGVDPSDPDIDRHQFEFYIKWQEKSHYHATWETTESLANCRSTRRLDNYVRKVLAEDLRLNYDEGVPPEDREKWNLDRERDVDAIEDHKIVERVIAMREGEDGTEYLVKWKRLFYDSCTWESEELISNIAQREIDRFLDRSSRPPVSDKKESHPSSRKPFEPIKGTPSFLHNGQLKEFQVKGVNFMAFNWVKNRNVVLADEMGLGKTVQTVAFISWLRHVRRQQGPFVVVVPLSTMPSWAETFDNWSPDLNYVVYNGNEASRNVLKEYELMVDGNPRRPKFNVLLTTYEYVLVDSSFLSQFNWQFMAVDEAHRLKNRDSQLYIKLQEFNSPARLLITGTPIQNNLAELSALLDFLNPGLVNVDADMDLNSEAASEKLAELTKAISPFMLRRTKTKVESDLPPKTEKIIRVELSDVQLEYYKNILTKNYAALNEGTKGQKQSLLNIMMELKKASNHPFMFPSAETKILEGSTRREDVLRALITSSGKMMLLDQLLAKLKRDGHRVLIFSQMVKMLDILGDYMEYRGYTYQRLDGTIPSASRRLAIEHYNAPDSSDFAFILSTRAGGLGINLMTADTVILFDSDWNPQADLQAMARAHRIGQTKPVSVYRLVSKDTVEEEVIERARNKLLLEFITIQRGVTDKEASEIQNKMARGGITLGEPNSTDDISRILKRRGQRMFEQTGNQAKLEQLDIDSVLANAELHQTEQAEGIQADGGEEFLKAFDYVDIKVDDLTWDDIIPKEQLEEIKAEEKKKADEKYLADVIEQNRPRKRIVAGDERDTRAERKAKRQARVQVSMNDDDGDDSEPNAKADPKRPLVEKEYRHLLRAFLRYGDIEDREEEVIREARLTERDRDTVKSALREITDKAAELVREDVARLEALENAGKVLTKKERKAVLFDLHGVKRLNAYTIVERPTEMRVLKEATLAVPDFRNFRVPEATKAPDYSCSWGAREDGMLCVGISRHGYGAWMQIRDDPDLGLGDKFFLEEHRVERKTERLNAEDKSTKSPGAVHLVRRADYLLSILRDKASNGSNTTAKRAVDNHHRNARKSTSRPHASASVSASPAPSLQRKGHREQDRSRHRSHTHGGRDSMERHNTPNRDSRARSINENDRRYRPSDASSEDVRRRKNSENGHSASKEDMSRRFFKPIRDDLKKVADVTKENFPNKAERASELRRLLNKIGDFINSNLQGENTGSLSSLETRLWHYVSVHYWPNKDAGGAKLQEMYHKLIEVHKKSAEHTVASKGD

SEQ ID NO: 12059 - protein, 397 aa, Oryza sativa Japonica Group; identical to SEQ ID NO: 11660

SEQ ID NO: 12060 - protein, 468 aa, Nitrosomonas europaea ATCC 19718
MAADVLKMIQDHEVKFVDLRFTDTNGKEHHVTVPAHTFDTDKFEDGHAFDGSSIAGWKNIHASDMLLMPDPETAALDPFMEETTLLLTCDVVDPADGQGYNRDPRSLAKRGETYLKSTGIGDIAYFGPELEFFIFDSVRWHTDMSGCFVKIESEEAAWSSKKRYEKSNNGYRPAVKGGYMPVPPVDSLHDIRSAMCMVLDELGIPVEVHHHEVANAGQCEIGTRFSSLVKRADWNQLMKYVIHNIAVSYGKTATFMPKPIVGDNGSGMHVHQSIWKEGKNLFAGNGYAGMSETALYYIGGIIRHAKALNAFANPGTNSYKRLVAGFEAPVNIAYSASNRSAAVRIPYASSPKQRRIEIRFPDPSANPYLTFTALLMAGLDGIQNKIHPGDPMDKNLYDLPPEEASMVPNTCASLEEALASLDSDREFLTRGNVFSNDMIDAFIKLKSEEATLLRTTTHPVEFALYYSL

SEQ ID NO: 12061 - protein, 335 aa, Malus x domestica
MADESVAGSADFPVKRPREEEENGSAAAASAVSMEPDGGKEPDSVSAVIPGWFSEISSMWPGEAHSLKIEKILFQGKSDYQNVMVFQSATYGKVLVLDGVIQLTERDECAYQEMITHLPLCSIPNPKKVLVIGGGDGGVLREVARYASVEKIDICEIDKMVIDVSKQFFPEVAIGYEDPRVTLHVGDGVAFLKAVPAGTYDAVIVDSSDPIGPAKELFEKPFFQTVANALRPGGVVCTQAESIWLHMHIIEDIVANCREIFKGSVNYAWTTVPTYPSGVIGFMLCSTEGTAVDFKHPVNSIDESKRPLRFYNSEIHTAAFCLPSFAKKVIDAKAK

SEQ ID NO: 12062 - protein, 480 aa, Oceanobacillus iheyensis HTE831
MTWYISYIGLYFILMLSMGIYYFFKVKTYDEYLIGGWNTNFWPIVGTIISTWCGAAVFIGWVGMGFTVGLSGYFKFALPGILFCLLLIVAFAGPLRRQRLYTIADLFGERFGGKSGIIPSVLSAFIYSVPTLALQMIGMSSIFTIALGIDVNTGIALSFVLIVSFTILGGLPATIITDAIQSIIVIIGIIVLAISSINFAGGFENIIANTPADYISPLGAEGLGSVLLYALSVGPFYIIWQSTWQRIFASKSEQVAKKAGVTGFIIAGLISILPYTIGVIARQFVPTDMDPDLIFSYVTAELLHPAIGGIVFIGLLAALMTGATSFILQGSSNLTRDLYQRLVRPNANNKQLMFSARISVIIISLLGLIAAYFVTNIETAYQWALRLSATVLVFPFLAVMFWKRVTKKGMIWSMISALIATLSWPYLGLNIDHTIFGFSVSILTLVIISLLTRHDNSEQVRAVYWNDLNSANPSETKSEQ

SEQ ID NO: 12063 - protein, 335 aa, Malus x domestica
MADEIVVGSADLPLKRPREEEENGAEAAASAVSMETDGGKEPDSVSAVIPGWFSEISPMWPGEAHSLKIEKILFQGKSDYQNVMVFQSATYGKVLVLDGVIQLTERDECAYQEMITHLPLCSIPNPKKVLVIGGGDGGVLREVARYASVEKIDICEIDKMVVDVSKQFFPDVAIGYDDPRVSLHVGDGVAFLKAVPAGTYDAVIVDSSDPIGPAKELFEKPFFQTVANALRPGGVVCTQAESIWLHMDIIEDIVENCREVFKGSVNYAWTTVPTYPSGVIGFMLCSTEGPAVDFKHPVNSIDASKRPLKFYNSEIHTAAFCLPSFAKKVIDAKAK

SEQ ID NO: 12064 - protein, 292 aa, Malus x domestica
MINFTPLLSYMSSSVGMQGEAHSLKIEKILFQGKSDYQNVMVFQSATYGKVLVLDGVIQLTERDECAYQEMITHLPLCSIPNPKKVLVIGGGDGGVLREVARYASVEKIDICEIDKMVVDVSKQFFPDVAIGYDDPRVSLHVGDGVAFLKAVPAGTYDAVIVDSSDPIGPAKELFEKPFFQTVANALRPGGVVCTQAESIWLHMDIIEDIVENCREVFKGSVNYAWTTVPTYPSGVIGFMLCSTEGPAVDFKHPVNSIDASKRPLKFYNSEIHTAAFCLPSFAKKVIDAKAK

SEQ ID NO: 12065 - protein, 494 aa, Solibacter usitatus Ellin6076
MNLGEILSSVKLPRPLAPELAQTEVTGLAYDSRRVTPGVLFFAFPGSKADGREFAADALARGAVAVISESLAPPDLAARWIQVEHGRHALALAARTFFGRPDERLGLTGITGTNGKTTTAYLTDSVLRAAGGVTAMIGTIEYHLAGRVLKAVNTTPESLDLLQIFSDLLRAGGTHVTMEVSSHALALGRVHGLNFHTAVFTNLTRDHLDFHGDMERYFAAKQMLFEGAGGNPPRFAVLNTDDEYSRRLRLHARTERLWYGMTPEADLRPRHIVSSFKGLRFDLQFRKQRFTIESPLIGKINVYNILAACATGFSYGLAPEVVARGIASLKAVPGRFERVDEGQPFVVVVDYAHTDDALRNVIAVARGLNPRRVITLFGCGGDRDRAKRPLMGKAAAEASDFVVLTSDNPRSEDPLTIMNDALVGIRRTDVAHVVEPDREAAIRRAIKEAREGDIVILAGKGHETYQVLKDKTIDFDDRAVAREVLKGYGYHQTQ

SEQ ID NO: 12066 - protein, 160 aa, Pseudomonas putida GB-1
MSAFHDLKLDALNGGELPLAPFKGQVVLVVNVASKCGLTPQYKALENLYQVYKDKGFNVLGLPCNQFAGQEPGSEKEIQDFCSLNYGVSFPLGGKLEVNGPQRHSLYRLLAGEGAEFPGDITWNFEKFLVGKDGRVLARFSPRTAPDDPAVVQAIEKALA

SEQ ID NO: 12067 - protein, 639 aa, Lentisphaera araneosa HTCC2155
MAKILGIDLGTTNSCMAVMENGEATVIPNAEGHRTTPSVVAFAKNDEELVGQTAKRQAVTNPTNTIFSAKRFMGRKFAEVKHEIDLVPYEVVEAKNGDAHIKVGDKVYSPPEISAKIIAKLKRDAEAYLGETLTEAVITVPAYFNDAQRQATKDAGRIAGVDVKRIINEPTAAALSYGLEKDNEQRICVYDLGGGTFDVTVLELGDGVFEVEATNGDTHLGGDDFDESIINLLVEEFKKENGIDLRQDAFALQRLKEEGEKAKCELSTAQSTDINLPFITADATGPKHLQFTLSRAKLEEVTDSLVTRSILPVDACLKDAGASVGDIDEIIMVGGQTRMPKVIEAVKARFGKDLHRGVNPDECVALGAAIQGGVLTGDVNDVLLLDVTPLSLGIETMGGVFTALIERNTTIPTKKSETFSTAADNQTAVDIVVYQGERPMAQQNKKIGDFRLDEIKSAPRGTPQIEVTFDIDANGILKVSAKDKETGKEQHITIQPDSGLSEDEIERMVNDAKDNEAADKELRENIETKNKAEGLVFQVEKQLGEIGDKVPADVKESFDADIAKIKEACEANNYAEIKELTEKFEARLQELGQYMGAPGADGAGAGAAGAAGAAGAGAAGAADSEKKKEDDDIIDADFV

SEQ ID NO: 12068 - protein, 482 aa, Bacteroides thetaiotaomicron VPI-5482
MLLNELLKAIQPVQVTGDSRIEITGVNIDSRLVEAGQLFMAMRGTQTDGHAYIPAAIQKGATAILCEDIPEEPVAGITYIQVKDSEDAVGKIATTFYGNPTSQFELVGVTGTNGKTTIATLLYNTFRYFGYKVGLISTVCNYIDDQPIPTEHTTPDPITLNRLLGQMADEGCKYVFMEVSSHSIAQKRISGLKFAGGIFTNLTRDHLDYHKTVENYLKAKKKFFDDMPKNAFSLTNLDDKNGLVMTQNTRSKVYTYSLRSLSDFKGRVIESHFEGMLLDFNNHELAVQFIGKFNASNLLAVFGAAVLLGKKEEDVLLALSTLHPVAGRFDAIRSPKGVTAIVDYAHTPDALVNVLNAIHGVLEGKGKVITVVGAGGNRDKGKRPIMAKEAAKASDRVIITSDNPRFEEPQEIINDMLAGLDAEDMKKTLSIADRKEAIRTACMLAEKGDVILVAGKGHENYQEIKGVKHHFDDKEVLKEIFN

SEQ ID NO: 12069 - protein, 727 aa, Xylella fastidiosa 9a5c
MSLRILNSLKVALLTLAITTAPALMAKSDSASPQVATPDQTTATKLVYGLLSDSRYAYRLRPLDEAMSKDIFKRYLEALDSNKQFFTQADIDNFSAFKAEIPDSICNGNLKPAFSIFAMYKKRVAERVTYANQLLKQNFDFSGQEKYEYDRSKAPWPASPQDLDDIWRRSTMNDWLRLKLAGKKPEDIRKTLKKRYANLLKTVNELKGEDVFQLYLNAYTNSIDPHTDYFTPRTADAFNQQMSLSLEGIGAQLQKQEDMVIIREVIPGGPTALDGTLKPGDRIVGVGQGKGGPIEDVIGLRIDDVVSKIRGKKDTQVRLEYIPAESGIDGAHRIVTLTRQKVRLAEQAAKGETITIEGSNGDAQRRIGIIKLPTFYEDFEGRRRNVANYTSATRDVAKLLINFKTDKVDGVVLDLRNNGGGSLDEAIQLTGLFIEQGPVVQVRESGGRVTVNGDRDDKVTWDGPLAVLINRGSASASEIFAGAIQDYGRGLVIGETSFGKGTVQNIVDLDRWPANESRRFGQVKLTIAQFFRISGSSTQHKGVLPDIAFPASVGATEFGESTYENALPWTRIASLQHTQYGNFSPILSKLKKIHISRTANDIEFKWWQEDVHNFSLEKEKKYVILNEAERLAERRKQETQHRERQTIRKNLGLQLDPLSEESDDGLIGNERDIAKDTAREKLADKRPDPLLHESAAILTDTINLLEKDQILSAQVLLQSTTPGHWAN

SEQ ID NO: 12070 - protein, 891 aa, delta proteobacterium MLMS-1
MVAHSRTSLSISNIHCYPGAVAGLAEPTALVTLSIKGALPKSWQKPEVALRRQMGRFPLSGPVPGLEGDNWPTQLLLAPPHKGFGPWLAAVAIAIQRLACDPVGQGRVVDISARQIRVALPWQRKPLLADALNLALNWLNLWLQPGKPEQFQQAKGRFEQWLQKAQAGGLAPNTVCFALAAQQLDIPVANLGGGVIQLGWGAGQRRLQSSFTDQTGVIATRLVRHKYVANRLLVDHGLPVPPAGLAANLEQAVKLAEQLGWPVVVKPVDQDQGVGVCPNIRDKERLERAFKAAAQATTKGVLIEKHLTGEDYRLLVYGDELLLATRRTPGGVVGDGKRTVAGLLERVNADPRRGTEKRSLLIALSLDEQALELLAEQGLSADSIPAAGRLVSLRRTANISTGGTAEDVTAVVHPANRALARRAARLMGLDLAGIDLLISDISRPWYEVNGAICEINAQPAFRPHWLAAGGLDINLEVVKRMVAGRTPRIPTAAITGTNGKSTVGQMLHRIWLAAGRTPGLCTTQGVWLGEDLINIKNLSGQPGGRILLSDPAVEVAIVEVARKALHLYGHPCDRYDVAALLNVRDDHIGELGINSLDEMARLKARVLQRARRAVVVNGDDPRCLAMLESVGCDRRILVSANPQQPAVLSHLAAGGEALLRAEHHGAPWLVLQQGDRATPIMALAELNCTMDGLIAVNEENALFAAALAHAQGLAPERIASGLRLFGNNLQHNPYRYNLHETEKGRILIDYAHNPDGVGRLCEMVRRLPVRGRRLAYCGTVGNRGRRFLEECLPMLAATFEQFVLTCDHNRVTQCPDYQGDNPKEIMLGHFTAGLQKQGIAAARIQQDPDPVAAARLALAQLQPDDLLVMLADPHDVGMGDIMDTMGRVTGI

SEQ ID NO: 12071 - protein, 538 aa, Vitis vinifera
MGLNSLAGLGMRSTSDQVSIDAITLFVALLCACIVIGHLLEEYRWMNESITALFIGLCTGIVLLLTTGGKISLILLFNEELFFIYLLPPIIFNAGFQVKKKQFFRNFMTIILFGAIGTLISFGIISLGAIQLFKKLDIGFLEIGDYLAIGAIFSATDSVCTLQVLNQDETPLLYSLVFGEGVVNDATSVVLFNAIQRFDLSHITSGIAFQFVGNFLSLFFASTLLGVFIGLLSAYIMKKLYFGRHSTDREVALMIVMAYLSYIMAELFYLSGILTVFFCGIVMSHYTWHNVTESSRVTTKHTFATLSFVSEIFIFLYVGIDALDIEKWRVVSNSPGTSIGVSSILLGLVLIGRAAFVFPLSFLSNLTKKSESDKIGFKQQITIWWAGLMRGAVSVALAYNQFTMSGHTQLRGNAIMITSTITIVLFSTLVFGLMTKPLISFLLPPPKYFSSMMSSEPSSPKSFSMPLLANGQDPDIEGDSHNTPPPTNLRMLWTTPTHTVHHYWRKFDNAYMRPVFGGRGFVPYVATSLTERNAPQLQ

SEQ ID NO: 12072 - protein, 160 aa, Raphanus sativus
MESEGKIVFTEEQEALVVKSWSVMKKNSADLGLKLFIKIFEIAPTAKKLFSFLRDSPIPAEQNPKLKPHAMSVFVMCCESAAQLRKTGKVTVKETTLKRLGANHSKYGVVDEHFEVTKYALLETIKEAVPEMWSPEMKSAWGQAYDHLVAAIKAEMKPSH

SEQ ID NO: 12073 - protein, 520 aa, Nostoc sp. PCC 7120
MVLESAISEEVIATNLKQFLLVLSVSLGVATLPQVFSWFRQIPYTLLLVIVGLGLAVVDVRLVVLSPALILSIFLPPLLFEAAWNLKWSDLQRDFVPICLYAVFGVIISIAGVAIGLNQLAGISLTTALLIGASLSATDPVSVTALFRELGVGTRLVTLMEGESLFNDGMAVVAFGFLVALPFGNAELGFQPILLQLIQVVGIGVAVGCLIGFAISYLTQRFDLPMVEQSLTLVSAYGTYLITEDLGGSGVIGVVTTGLILGNFGSRIGMNPRTRIIVSEFWEFLAFFVNSIVFLLIGDQIRFASLGENLQIIAITVGAMILMRAVALFILSKLSVMMTQSQVSLPEQTILWWGGLRGSVSIALALSVPNVLPGREKIIATVFGVVLFTLLVQGLTIKPLLQKLNLLGDAPLREQYLQLVARSVALERVLQYLQTEKRPGIDPEFIRYQEKLVTGEIAELQTKIDKLHNEYPNLQNFTTEQFRDELLAIEADTYAEFVKSGRLNKELAPMLEDVLGHQRD

SEQ ID NO: 12074 - protein, 392 aa, Cespedesia bonplandii; identical to SEQ ID NO: 8640

SEQ ID NO: 12075 - protein, 468 aa, Acidithiobacillus ferrooxidans
MGYSPSDVVKLIQEKDIKFIDFRFTDTKGKEQHVSVPGHVIEEDTFTEGKAFDGSSIAGWKGINESDMILLPDPDSAVLDPFMDETTLLLRCDVIEPATGQGYERDPRSVAKRAEIYLKSTGIADTSFFGPEFFVFDSVTWNIDMSGCAYKVDAEEAAWNSGKEYESGNMGHRLGVKGGYFPVPPVDSAQDLRSAMCLAMEEMGLKVEVHHHEVATAGQHEIGVGFNTLTPRRMRCKILKYVVHNVAAVRQTATFMPKPVVGDNGSGMHVHQSLGKDGKNIFAGDLYGGLSEIALYYIGGIIKHAKAVNALTNPSTNSYKRLVPHFEAPVLLAYSAKNRSASIRIPYVNSPKARRIEVRFPDSTANPYLAFSAMLMAGLDGIQNKIHPATAMDKNLYDLPAEEQANIPGVAASLEEALRALEADHDFLMKGGVFSESWLEGYLDVKWAEVQTLRVTTHPVEFQMYYSL

SEQ ID NO: 12076 - protein, 468 aa, Vibrio alginolyticus
MSVEKVLSLIQENEVKFVDLRFTDTKGKEQHISIPAHQIDADFFEEGKMFDGSSVAGWKGINESDMVMMPDASSAVLDPFTEDATLNIRCDILEPATMQGYDRDPRSIAKRAEDFMRSTGVADTVLIGPEPEFFLFDDVKFATDMSGSFFKIDDVEAAWNTGSDYEEGNKGHRPGVKGGYFPVAPVDSSQDIRSAMCLVMEEMGLVVEAHHHEATAGQNEIATRFNTLTTKADEIQIYKYVVHNVAHAFGKTATFMPKPLVGDNGSGMHVHQSLAKDGVNLFAGDKYGGLSEMALYYIGGIIKHARAINAFANPSTNSYKRLVPGFEAPVMLAYSARNRSASIRIPVVPSPKARRIEVRFGDPAANPYLCFASMLMAGLDGIKNKIHPGEAMDKDLYDLPAEESAEIPTVAYSLKDALAELDADREFLTAGGVFSDDFIDSYIELKSQDVERVNMTTHPVEFELYYSV

SEQ ID NO: 12077 - protein, 392 aa, Clusia gundlachii; identical to SEQ ID NO: 8641

SEQ ID NO: 12078 - protein, 181 aa, Brassica napus
STTRPLSSAAVATSPAQATMVAPFTGLKSSAAFPVTRKSNTDITSITSNGGRVSCMKVWPPVGKKKFETLSYLPDLTDVELAKEVDYLLRNKWIPCVEFELEHGFVYREHGSTPGYYDGRYWTMWKLPLFGCTDSAQVLKEVQECKTEYPNAFIRIIGFDNNRQVQCISFIAYKPPSFTGA

SEQ ID NO: 12079 - protein, 250 aa, Gibberella zeae PH-1
MAPFTEPTAEISLLAKSDGSATFSYGGYAVIAAVNGPVEAQRRDENAFEALVDVIVRPAAGVGGTRERQLESIMQAALRQLIPVRDYPRSVIQITLQVAETPENAYVNAKIVQAQLNLPIIPALLHSAILGLLSAAIPLKTIGAATLIAVPEEEGKDIIVDPSAVDIDRAKSVHALAFTSHDELLLSESEGAFTPDEWTKVLQLGQRVCCEHQQPGLDTAMSGDDIESPSMRQFIRSAMGTKVAEDLYWK

SEQ ID NO: 12080 - protein, 391 aa, Croton alabamensis; identical to SEQ ID NO: 8642

SEQ ID NO: 12081 - protein, 716 aa, Oryza sativa
  misc_feature (127)..(127): Xaa can be any naturally occurring amino acid
  misc_feature (308)..(308): Xaa can be any naturally occurring amino acid
  misc_feature (336)..(336): Xaa can be any naturally occurring amino acid
  misc_feature (471)..(471): Xaa can be any naturally occurring amino acid
MASASVPAAGYGADGVYRSLRPPAPVASDPGLSLTDLLLRRADACPSAVALADAAAGGRALTFAELRSAVLSTAVALSSRAGVRPGDAVLLLAPNCVLYPVCFFAVTALGAVGTTVNPDYTPREIGXQVSDARAKLVITISALVPKIAGLRLPVILLDDDANAAAASLPPDATVTLYTNLVAGVKEADYRRPPIKQSDTAALLYSSGTTGDSKGVILTHRNFIAAARMVTSDQDERREGPNVFLCFLPMFHIFGLSVITYAQLHRGNAIIAMSRFDINSLMEAVQRHRVTHLFCVPPVIIALAKHGKXAGKYDLSSLKFIGSGAAPLGKDVMEVVXAKKFPDSEIVQWALNWFIRKLVLSDLFGSIWYIPTVLDSRGVQAFLGYGMTETCGIISLEYPEKGQAREFGSTGTLVSGVEAKIVDIKTLKHLPPNQVGEICVRGPNVMQGYFNNVQATEFTIKQGWLHTGDLGXYFAGGAQLLVVDRLKELIKYKGFQIAPAELEGLLLSHPEILDAVVIPFPDAKAGEVPIAYVVRSPDSSLTEVDVQKFIEKQVAYYKRLKRVTFVGSVPKSASGKILRRQLIAQLGIGHYLSNECLIPARSIVQQAAKGRGSDVCYAGSLAARVIVEDVRVGRRLDRRAPRLFYGSGACDLGEIREGKPAGEKREEAACEQQGCMPLAGHERKCRARGADRIVDGPNTGTRGPWFSGPLMDRSLAF

SEQ ID NO: 12082 - protein, 396 aa, Denhamia celastroides; identical to SEQ ID NO: 8644
  misc_feature (75)..(78): Xaa can be any naturally occurring amino acid
  misc_feature (170)..(173): Xaa can be any naturally occurring amino acid

SEQ ID NO: 12083 - protein, 276 aa, Oryza sativa
  misc_feature (143)..(143): Xaa can be any naturally occurring amino acid
  misc_feature (195)..(195): Xaa can be any naturally occurring amino acid
GIRTRHREPPLQPLLPSRLPLLLSSPLPSTQPHAAHGSASHMASTTAAAARFTCLAPATRPASASAGRFLLPAQHWGAATAHGSSAAVPVPVVAAAPSRRWAPGVTYATAATGKSVHDFTVKDIDGKDVALSKFKGRALLIVXPNVASQCGLTTANYTELSHLYEKYKTQGFEILAFPCNQFGAQEPGSNPQIKXQFACTRFKAEFPIFDKVDVNGPNTAPIYKFLKSSAGGFLGDLVKWNFEKFLVDKTGKVVERYPPTTSPFQIEKDIQKLLAA

SEQ ID NO: 12084 - protein, 391 aa, Dichapetalum macrocarpum; identical to SEQ ID NO: 8645

SEQ ID NO: 12085 - protein, 363 aa, Oryza sativa
  misc_feature (34)..(34): Xaa can be any naturally occurring amino acid
  misc_feature (81)..(81): Xaa can be any naturally occurring amino acid
GSTTGAARTGGSGGDAAAGGGGGSAGNGKPLPPXCVKARAAAPESEAKCHATVVSGWFTEPRSRGGKTSKVQYYNNPMWPXSTYGKVLVLDGIVQLTDKDECAYQEMITHLPLCSIPSPKKVLVIGGGDGGVLREICRHGSVESIDICEIDQLVIDVCKDFFPDLSVGFKDPRVRLHVGDAVEFLRNAPEGTYDAIIVDSSDPIGPAQELVEKPFFDTIARALRPGGVLCNQAESMWLHTHLIQDMLSICRETFKGSVHYAWTSVPTYPSGVIGFLLCAKEGPPVNFLTPANPIEKLEGAMEAGRDIRFYNSEMHRAAFVLPTFARRELEAYCTTVEREQQEETTAEPLKMNIMPNSEILTAS

SEQ ID NO: 12086 - protein, 473 aa, Oryza sativa Japonica Group
MESFSNSQLLLITLLMLLGGEVFTSILGLYFTNAKYSSKMIATLPDDDDHGGSGKPPPPTTSPSSTLVELELAPPMDVVVVNPTTTATTHDEVELGLGRRNKRGCTCTTTHTSSSSSASKTTTTRLLMFVVMGYHAVVHVAGYTAIVVYLSAVGGAGAVVAGKGISAHTFAIFTVVSTFANCGFVPTNEGMVSFRSFPGLLLLVMPHVLLGNTLFPVFLRLAIAALERVTGWPELGELLIRRRRGGGEGYHHLLPSSRTRFLALTVAVLVVAQLALFCAMEWGSDGLRGLTAGQKLVGALFMAVNSRHSGEMVLDLSTVSSAVVVLYVVMMYLPPYTTFVPVQDKHQQTGAQSGQEGSSSSSIWQKLLMSPLSCLAIFIVVICITERRQIADDPINYSVLNIVVEVISAYGNVGFSTGYSCARQVRPDGSCRDLWVGFSGKWSKQGKLTLMAVMFYGRLKKFSLHGGQAWKIE

SEQ ID NO: 12087 - protein, 314 aa, Mesorhizobium amorphae
VMFDGSSIAGWKAINESDMVLMPDLDTVHMDPFFAQSTMVILCDILDPVSGESYNRDPRGTAKKAEAYMKSEGIGDTIYVGPEAEFFVFDDVKYKADPYNTGFRLDSTELPSNDDTDYETGNLGHRPRIKGGYFPVPPIDSAQDMRSEMLTVLAEMGVRVEKHHHEVAAAQHELGIKFDTLVRNADKMLIYKYVVHQVANAYGKTATFMPKPIFGDNGSGMHVHQSIWKGGKPTFAGNEYAGLSESCLFYIGGIIKHAKAINAFTNPLTNSYKRLVPGYEAPVLLAYSARNRSASCRIPFGSSPKAKRVEVRFP

SEQ ID NO: 12088 - protein, 682 aa, Listeria monocytogenes EGD-e
MEIFLYVLALLVAIFISNLLNRFVPFVSVPLIQIGLGVLIAIMPITFNLQLNPELFLVMFIAPLLFNDGRQTDKAALWGMRMPILVLALGLVFATVVVIGYFVHWMIPTIPLAAAFALAAALAPTDAVAVSSLSGRINLPKRIMNLLEGEALINDASGLVAFQFAIAAMVTGVFSLMDASISFFVIAIGGILVGLILSWLKFRLLKWVRGLGMEDVTFHMLIQILTPFIIYLAAEEIHVSGILAVVAAGIMHSMEQKKMDPQLVKLNVVSQSTWSVIIFVLNGLVFLLLGTQLPAITEVVWNDSGSSNLQVMAYILSITAALILLRFIWVYISWSIGAKQRQKQNKKTQLPKFRPVVLTSLSGVRGAVTLASALAIPFFLDDGSLFPQRSLIIFIASGVILCTLVIATFILPLLAKSEEVTTEDERAEIATRIRILRNVIRELKEQTLPETKAATDEVIEDYRKRIYDLQQNNSSNRGMDERERAKRLEIIQWERENTQKMTDEGRIVATDSYRYQHYLNMMEQAIKQRFRTKVKTAWMFLYRLIMLVIHPKKWGRITHKVKKGISKDSERFQAIRQLREDNEILIISKLKEQLTKENVDIIGPLITEHTIFLERVRKEHSPRGKRAKFEQKKREVQVVAFQLERDIIQNMFEKGGISRELARDLRQNLNMIETYLYDDFLE

SEQ ID NO: 12089 - protein, 264 aa, Magnaporthe grisea 70-15
MAAATERPFVLPGEAIDPSLIPTHPKRPLRLGPGLRHIPPDEIVPTVAGKLVVNPAKPSLSLDYNGGRYVPEPNDLVIGQVHHSSADFHFVTLAPHTTNALLPVLAFEGATRKTRPVLPAGSLVYARVASASRHMDAELECFSQTTGKADGLGPLNPPAAAAPGAGAVAAAAPTGTVFNVSLGMARRLLMPQAERDAGLVVLDALAAEGLAFETAVGRNGKVWVASESVPTLVLVGRALAEVDEKGLDMDAQRRLVKKLVREMS

SEQ ID NO: 12090 - protein, 1877 aa, Chlamydomonas reinhardtii
MSCLTIALRMDLDVELGLAELGVTAKNANAVEEQIIQEALEETGNGAPDDGPAAGEFTGGPASAAAAANAQDGEQQLQLQLQQRRRERQRVASQLATVAAEIGTMSAALATAEEEAQEAAAEATEPKTAGAVPAGATSLQVALMRDRLAGLRAEQQRLAAEAAQLASGGGVGGGNGGAAGESGDGGAGAAAAGRSRPRSFGAAAMARHGATGKAAGAAAAGKPPAAGGGGTAAAAPRQAGGKKPQQEPMHLQQSKRARTEVAPVTRLTADEDDLFGDDDDDSGAAGSAGAGSARLELVETEKDRLIRLGLLTPFDRLAGYERKKVSTQPAGAAGAGGAGGGGDVAATGAKLPFQRTGEGALRHLGRAALSEQEAAAVTRSGRRVGEYLAEAGRQALEAREARPRAKFLEPDQLPQQERDVRKVPAHFWHQAASARKAGASSKLRRKRTLPRARPGRAGGGGDGLRKAAAAGAAAGSGEAEEEESEGSSGQEEEEEDAEGEEHQAVAAERRRGGSRRRHSGGRLAGEEAGPAEEGEEEAEEGGTSRQRRRLRARRSTGGSGGGGDGGGSGGSSDASGGPGAGEGVDDLADSDYTEGSDALDSDAAEDDDIVMSDDEEEVEEEEEDAGLSGLEDEDEDEMAGGAGSSGGARRRKGRKKGKTQKGGKGAAAAAAAAAAAAAGVDEDLYDDVDEQFYIDRVRRAAAAEAEARRAEALAKQKPRRGKQPQQQRRRRRSASAGAGGDAEGNGAAACGRAGGRGSEGGGGGGDGGLGNGGSRELGMLPHCGAYGSEGGPVVGSGVGGLGAAKAAEAAEQQHVQQEGAAAEAAAAAEAAAAEAEEAEEAAEAEEADVVFEGGFRVPARLYGRLFDYQRTAVKWLWELHMIAYLAGLHASGLYRPSLIVCPATVLRQWMRELRTWAPALRVVLLHESGRNPPSGLLRPDRAGVLEAALSPCPAGLEPLLGSSSRTSPTPGAPGSGSGSGASVSYPGVVLTTYDQLRLHRDLLLRVRWGVAVLDEGHKIRNPDSEITLVCKQLHTVHRLIMSGSPIQNRLSELWSLFDFIFPGKLGTLPVFQAQFAVPIQVGGYANASSLQVTTAYKCAVVLRDLIAPYLLRRRKADVAAQLPAKTEQVLFCTLVSEQLELYRSYLASKEVGEILEGSRRALCGIDILRKVCNHPDLLERLSAQDAEDYGNPARSGKLRVAERVLDSWRAAGHKALLFCQTQQMLDIFEKLARSKKSPAWSYHRMDGGTPVASRSRLIDDFNNNPDVFLFLLTTKVGGLGVNLTGATRVMLYDPDWNPSTDIQARERAWRIGQSQPVTIYRLITAGTIEEKVYHRQIYKNFLTNKVLRDPRQKRFFTARDISELFTLGPEYKKGAAAAAAGGGSGAGGDTETARIFGSALDAQELAEAVRQQAEGGAGAAGGSGSGGRGAGGGGGAGGAGWLSSTAAAAAALRRRGERPNGEEAAAGGGAGAEEDELGQDGEGGEEGGEGRRGKKRKKGAANGVAAAEQPAAAAAASKPAEEQDESRVLRDLFDGGAGLRGLVDHSRIESANDPELITLHAEAQRVAARAAEALRRSRAACAVAPISTPTWTGRHGHAGAPAGQQQAQQAQPQRRFGNVTNSRMRLGGGAGGAGGAGAGAGGSGPGGSGSVPGGAQPFSGAVAGVQGLAAGRRMGGGGGGGAGGGVAGGAPSSASLLSQMRSRQQALQGAAAEASSRGVRGSGGGGSGGGSAAAAAVEPAEALAAEVVTFLDSRGGVVGSEVLVEAFRQTVPPAQMPLFKQVLRQVAGLRRRAAGGEWVLKKEFRTAAPEAAAAGGLQEGRQGGGEAGAAAAGAGGSSDGGGAGSGAGGAGDAGGSGAAAGAASGGGSDAYDFIDLT

SEQ ID NO: 12091 - protein, 1031 aa, Streptococcus pyogenes MGAS8232
MARLIPGRVRNEGIKLYEQGLVSFQDDNKGILQIEVETYQVQYGADDEDITCQCDTFHMKHYCKHIAAVEYFLKNDQKGKLFLKQLTNQTKIKETTKKITSFGSLFLDSLAMNEDDSVKYRLSALGSRSPFSSDYWWSLKINRLPDDRSYVIRDIKGFLQLIKKEGFYQIGKNCFEQLSWLQFDPSSQDLIEFLWRLASDTDKGDNENIFPNHARHLRLPSGFFEEGIHYLTSLYDFTFEGPSQTYHHLFVRSLEAEAGLYEFKVEVHRKSIELQIAEKNVQYLFDNDYLLYQDTFYHLTLKQRKMVQAIRSLPIEADLAKHIHFDLDDHAKLAASLSDFKQIGLVEAPKSFAIRDFEVTFQFDLLNRDEISCQLMFDYGNYQVSDKASLEALPFASHLKKEEKINRSLLAFGFSPQFYSKKRLTSAKELYTFFEETVPCFERLGNVALSTAIQALQVKEMPKIAIKRNQGLLDISFDFSTIIENDIDQAVTALFQNNPYFVSQTGQLVVFDDETQKVSKSLQELRARQLKNGHLQLDGIRALQVSKLFEGMTSVHFSKELEELAYHLQHPETFSIKPLPVKAQMRDYQRNGVQWLSMLNHYGFGGILADDMGLGKTLQTLAFLASHLKSDSKVLILSPSSLIYNWFDECQKFTPQLDVVVSYGLKQIRDQIIEEGHQITITSYSSFRQDFETYQAFHYDYLILDEAQVIKNAQTKISHCLRAFNTANCFALSGTPIENKMLEIWSIFQIVLPGLLPTKKEFLKLTAEQVSRYIKPFVMRRKKEDVLPELPDLIETNYSNEMTDEQKAIYLAQLRQMQDQIRNSSDVDISRQKIEILSGITRLRQICDTPSLFMNYQGKSGKLDSLRILLTQIKENGHRALIFSQFRGMLDLAKQEMTALGLTSYQMTGSTPANERQEMTRAFNNGSKDAFLISLKAGGVGINLTGADTVILIDLWWNPAVEMQAISRAYRIGQKENVEVYRLITRGTIEEKILELQESKRNLVTTVLDGNESRASMSIEEIKEILGLNTH

SEQ ID NO: 12092 - protein, 546 aa, Lophopyrum elongatum
MGLDLGAIALKYTGLAVSDHGSIVAINIFIALLCGCIVFGHLLEGNRWVNESTTALVLGLITGGVILICSKGVNSRILIFSEDIFFIYLLPPIIFNAGFQVKKKQFFRNFATIILFGAAGTLISFVIITFGAMGLFSKLGVGPLELGDYLAIGAIFSATDSVCTLRVLNQDEAPLLYSLVFGEGVVNDATSVVLFNAIQNIDINHFDVFVLLQFIGKFLYLFFTSTVLGVAAGLLSAYIIKKLCSARHSTDREVAIMILMAYLSYMLSMLLDLSGILTVFFCGIVMSHYTWHNVTESSRVTTKHTFATLSLIAEIFLFLYVGMDALDIDKWKLASSSPKKPIALSAVILGLVMVGRAAFVFPLSFLSNLSKKESHPKISFNQQVIIWWAGLMRGAVSIALAYNKFTTSGHTAVRVNAVMITSTIIVVLFSTMVFGLLTKPLINLLIPPRPGTAADISSQSFLDPLTASLLGSDFDVGQLTPQTNLQYLLTMPTRSVHRVWRKFDDKFMRPMFGGRGFVPFVPGSPIERSVHGPGLLGTVTEAEDRS

SEQ ID NO: 12093 - protein, 198 aa, Vibrio sp. Ex25
MDEQQFKGEIPDISGMEKTNNLMAFVERKLFTLNTGHCITAYLGCLKGHRTIREAIEDPSIHAEVKQAMQESGEVLIRRYGFDREMHNAYIEKILGRFANPYLVDEVDRVGRQPIRKLGANDRLVKPLLGTIEYGTENKTLLKGIAAALKYTNDTDPQAVELQTSLKAVGVKKTLATYTGLAEDSVEVAQIEAIYHQL

SEQ ID NO: 12094 - protein, 435 aa, Oryza sativa
MSSGGGRPPAAQHIVRSVRQRFVPLPPPLARAPFAAAPGDYHRFAAASRGGEIEEGIVIRRTPLKRKTPCGESEAAESSERMMTSPGFTEGVGSPLMTPVSGKTSRTTKSMAKFNKAGPQTPISNAGSPGNPSTPASSRYDNSLGLLTRKFINLLKQTQDGILDLNDAAKILDVRKRRIYDITNVLEGTGLIEKKLKNRIRWRGSDDSGTNLDSDISCLKTEVENLYIQEQALDRSISEIREKMEELTEDESNHRWLFVTEDDIKGLPCFQNEALIAIKGPRGTTVEVPDPDEAGDYLQRRYRILLRSTMGPIDIYLVSQYKKMEELGETATPPRHASVVEPPSIATEAGHSSKQTMPLNVQQDIQETPELNASRAFGRMKKITPSDVDTDADYWLLTDDDISITHMWTTSSELLWDHIDTNDFLSLRNYVTPPC

SEQ ID NO: 12095 - protein, 665 aa, Cucumis sativus
MASSWRARGSLIVLAIVFFGGLFAISIAKEEATKLGTVIGIDLGTTYSCVGVYKNGHVEIIANDQGNRITPSWVAFTDSERLIGEAAKNQAAVNPERTVFDVKRLIGRKFDDKEVQKDMKLVPYKIVNKDGKPYIQVKIKDGETKVFSPEEISAMILTKMKETAEDFLGKKIKDAVVTVPAYFNDAQRQATKDAGIIAGLNVARIINEPTAAAIAYGLDKKGGEKNILVFDLGGGTFDVSILTIDNGVFEVLATNGDTHLGGEDFDQRIMEYFIKLIKKKHGKDISKDNRALGKLRRESERAKRALSSQHQVRVEIESLFDGTDFSEPLTRARFEELNNDLFRKTMGPVKKAMDDAGLEKNQIDEIVLVGGSTRIPKVQQLLKDYFEGKEPNKGVNPDEAVAYGAAVQGSILSGEGGEETKDILLLDVAPLTLGIETVGGVMTKLIPRNTVIPTKKSQVFTTYQDQQTTVSIQVFEGERSLTKDCRNLGKFDLTGIPPAPRGTPQIEVTFEVDANGILNVKAEDKGTGKSEKITITNDKGRLSQEEIDRMVREAEEFAEEDKKVKERIDARNSLETYTYNMKNQINDKDKLADKLESDEKEKIETAVKDALEWLDDNQSAEKEDYEEKLKEVEAVCNPIITAVYQRSGGAPGGESAEDDESHDEL

SEQ ID NO: 12096 - protein, 465 aa, Akebia quinata; identical to SEQ ID NO: 8653

SEQ ID NO: 12097 - protein, 392 aa, Akebia quinata; identical to SEQ ID NO: 8656

SEQ ID NO: 12098 - protein, 466 aa, Aristolochia grandiflora; identical to SEQ ID NO: 8657

SEQ ID NO: 12099 - protein, 152 aa, Solanum lycopersicum
MSSFSEEQEALVVKSWGSMKKDAGEWGLKFFLKIFEIAPSAKKMFSFLKDSNVPLDQNPKLKIHAKSVLVMTCEAAVQLRKAGKVVVRDSTLKKIGATHFKYGVVDEHFEVTKYALLETIKEASQEMWSVEMKNAWGEAYDQLVSAIKTEMK

SEQ ID NO: 12100 - protein, 516 aa, Brassica napus; identical to SEQ ID NO: 11394

SEQ ID NO: 12101 - protein, 392 aa, Aristolochia grandiflora; identical to SEQ ID NO: 8659

SEQ ID NO: 12102 - protein, 165 aa, Zea mays
MALAEADDGAVVFGEEQEALVLKSWAVMKKDAANLGLRFFLKVFEIAPSAEQMFSFLRDSDVPLEKNPKLKTHAMSVFVMTCEAAAQLRKAGKVTVRETTLKRLGATHLRYGVADGHFEVTGFALLETIKEALPADMWSLEMKKAWAEAYSQLVAAIKREMKPDA

SEQ ID NO: 12103 - protein, 554 aa, Asparagus falcatus; identical to SEQ ID NO: 8662

SEQ ID NO: 12104 - protein, 391 aa, Dillenia philippinensis; identical to SEQ ID NO: 8663

SEQ ID NO: 12105 - protein, 728 aa, Arabidopsis thaliana
MSVDQKRCWATLKENNCVHDECRSMCLKKNPKGHVCFFGSVNRKLDPVSDLYVIGRSDLLCIFVNYSKELLLDICDILEVQFYRVQRRCSLEDWMTKLLSDIELARSVVVASFLELEATARSACQVVDQNASDSNDDGNSTSLSSLVHPNSGGSSLLSSDYGSDTAYETSELGSASLGQDDVSETDTGDLTLDEDLTNPTEKLVKFSMSNIDEGLSMSQTIIEQLEDFPKHRVHLGYANDITETNSYNGKASKGVFRANNDLRCRSESETSHSVMHDRKLSLESADGVSLLAGETSTSSILSSIVHSQLDVNHDISVGNLEIPGNGRIVLPLKMHSKLNRILLTMNERLLNSKTDMEDLIARLNQETAVKEYLNRKVDDLEVELETTKQRNKENLEQALMTERQSVTKMQWDMEELRQKTFEMELKLKSKEDGSSDSKTSGNSTISESHELLQEMDATKQQLEDLSRRYVELEAKSKADIKVLVREVKSLRRSHMEMEKELTRSLTEKSDTEKLLQQERIIVENTLEARRRLYSDCEILHDRLKVNNTNLSMDESSNNREDLSEVSNALQDQIEYVPRPEDHVLGIVVDCKGENYWIDIKGPQLALLPVLAFEGANRRNYPKFEAKLLDNVIESGKAAGFGPLKDGFMFETSTGLSRMLLSSPTCPVLEALGKKLSFETAFGLNGRCWVHAAAPRIVIIVANALMNSETLSGTQQRIMVEKLLEKISD

SEQ ID NO: 12106 - protein, 161 aa, Trema virgata
MSSSEVDKVFTEEQEALVVKSWAVMKKNSAELGLKFFLKIFEIAPSAKNLFSYLKDSPIPLEQNPKLKPHAMTVFVMTCESAVQLRKAGKVTVRESNLKRLGAIHFKNGVVNEHFETRFALLETIKEAVPEMWSAEMKNAWGEAYDQLVAAIKFEVKPSST

SEQ ID NO: 12107 - protein, 391 aa, Dissiliaria muelleri; identical to SEQ ID NO: 8664

SEQ ID NO: 12108 - protein, 161 aa, Trema virgata
MSSSEVDKVFTEELEALVVKSWAVMKKNSAELGLKFFLKIFEIAPSAKNLFSYLKDSPIPLEQNPKLKPHAMTVFVMTCESAVQLRKAGKVTVRESNLKRLGAIHFKNGVVNEHFETRFALLETIKEAVPEMWSAEMKNAWGEAYDQLVAAIKFEVKPSST

SEQ ID NO: 12109 - protein, 469 aa, Idiomarina loihiensis L2TR
MSANKIFDTIKEHDVKFVDLRFTDTKGKEQHVTIPVSQIDEDFFEEGKMFDGSSISGWKGINESDMVLMPDNESAVIDPFTDEVTLNVRCDILEPETMQGYSRDPRSIAKRAEDFLRSSGIADDAYFGPEPEFFLFNDVRFHTDMSGSFYKIDAEEAKWNSGREYSEGNLAHRPGVKGGYFPVPPVDSAHDIRGTMSLVMEDMGMVVEAHHHEVATAGQNEVATRFNTLTKKADELQVYKYVVHNVAHSYGMTATFMPKPLVGDNGSGMHVHMSLNKGGENLFAGDQYAGLSETALFYIGGIIKHARAINAFANASTNSYKRLVPGFEAPVMLAYSARNRSASIRIPLVSSAKGRRIEVRFPDPSANPYLAFTALLMAGLDGIRNKIHPGDAMDKDLYNLPPEEAKDIPTVCHSLEMALDALDKDRDFLKQGGVMDDDMIDAYIDLKYNEVETLKKTTHPVEFDMYYSV

SEQ ID NO: 12110 - protein, 391 aa, Dovyalis rhamnoides; identical to SEQ ID NO: 8667

SEQ ID NO: 12111 - protein, 642 aa, Neisseria meningitidis MC58
MAKVIGIDLGTTNSCLAISENGQTKVIENAEGARTTPSVIAYLDGGEILVGAPAKRQAVTNAKNTIYAAKRLIGHKFEDKEVQRDIESMPFEIIKANNGDAWVKAQGKELSPPQISAEVLRKMKEAAEAYLGEKVTEAVITVPAYFNDSQRQATKDAGRIAGLDVKRIINEPTAAALAFGMDKGDNKDRKVAVYDLGGGTFDISIIEIANLDGDKQFEVLATNGDTFLGGEDFDQRLIDHIIAEFKKEQGIDLKQDVMALQRLKEAAEKAKIELSSGQQTEINLPYITMDATGPKHLAMKITRAKFESLVEDLITRSIEPCKIALKDAGLSTGDIDDVILVGGQSRMPKVQEAVKAFFGKEPRKDVNPDEAVAVGAAIQGEVLSGGRSDVLLLDVTPLSLGIETMGGVMTKLIQKNTTIPTKASQVFSTAEDNQSAVTIHVLQGERERASANKSLGQFNLGDIAPAPRGMPQIEVTFDIDANGILHVSAKDKGTGKAANITIQGSSGLSEEEIERMVKDAEANAEEDKKLTELVASRNQAEALIHSVKKSLADYGDKLDAAEKEKIEAALKEAEEAVKGDDKAAIDAKTEALGAASQKLGEMVYAQAQAEAQAGESEQANASAKKDDDVVDADFEEVKDDKK

SEQ ID NO: 12112 - protein, 314 aa, Mesorhizobium chacoense
VMFDGSSIAGWKAINESDMVLMPDTDTVHMDPFFAQSTMVILCDILDPVSGEAYNRDPRGTAKKAEAYMKAEGIGDTIYVGPEAEFFVFDDVKYKADPYNTGFKLDSTELPSNDDTDYETGNMGHRPRTKGGYFPVPPVDSAQDMRSEMLTVLAEMGVRVEKHHHEVAAAQHELGIKFDTLVRNADKMLIYKYVVHQVANAYGKTATFMPKPVFGDNGSGMHVHQSIWKGGKPTFAGNEYSGLSETCLFYIGGIIKHAKAINAFTNPLTNSYKRLVPGYEAPVLLAYSARNRSASCRIPFGSSPKSKRVEVRFP

SEQ ID NO: 12113 - protein, 438 aa, Rhodobacter capsulatus
MSAVKKALDLMKAEEVEYVDIRFCDPRGKLQHVTLIADLVDEDFFEEGFMFDGSSIAGWKSIDQSDMKLIPDASSVYIDPFYAEKTMCVHCNVVEPDTAEAYSRDPRIALKAEAYLKASGIGDVAYFGPEAEFFIFDDVRYSVTPAKVAYQIDAEAAAWNTDAEVEMGNLAHRAGHKGGYFPVNPVDEAQDLRGEMLSTMKRMGMKVDKHHHEVATCQHELGLIFGGLTEQADNILKYKYVIHNVAHAYGKTVTFMPKPMKGDNGSGMHVNMSIWKDGKPLFAGDKYADLSQEALYFIGGILKHAKALNALTNPGTNSYKRLIPGFEAPVLRAYSARNRSGCVRIPWTESPKAKRVEARFPDPSANPYLAFAALLMAGLDGIKNKIDPGPASDKDLYDLPPEELAAIPTVCGSLREALTELEKDHDFLLAGDVFTKDQ

SEQ ID NO: 12114 - protein, 391 aa, Drypetes roxburghii; identical to SEQ ID NO: 8669

SEQ ID NO: 12115 - protein, 314 aa, Mesorhizobium plurifarium
VMFDGSSIAGWKAINESDMVLMPDTDTVHMDPFFAQSTMVILCDILDPISGEAYNRDPRGTAKKAEAYMKSEGIGDTIYVGPEAEFFVFDDVKYKADPYNTGFRLDSTELPSNDDTDYETGNLGHRPRIKGGYFPVPPIDSCQDMRSEMLTVLAEMGVRVEKHHHEVAAAQHELGIKFDTLVRNADKMLIYKYVVHQVANAYGKTATFMPKPVFGDNGSGMHVHQSIWKGGKPTFAGNEYAGLSESCLYYIGGIIKHAKAINAFTNPLTNSYKRLVPGYEAPVLLAYSARNRSASCRIPFGSSPKSKRVEVRFP

SEQ ID NO: 12116 - protein, 119 aa, Trichodesmium thiebautii
PIEKHHHEVATAGQNEIACQFNTLVKKADEIQVYKYVVHNVAHAYGQTATFMPKPLVGDNGSGMHCHQSISKDGVNIFAGDKYAGLSEEALYYIGGIIKHARAINAFRNASTNSYKRLS

SEQ ID NO: 12117 - protein, 668 aa, Vibrio sp. Ex25
MNCRSKVTLIAASLWLAASAQALEAKLHKDDLPVLAPEVQHETASKRVTSRFTRSHYKHFSLNDDFSKAIFERYVELLDYNRNIFTQADIDSFKDWSIELDDQLKAGNNQIAFDVYNLSMQKRFERFAYALTLLDEEIKFDTDDEIELDRSEAAWPKDEAELNELWRKRVKYDALNLKLTGKEWPEIKEVLEKRYNNAMKRITQTNNEDAFQLYMNAFARQVDPHTSYLSPRNAEQFQSEMNLSLEGIGAVLQMTDDYTVIRSLVVGGPASKSKQLGEGDRIIGVGQDGEEIVDVIGWRLDDVVQLIKGPKGTKVNLQILPEGNDAKSYIVTIVRDKVRLEDRAVKSEIIEKDGKKIGILEVPSFYVGLSKDTDKLLAELKTKNVDGVIVDLRNNGGGALTEATALTGLFIKEGPVVQVRDSYGRIKVNADTDGKVSYDGPLTVLINRYSASASEIFAAAMQDYNRAIILGENSFGKGTVQQHRSLNHIYDLFDKELGYVQYTIQKFYRIDGGSTQNRGVAPDISYPTPIEASETGESVEDNALPWDQIDKAKYQTFPSNEALVEKLTALHNKRISDEMEFRFINEDIEKYRKEKDDNMLSLNEKVRKAESDKAEALRLQRINERQAALGKEAFKTLDDIPKDYEAPDVYLDESVAIMVDLLKQKNQS

SEQ ID NO: 12118 - protein, 392 aa, Elaeodendron orientale; identical to SEQ ID NO: 8672

SEQ ID NO: 12119 - protein, 445 aa, Synechococcus sp. WH 8102
MPSAKGLRGVLRSGPLLLMLGLGGMAVSMAGPSLGLTGASGGAITDSPKEVIDQVWQIVFRDYLDSTGAYSDARWRQLRKDLLAKSYAGDEESYEAIRGMLSSLDDPYTRFLDPKEFKEMRIDTSGELMGVGIQLSLDKDTKELIVVSPIEGTPASRAGVQPKDVIVSIDGAPTKGMTTEEAVKLIRGPEGTEVILGLRRKGVVLNVSLTRARIEIHAVKKALNTSANGSKIGYIRLKQFNANASREMRAAIQDLDEQGAQGYVLDLRSNPGGLLEASIDIARQWLNEGTIVSTRTREGIRDVRRATGSAITDKPMVVLIDQGSASASEILSGALQENKRAQLVGQKTFGKGLVQAVRGLSDGSGMTVTIAKYLTPNGTDIHKNGIKPDVEAAMSEKEMKDFKIENLGTSKDSQYRVAETTLIKVLRMQKNEAYRPGSANLKAAL

SEQ ID NO: 12120 - protein, 287 aa, Synechococcus sp. WH 7803
MSEAPSTASGWIDEHHNGVRYGLQGDVIADEQSAIQRITVIHSHRYGNGLLLDGCWMTAEHQERHYHEPLVHPALCAARSIDRVLVIGGGDGGTARECLRHHAVKHVDLVEIDGRVVELSQKHLAAIGGGCWSDPRFQLTVGDGIAWVGEASDASYDVVLVDGSDPAGPAEGLFNRSFFQHCRRILKPGGVFATQSESPEAFRAVHIDTVRMLREVFGHADPLYGWVPMYPSGWWSWTFAASDGPRYRSPDPERAAAIGPGCDIWSPRWQAGAFEAIPASIERELSA

SEQ ID NO: 12121 - protein, 314 aa, Mesorhizobium septentrionale
VMFDGSSIAGWKAINESDMVLMPDPDTVHMDPFFAQSTMVILCDILDPVSGESYNRDPRGTAKKAEAYMKSEGIGDTIYVGPEAEFFVFDDVKYKADPYNTGFRLDSTELPSNDDTDYETGNLGHRPRIKGGYFPVPPIDSAQDMRSEMLTVLAEMGVRVEKHHHEVAAAQHELGIKFDTLVRNADKMLIYKYVVHQVANAYGKTATFMPKPIFGDNGSGMHVHQSIWKGGKPTFAGNEYAGLSESCLFYIGGIIKHAKAINAFTNPLTNSYKRLVPGYEAPVLLAYSARNRSASCRIPFGASPKAKRVEVRFP

SEQ ID NO: 12122 - protein, 638 aa, Escherichia coli O157:H7 EDL933
MGKIIGIDLGTTNSCVAIMDGTTPRVLENAEGDRTTPSIIAYTQDGETLVGQPAKRQAVTNPQNTLFAIKRLIGRRFQDEEVQRDVSIMPFKIIAADNGDAWVEVKGQKMAPPQISAEVLKKMKKTAEDYLGEPVTEAVITVPAYFNDAQRQATKDAGRIAGLEVKRIINEPTAAALAYGLDKGTGNRTIAVYDLGGGTFDISIIEIDEVDGEKTFEVLATNGDTHLGGEDFDSRLINYLVEEFKKDQGIDLRNDPLAMQRLKEAAEKAKIELSSAQQTDVNLPYITADATGPKHMNIKVTRAKLESLVEDLVNRSIEPLKVALQDAGLSVSDIDDVILVGGQTRMPMVQKKVAEFFGKEPRKDVNPDEAVAIGAAVQGGVLTGDVKDVLLLDVTPLSLGIETMGGVMTTLIAKNTTIPTKHSQVFSTAEDNQSAVTIHVLQGERKRAADNKSLGQFNLDGINPAPRGMPQIEVTFDIDADGILHVSAKDKNSGKEQKITIKASSGLNEDEIQKMVRDAEANAEADRKFEELVQTRNQGDHLLHSTRKQVEEAGDKLPADDKTAIESALTALETALKGEDKAAIEAKMQELAQVSQKLMEIAQQQHAQQQTAGADASANNAKDDDVVDAEFEEVKDKK

SEQ ID NO: 12123 - protein, 595 aa, Mycobacterium avium subsp. paratuberculosis K-10
MTDPAEDHPSEAITLGLHDASPPEMVDAMAKDVELELGWGRLIFGQTFANSQELVEALRREGPGRRDICIYARESHVVVAEAPTELFIDPSHTYRLRFTGKEKSLAPTPLGVTVRTLNDPIDADAMNRVYVRCGMVPAGVDVIWENHQHVPAVKYLLAVRDEDGAVVGTVTGVDHELLFNDPEHGSSLWTLAVDPAAGLPGVGGALTRALAEHFRSAGCAYMDLSVAHDNAAAISLYEKLGFRRVPVLAIKRKNAINEPLFSPPPETVDDLNPYARIIADEALRRGIWVEVLDAETGEMRLTHGGRSVITRESLSEYTSAVAMCRCDDKRLTRRLVSEAGITVPRARLATFDEGDFAFLKEVGEVVVKPTRGEQGKGITVGVTAENGPDDLSAALARARAQYPDVLIEQRVPGDDLRLVVIDGRVVAAALRLPPEVIGTGEHSVRDLIAAESRRRSAATGGESRIPLDELTEATVAEAGWKLDDVLPQGTRLRVRRTANLHQGGTIHDVTAQVNSELCRVAVTAAEAIGIPVTGIDLLVPDVTGADYAFIEANERPGLANHEPQPTAAAFIDFLFPGHPGQPQAWTPEESRFARG

SEQ ID NO: 12124 - protein, 314 aa, Mesorhizobium temperatum
VMFDGSSIAGWKAINESDMVLMPDTETVHMDPFFAQSTMVILCDILDPISGESYNRDPRGTAKKAEAYMKAEGIGDQIFVGPEAEFFVFDDVKYKADPYNTGFKLDSTELPSNDDTDYETGNLGHRPRIKGGYFPVPPIDSAQDMRSEMLTVLAEMGVRVEKHHHEVAAAQHELGIKFDTLVRNADKMLIYKYVVHQVANAYGKTATFMPKPVFGDNGSGMHVHQSIWKEGKPTFAGNEYAGLSESCLFYIGGIIKHAKAINAFTNPLTNSYKRLVPGYEAPVLLAYSARNRSASCRIPFGSSPKAKRVEVRFP

SEQ ID NO: 12125 - protein, 158 aa, Nitrosomonas europaea ATCC 19718
MNIYDCGIKTMDGQDKLLGDYKGKVLLIVNTASKCGFTPQYQGLEDLYRRYKDRGFVVLAFPCNQFGHQEPGSESEIQQFCTTRYDVSFPVFAKIEVNGANTHPLYRYLKNEKSGVLGTKAIKWNFTKFLVDRSGHVVRRYAPADKPESLTGDIEQLL

SEQ ID NO: 12126 - protein, 147 aa, Vicia faba
MGFTDKQEALVNSSWESFKQNLSGNSIFFYTIILEKAPAAKGLFSFLKDTAGVEDSPKLQAHAEQVFGLVRDSAAQLRAKGEVVLGNATLGAIHVQKGVTDPHFVVVKEALLQTIKKASGSNWSVELSTAWEVAYDGLASAIKKAMN

SEQ ID NO: 12127 - protein, 160 aa, Zea mays
  misc_feature (44)..(44): Xaa can be any naturally occurring amino acid
  misc_feature (114)..(114): Xaa can be any naturally occurring amino acid
PRVRPRVRPRVRARGLKSWAVMKKDAANLGLRFFLKVFEIAPSXEQMFSFLRDSDVPLEKNPKLKTHAMSVFVMTCEAAAQLRKAGKVTVRETTLKRLGATHLRYGVADGHFEXVTGFALLETIKEALPADMWSLEMKKAWAEAYSQLVAAIKREMKPDA

SEQ ID NO: 12128 - protein, 940 aa, Yarrowia lipolytica CLIB122
MYRRPAKRRVPNPDVLLAPFKPLTQNLPPKTDPKPSISESSDSECASDDDEQEKLRVKRRKLKEQQEEEERQKQEAEKKRQAELREQNRRISKEEAAQMLKAVAEPKRARQADLGVLRSAEEIEQELQIRERKERVESERISARNLSFNALYRKKLGHKKKHKTWDGDGIVVVKGETLSLYTPEGKGIVRGFKLQPQVVVEEGQVLKVGPLEIELESTVVEAQRGVLGMVEDIESRTAVEKGRSASALRESPVPTNDTPEPLSVEATSAVVTETYTLPAPTTFKAVKRLRVKLPQKITEENFATFIQDVKIDPLLNTALRPHQREAVDFLYRCVMGFNPTSGYGALLADEMGMGKTLMSIALIWTLLKQTPLKGEPPLAKRVLIVCPVTLVNNWKTEIKKWLGPSRLGVMAITDSMSIDLGTVIRDFTYGRVNQVMIIGYERLLRISDQLQSANFDLVICDEGHRMKTAGNKAANAIQSLGVARKIILSGTPIQNDLKEFFVMVDFLNPGLLGSFQQFNKDYIIPIVRSRAPDAFPSELEKGQKQSARLSSITGQFILRRTADILSRFLPPKTETVLFCLPNAQQTEIYTKLSSEYLNRLERHQVDSFKSILSLRKVCNSPILLSEDGPALDSGKAYLRNSGKMNTLFRMIGQLRARNKMDPDNAEKVVIVSSFTQTLDVIEGLVKDLKLSFTRLDGSVQASARAKIVKQFNSSSADSCFVFLLSARAGGVGINLIGASRLFLFDPDWNPAVDLQAMARIHRDGQKKPVYIYRLLTTGCIDEKIFQRQTIKTGLANSLIEGTEEADTFTDEELKKLFSMDVLTHCNTHDLMECKCEHNGGDLGEVVEEVQVTKATASDSFTTARELEKNQDKQQRSLKSLLEYKHISPDVVREQWDSLSEIGDVLLEKIVGEKNDLVSYILTKTSVQALDEVDTVDVVEE

SEQ ID NO: 12129 - protein, 146 aa, Vicia faba
MGFTEKQEALVNSSWELFKQNPGNSVLFYTIILKKAPTAKGMFSFLKDSAGVVDSPKLQAHAEKVFGMVRDSAVQLRASGEIVLGDATLGAIHIQKGVLDPHFVVVKEALLETIKEISGDKWSEELSAAWEVAYEGLAVAIKKAMS

SEQ ID NO: 12130 - protein, 397 aa, Podospora anserina
MERNTPKKAVHFGAGNIGRGFVACFLHESGYEVIFAEVNDATVSKLNTHKSYKVIEVGAEGTTEKTITNYRAINSRSNEAALVEEIATADVVTCSVGPNILKFLAPVIAKGLAARSTDLTPAAVIACENAIGATDTLAEFIKSPENTNPALLEDYDKRATFANSAIDRIVPAQDPDAGLDVKLEKFYEWVVEKTPFKEWAVPDIKGIKWVDNLQPFIERKLYTVNTGHATAAYYGYTRRKSTVYDALQDKDIRDEVKNALKETADLITEKHGIDEEEQKQYVDKIVRRISNPHLEDAVERVGRAPLRKLSRKERFIGPAAELAENGKDCSALLDAAEMAFRFQNVEGDDESFELAKIMEEKKPEEVVQEVCGLQPSEKLYPQVVDIVKRVQADSNEE

SEQ ID NO: 12131 - protein, 219 aa, Brassica napus
MERVGTRILAKIRPQVFAKHLSPLCLYFIYFLTFSILGFLALKISKPRITSRPHDLDLFFTSVSALAISSMSTIDMEVFSNTQLIFLTILMFLGGEVFTSFLNLYFSHFTKFVYPHNKVRHLTDSFDLDRRMEEPRIDIENVIDHQEGSIQMIERASKCLYSVVLGYHVITHLVGSLLVLVYVNFIKTARDVLSSKDISPLTFSVFLTVSTFANGGFVP

SEQ ID NO: 12132 - protein, 159 aa, Gossypium hirsutum
MGFTEKQEGLVKESWEVLKQDIPHSSLRFFSLILEIAPGAKNMFSFLRESEEIPQNNPKLKAHAVKVFKMTCESAIQLREKGEVVVADTTLKYLGTVHVKSGVKDPHFEVVKEALLRTIEEAIGEEKWNEEMKNAWGEAYDQLAEAIKAEMKNHHDETA

SEQ ID NO: 12133 - protein, 156 aa, Solanum lycopersicum
MGFTDKQEALVRDSWEFMKQDIPQLSLRFFSLILEIAPVAKNMFSFLKDSDELPENNPKLRAHAVKVFKMTCESAIQLREKGEVVVGETTLKYLGSIHLQKRVADPHFEVVKEALLRTVKEATGNKWKDEMKEAWSEAYDQLASAIKAEMHAEAAA

SEQ ID NO: 12134 - protein, 161 aa, Brassica napus
MGEIVFTEKQEALVKESWEILKQDIPKYSLHFFSQILEIAPAAKDMFSFLRDTDEVPHNNPKLKAHAVKVFKMTCETAIQLREKGKVVVADTTLQYLGSVHFKSGVLDPHFEVVKEALVRTLKEGLGEKYNEEVEGAWSKAYDHLALAIKAEMKQEDSQKP

SEQ ID NO: 12135 - protein, 359 aa, Scopolia parviflora
MAFRNGSTNTTINHLNGASTIPKNGSTTTTINHLNGASTIPKNGNNITTTLLKNGSPHEFGCIKPGWFSEFSELWPGEAFSLKIEKLLFQGKSDYQDVMLFESATYGKVLTLDGAIQHTENGGFLHIEMIVHLPLGSIPSPKKVLIIGGGIGFTLFEVLRYPTIEKIDIVEIDDVVVDVSRKFFPYLAAGFDDPRVTLVLGDGAAFVKAAQAGYYDAIIVDSSDPIGPAKDLFERPFFEAVAKALRPGGVVCTQAESIWLHMHIIKQIIANCRQVFKGSVNYAWTTVPTYPTGVIGYMLCSTEGPQVDFRNPVNPIDKKPSHIKSKGPLKFYNADIHKAAFILPSFARNLMEKEIFSIV

SEQ ID NO: 12136 - protein, 444 aa, Asparagus falcatus; identical to SEQ ID NO: 8688
  misc_feature (59)..(59): Xaa can be any naturally occurring amino acid

SEQ ID NO: 12137 - protein, 163 aa, Gossypium hirsutum
MATYEGKVFTEEQEALVVKSWTVMKKKTAELGLKFFLKIFEIAPSAKKLFSFLRDSNVPLEQNTKLKPHAMSVFVMTCESAVQLRKAGKVTVRESNLKKLGATHFKYGVVDEHFEVTKFALLETIKEAVPDMWSDEMKNAWGEAYDRLVAAIKIEMKACSQAA

SEQ ID NO: 12138 - protein, 280 aa, Pyrococcus horikoshii OT3
MRDMEFIEWYPRGYGVAFKVKRKILEEQSEYQKIEVYETEGFGKLLAIDGTVQLVTEGEKSYHEPLVHPAMLAHPNPRRVLIIGGGDGGAIREVLKHEEVEEVIMVEIDKKVIEISAKYIGIDGGILEKMLSDKHEKGKLIIGDGVKFIEENSGFDVIIVDSTDPVGPAEMLFSEEFYKNAYRALNDPGIYVTQAGSVYLFTDEFLTAYRKMRKVFDKVYYYSFPVIGYASPWAFLVGVKGSIDFMKVDAEKGKKLGLEYYDPDKHETLFQMPRYIVQML

SEQ ID NO: 12139 - protein, 504 aa, Xylella fastidiosa 9a5c
MLTRKKSMDCKVGRLGMPIALAVSDCYPNPKRFPLMSLENVEKLVKDKKIEFVDLRFVDMRGVQQHVTFPVNILEPSLFKDGKMFDGSSIAGWKGINESDMVLLPDANTAYLDPFYADPTLVMTCDILDPATMQSYVRDPRGIAKRAEIYLNSLGIADQAFFGPEPEFFIFDSVRFANDMGHAFFQIASEEAAWNTGAEFEGGNGGYRPAVKGGYFPVPPTDSLHDLRAEMVKTLEQVGIETEVHHHEVATAGQCEIGTKFNSLVKKADQLMTMKYILKNVAYRNGKTVTFMPKPMVGDNGSGMHVHQSLSKGGVNLFSGDDHAGLSQLALYYIGGIFKHAHAINAFSNSGTNSYKRLVPGFEAPVMLAYSARNRSASCRIPWVSSPKARRIEMRFPDPLQSGYLTFTALMMAGLDGIKNKIHPGPPNDKDLYHLPPEEEKLIPQVCSSLDQALEALDKDRDFLKAGGVMSDDFIDGYIALKMQEVTQFRAATHPLEYQMYYAN

SEQ ID NO: 12140 - protein, 463 aa, Ceratophyllum demersum; identical to SEQ ID NO: 8691

SEQ ID NO: 12141 - protein, 356 aa, Ceratophyllum demersum; identical to SEQ ID NO: 8693

SEQ ID NO: 12142 - protein, 160 aa, Medicago sativa
MGTLDTKGFTEEQEALVVKSWNAMKKNSAELGLKLFLKIFEIAPSAQKLFSFLKDSKVPLEQNTKLKPHAMSVFLMTCESAVQLRKSGKVTVRESSLKKLGANHFKYGVVDEHFEVTKFALLETIKEAVPEMWSPAMKNAWGEAYDQLVNAIKSEMKPSS

SEQ ID NO: 12143 - protein, 779 aa, Zea mays
MGTLSMSDASPIPAKNWDASPVKLEAQGGDAILGMKEEERLLELVKDEQADGILDSLPIDLEAKNGDASLITEAMKKEEEQLEDTRIKVQEEEEARKREEAARLAFDPETQYNKLDELLTKTQLFSEFLLENMDRIADESVETQAEQPQVEEKKKGRGRKRKAKPQYNDKKAKTAVAAMLTRSREERLAEDSTLSEEERWEKEQANLVPLLTGGKLKSYQIKGVKWLISLWQNGLNGILADQMGLGKTIQTIGFLAHLKGKGMHGPYLIIAPLSTLSNWVNEISRFTPSLVSIIYHGGKAARAEIRRKFMPTNVGPDFPIVVTSYEMAMFDAKFLAAYKWKYVVVDEGHRLKNAKCLLLKQLKRIPMDNKLLLTGTPLQNNLAELWSLLNFILPDIFSSHQEFESWFDFSGGNEETDEKKRLHVVSKLHAILRPFLLRRMKEDVEQMLPRKKEIIIYANMTEQQKQIQHHLIEKTFDNYLHEESDIILKRPGIRARLHNLMIQLRKNCNHPDLLESPVDSTGLYPPVEKLLEQCGKFQLFDRLLNFLMAQKHKVLVFSQWTKVLDIIEYYLDSKGHAVCRIDGNVKLEERRRQIAEFNDVNSSMRIFLLSTRAGGLGINLTAADTCILYDSDWNPQMDLQAMDRCHRIGQTRPVHVYRLATSHSVEGRMIKRAFGKLKLEHVVIGKGQFEQDRAKPSALDEGELLALLKDEQTEEDRIVQTDISNEDLQRLMDRSDLMGPPPGAGGANAASPLVPLKGPGWEVVVPAKSGGGMLSSLTS

SEQ ID NO: 12144 - protein, 1195 aa, Ashbya gossypii ATCC 10895
MGLARSLSRHPTIQYFHSTYKKTVGHKLRDVISAIVHRLHPIFRKLLPNFIAAHYFYIITMALLCSILVYPVKNAAYIDVLFLSAGAATQGGLNTIDICDLSLYQQIVLYLVSMFTTPIWIHGMLVFVRLFWFERYFDGIKSWSKKNFQMRRTRTLVARELSRSMSSSRHWPKPDRHLKGSDRRLTRTSTATNDFQNRLFSGKLVNREESNVAPEDKEPRVFSTACSEVAPSPSDSNSKASNRTSSLGTTSVSSGVAPGSISNKSEPDLSRQSPAEPLSAKRDGEVTPADLVRSITMMQSQHRKTEDEDGPALVIKGPHERTSGRTSGNEGEDYEDEGVPSRDSTEKTRRLDLRKRPLSGRSSQGGMAWLTPSQSLSAIEQRRSGDYSDVSSALETATEAHDHPSWKQGGRTAEPTSELPRSTTSAEQLASATNNGPSIHFEIGNMPRPPTRQNLQRHDTGSSKYGESSDNKKSGRPGLLRRLSASGGIKDFLMRNNGSASVTRGDNDHVPDSVSSDNDSAIESTGSEENDETGDSRNRTYFRQPSRDAQTPESIRAEDLRRSFRRRRSTGLSLKKLQLSASFNKILGDRVPNALRRKSKRTSNASLTSADHSADSVDSYSNYYDQESGYGGLDLDGNEMSHVMSTNYLSYNPNIGRNSIFIGLTDAQKVELGGVEYRATKLLCRILVTYYFGFHALIVIFLLPWIHSSQKYKDIVASNGVSTTWWAFFTSQSAFNDVGFTLTKDSMLSFSKASFPLVVMIFFIIFGNTGFPILLRFIIWVMFKLAPDLSLMKENLGFLLDHPRRCFTLLFPRAATWWLFLIVVGLNSLDLILFIVLDLNSSLLNGMHAGQKVIDGLFQAVNTRTAGLAVVDLSQLHPSIQVSYMLMMYISVLPVAISIRRTNVYEEQSLGIYGNLMPIIAEASTTGTSAQSRLNKHGSTKEDVNIDQEQDTKSFVRDHLRKQLSFDLWYMFLGLFIICIVEGDRIQDPNEPTFDVFHILFEVVSAYGTVGLSLGFPNTNQSFSAQFKPLSKFVIVAMLIRGRHRGLPYKLDRAIMLPSDKLKQIDNLEDLKLQKTATSNKDPLLQYWRRRAKPVSTGIAQVLSRTKSHTSRSSDHSHIPIAVERGEQATGAPLGPTASGSIKSDYVMRRNSHKSTDQERSPSTISPLQPASEEDMDPSGHPSHTVDAEPNKFLA

SEQ ID NO: 12145 - protein, 236 aa, Glycine max
  misc_feature (112)..(112): Xaa can be any naturally occurring amino acid
MTGTKRNQITTSPVGSPTSGNISDSYSSKEQDRFLPIANVSRIMKRALPANAKISKEAKETVQECVSEFISFITGEASDKCQREKRKTINGDDLLWAMTTLGFENYVGPLSXYLNNYRETEGEKSSTSMAKQEELHSPTHQHQTNIDGVVEINKLLPHSVAAATKASDFNNTTFSAGGFYSVGPHQVTAPKSFTEMGGLNGYRESSIAQSALSADQIQDASGNRMMPPILRYRVEW

SEQ ID NO: 12146 - protein, 108 aa, Zea mays
  misc_feature (29)..(29): Xaa can be any naturally occurring amino acid
  misc_feature (31)..(31): Xaa can be any naturally occurring amino acid
  misc_feature (68)..(68): Xaa can be any naturally occurring amino acid
  misc_feature (93)..(93): Xaa can be any naturally occurring amino acid
RTFNSYITRRVILMGERSYIISILLYLSXKXTFFFCGIVMLHFTLHNVTLSFMFTTKHTFVTLSSIAXLFLFLYFGMVAFDYYKWELASYISXKPISLKSNIFGLVLV

SEQ ID NO: 12147 - protein, 465 aa, Coptis trifolia; identical to SEQ ID NO: 8700

SEQ ID NO: 12148 - protein, 190 aa, Anthoceros punctatus
DEHGEVVAEIRRSDLEPYLGLHYPATDIPQASRFLFMKNRVRMIADCFSPPVKVIQSKDLPQPVSLAGSTLRAPHGCHAQYMGNMGSIASLVMAVVINDNDEDFNGRGYQQKGRKLWGLVVCHHTTPRAVPFPLRSACEFLMQVFGLQLNMEVELAAQMREKHILRTQTLLCDMLLRDAPIGIVTQSPNI

SEQ ID NO: 12149 - protein, 161 aa, Trema virgata
MSSSEVDKVFTEEQEALVVKSWAVMKKNSAELGLKFFLKIFEIAPSAKNLFSYLKDSPIPLEQNPKLKPHAMTVFVMTCESAVQLRKAGKVTVRESNLKRLGAIHFKNGVVNEHFETRFALLETIKEAVPEMWSAEMKNAWGEAYDLLVAAIKFEVKPSST

SEQ ID NO: 12150 - protein, 248 aa, Gibberella zeae PH-1; identical to SEQ ID NO: 337

SEQ ID NO: 12151 - protein, 473 aa, Prochlorococcus marinus str. MIT 9301
MSKSPQDVLSQIKDEGIELIDLKFTDIHGKWQHLTLTSDMIEEDSFTEGLAFDGSSIRGWKAINASDMSMVPDASTAWIDPFYKHKTLSMICSIQEPRSGEPYDRCPRALAQKALKYLDSTGIADTAFFGPEPEFFLFDDVRYDSKEGGCFYSVDTIEAPWNTGRIEEGGNLGYKIQYKEGYFPVAPNDTAQDIRSEMLLLMGELGIPTEKHHHEVAGAGQHELGMKFDSLINAADNVMTYKYVVRNVAKKYGKTATFMPKPVFNDNGTGMHAHQSLWKSGQPLFFGEGSYANLSQTARWYIGGILKHAPSFLAFTNPTTNSYKRLVPGFEAPVNLVYSEGNRSAAVRIPLTGPSPKAKRLEFRSGDALANPYLAFSVMMLAGIDGIKNQIDPGDGVDVDLFELPADELAKIDTVPSSLNDSLNALKADKDYLLAGGVFTEDFIDNFIDIKYEEVQQLRQRPHPHEFFMYYDA

SEQ ID NO: 12152 - protein, 391 aa, Coptis trifolia; identical to SEQ ID NO: 8705

SEQ ID NO: 12153 - protein, 285 aa, Desulfitobacterium hafniense Y51
MPTFLSENEHGLWMTEDERENLKIDYRIKEIIVEAKSTLQHVMILDSYSFGRMLVLDGAVQTTSLDGHIYNETISHVPLSIHPNPKKVLIIGGGDCGVAKEVCKYSSVEQIDVVEIDPMVVEVCLKHLPEVSGGLADPRVNFIFDDGVNYVQNSPTKYDIVIVDSSDPIGPAEVLIEKSFYRSIFNALEEDGLMVCQSQSPIFHGEVMEQIFERVHDIFPKTKMFTAVVPTYPGGLWSFTLGSKGYVIPNEARMKELDALYVNEQIMASCFSLPEFMNKQLSKYR

SEQ ID NO: 12154 - protein, 391 aa, Elatine triandra; identical to SEQ ID NO: 8706

SEQ ID NO: 12155 - protein, 501 aa, Microcoleus chthonoplastes PCC 7420
MKLHDLLRAIPNVVEMPNHPALDAQITGICTNSHACQPGNLFIGMPGTRVDGGDFWQSAIASGAVAALISPQAAQKHPPQPKPDAEPPCIICATDMTVACAQAAAAFYNYPTRQLQLVGVTGTNGKTTTTHLIEFILTQAQRPTALFGTLYARWQGFSQTAVHTTPFPVELQQQLHSAVAAGCELGVMEVSSHALAQGRVLGCEFDVAVFTNLTQDHLDFHRDMEDYFAAKALLFNSDYLHGKAIINADDPYGKRLIEKVGRDRTWSYSVQNPSADLYTSNLTYTLIGVKGTLHTPVGDVTFNSPLVGQYNLSNVLAAVGAVLNLGLDLKTVVTTLNQFPGVPGRMERVQLKPDQDISVIVDYAHTPDSLENLLKAARPFIQGRMICVFGCGGDRDRTKRPKMGKIGAELADVAVVTSDNPRTEDPERIIQDILEGIPATVEPIVMSDRATAIRTAILDAKPGDGVLIAGKGHEDYQILGTEKIHFDDREQAREALERRFS

SEQ ID NO: 12156 - protein, 465 aa, Magnetospirillum magnetotacticum MS-1
LALVLMDAGYSTSLRDLMRNWRPIAGLAVGAVAATTAAVADIALWLVPDMPLSAAIVLGAVVAPPDAVAALSVLAHVSLPHRLATILRGESLLNDAASLLIYRLGVAAAVTGHFSAAEVAPAFLIGVVGSLVAGPLAALVYLRILRRVEEPMSTIVLQFSAAFGLWIVAEAVELSGVLTVVSFAITVARRAPGQTAPRLRVVSKAVWETAIFVLNVLAFVLIGEQIGPILARMSPEQETAYISVAGAVVATVILIRIAWVLPASALRRLGFEGGEAAGDPRQARDLGLGAGFALAWSGMRGLVTIAAALALPEGGPGGGAFPYRDLIVLTAFCVVIGTLVVQGLTLRPILGRLGLRDSDPVGFEVGRARAEAYGAAVEALRDDHSEAADALRREFHAALAEAEAHEEGLAPEGLPTDEPRRRAVRAARDRLLALRRSGSIGDDAYFVLEEELDWAELNATPRAEA

SEQ ID NO: 12157 - protein, 391 aa, Elatine triandra; identical to SEQ ID NO: 8709

SEQ ID NO: 12158 - protein, 391 aa, Endospermum moluccanum; identical to SEQ ID NO: 8710

SEQ ID NO: 12159 - protein, 391 aa, Galearia filiformis; identical to SEQ ID NO: 8713

SEQ ID NO: 12160 - protein, 391 aa, Goupia glabra; identical to SEQ ID NO: 8715

SEQ ID NO: 12161 - protein, 147 aa, Glycine max
MGDNNIGKVLEREGFKYNFTAAASDTSAQDEVIKEQDRLLPIANVGRIMKQILPPNAKISKEAKETMQECVSEFISFVTGEASDKCHKEKRKTVNGDDICWALATLGFDDYSEPLKRYLHKYREFEGERANQNKGNNNTYENNIANI

SEQ ID NO: 12162 - protein, 458 aa, Aeropyrum pernix K1
MPETGPQRDKDGQREGRVLVHYTDIAGYLRQVEVPLRNVEKEFVASFDGSSVYGFTPVEDSDLLLKHVPETLVSVPWRSGLWRVIATVYNATRERSPRDPRLAAETAEKIMSSMGYRVKAGAEIEFFIFDKIGVDVLNPARGLGYIVESREQPGGQDGIFGQVKKSYHMPEPPDSLLDYRLMLTETLQRFKVDVAVSHHEVAVSQVEVSIGSRTSLARLGDDIMTVKWVSKVLARMDGRVATFMPKPIFGDNGSGMHIHLSLWSPGGENLFAGHGDSDLSETALHFIAGILEHARSLSAILSPTTNSYRRLVAGYEAPVYVAWGWRNRSAMIRIPASAGNIDAVRIEVRSPDPTANPYLALAALFMAGLDGVKKKLAPPDPYEGNLYKISPEELREKGIKTLPRNLDEALDELESDNDYLKPAFTREMLESYIEVKRKESEDTRLYPHPIEVYKYLNL

SEQ ID NO: 12163 - protein, 476 aa, Zea mays
  misc_feature (417)..(417): Xaa can be any naturally occurring amino acid
  misc_feature (433)..(433): Xaa can be any naturally occurring amino acid
  misc_feature (450)..(450): Xaa can be any naturally occurring amino acid
MKVFPDCRPVIIAPRGMLFAWDEEFKKWNVDVPFHILNTTDYTGKEDREICKLIKKEHRTEKLTRLVKLLSWNKGHGILGISYGLYTKLTSEKPGCTEENKVRSILLDNPGLLVLDEGHTPRNERSVMWKTLGNVKTEKRIILSGTPFQNNFLELYNILCLVRPRFGEMFLTKSRVGRRHYVSKKQKDKFSDKYEKGVWASLTSNVTDDNAEKVRSILKPFVHIHNGNILRTLPGLRESVIILKPLPLQKSIIKKVENIGSGNNFEHEYVISLASTHPSLVTAINMSEEEASLIDKPMLAKVRSNPYEGVKTRFVIEVVRLSEALREKVLIFSQFIQPLELIKEHLRKFFKWREGKEILQMDGKILPRYRQASIEAFNNPNNDSRVLLASTRACCEGISLTGASRIVLLDVVWNPAXGRQAISRAFRIGQKKXGEGDKYDRQAEKDHLSXKLVFSTEDEFNNVRNMLSKAEMEHWF

SEQ ID NO: 12164 - protein, 283 aa, Moorella thermoacetica ATCC 39073
MRGIWFSELQTPDLAISVRLNQTLHHEKTPYQELAVVDTEAYGRMLLLDNIIQTTVKDEFFYHEMIAHVPLNTHPNPRTALVIGGGDGGVVREIVKHPSIEKVTLVEIDARVVANAREYLPEIACGLDDARVEIRFEDGIEHVRQRENTYDVIIVDSTDPIGPAVGLFSAEFYRNVYRALKADGVFVAQTESPIFNSRLIRRIQRDLKEIFPIARLYLTTVPTYPGGLWAFSLGSKKYDPLEVDWRQAPKVATRYYTPAIHQAAFSLPPFVQEFLEAPEEEEF

SEQ ID NO: 12165 - protein, 387 aa, Triticum aestivum
MYGSPASKDLNQPPPPTMNSSGLLRYRSAPSTLLGEVCEEFLQPGPRAASPDAAAADNVFSRFLADHQIRDTKPPPPPPVAPGAHFPDDSAMASQQHQQQMMFHSQQQHQQQMPPVGVEGLYRTVSSAGMDSAAAATAGGASSLLRQSSSPAGFLNHLNMDNGYESMLRQGMGVGFRNGAANAAAAAVDSSGGGGGRLKGQLSFSSRQGSLMSQISEMGSEDLGGSSPEGAGGSRGYIPGYPMSSGWEESSLMSENMSGMKRPRDSSEPAAQNGLAHQFSLPKTSSEMAAIEKFLQFQDAVPCKIRAKRGCATHPRSIAERVRRTRISERIRKLQELVPNMDKQTNTADMLDLAVDYIKELQEQVKVINESRANCTCSASKHQQYSG

SEQ ID NO: 12166 - protein, 1098 aa, Yarrowia lipolytica CLIB122
MNDSIENLNNLLLLGVIFVTGHPKLPCEGESAPDGWNWPPSTWFRLTNLSVPLRELRYLYDTKAIRVTCTSTPLKQLLSLRIYLVPEELRVKTQPKHLYSFALQHMHDKRKSAISRLIPFFYIPGKQTPIVPFYRTSLGVITKMVTSEERLNSWLSHLCNDPAKKTASRDELESGKNLLMSLYESVDFVPQYDLSDPHVDAVFSGHVDNLKSELYPYQAETVSQMMHMEETPRTAVSARYLSVKGFFFHPEDLVARKELPETTGLSRGGILAENMGLGKTCICLALICATRKSMATVPAQYSDTLSETMMKLPGNGKISQLKVLVAQRVAELGAPWGLYADRLSSSCVAVLSSIRCTFLMPDIPRVRVSSRTAASREQKPPRRIHLSATTLLVCPDSLPFQWLTETKKHTENLKVIHVSSVDKAPDLDTVLDADLVIITNSILKEVFSNPACSHIQDIRWKRLIVDEGHVVGNNNSILDICGQEWIAECRWVVSGTPTAGLTRLDTTTLFDHKSDLQKLGRIMGEFLKIEPWSSSPSSWQQSVVKPLLAGRYDGFEHAVRVLSGVLVRHQIEDVEQSTRLPPLYNDVVFLNPSFYDRIIANLYVSNICLLNLVDEKKFGLKNLLRRLRGAFVVSTNYETRDIQFFLDELSAYIYENRVALTGPDNENDARLIKKIFSALNYAATSGNWLQIAGTQEMPFFVEDETRTSRAFQMANPLIVRDKREYGIIGGAPLTYLQRAASEDEKLDLWTETKSKDGTPLEGVIKELSDDPLFSSRFWTSYNRNVDNKRERKDKKNPAVKNFHHAKQKISPEEYLESVGLKVESAPTGAPQNHHSQLEADYPVSDKPTIVGTGSSKLSYLVSKTLVLVKDHKIIVFYEDVDSAVAVAEAFEAVGIKHLIYTTDKVSKERRAQYLATFEATDNFQVLLMNINAAAHGLNITSASWVFFLSPVWRRDIEAQAIKRAHRIGQKSEVHVETLVLQDTLEEDIYRRRTEISDANDETPKEMVDDDQLRETLLNYALTSMENLHKGTTDEVAFFDKPVPLYIKVDKHDQFENSLVHFEGLPVRKKRKKTVVADGFASSKRSKGNLVKKETTANR

SEQ ID NO: 12167 - protein, 641 aa, marine gamma proteobacterium HTCC2143
MGKIIGIDLGTTNSCVAVLDGDGPRVIENGEGDRTTPSIVGYAEDGEILVGQSAKRQAVTNPTNTIFAVKRLIGRKYKDDVVQKDISMVPYTIAAADNGDAWVSARGKTMAPPQVSAEILMKMKRTAEEFLGESVTEAVVTVPAYFNDSQRQATKDAGKIAGLEIKRIINEPTAAALAYGMDKAKGDHTIAVYDLGGGTFDISIIEIAEVDGEHQFEVLSTNGDTFLGGEDFDMRLIEYLSDEFKKESGMDLKGDPLAMQRLKEAAEKAKIELSSSQQTEVNLPYITADASGPKHLVVKLSRAKLESLVEELVVNSLAPVKQALQDADLSTGDIDDVILVGGQTRMPMVQTKVAEFFGKEPRKDVNPDEAVAMGAAIQGGVLSGDVTDVLLLDVTPLTLGIETMGGVATALIEKNTTIPTKKSQIFSTAEDNQSAVTIHVVQGERKQASGNKSLGRFDLTDIPPSQRGMPQIEVTFDLDANGILHVGAKDKATGKEQSIRITASSGLSDEEIEKMVQDAEVNAEADQKFEELVTSRNTLEGLINATKKTVEEAGDKATDDEKAAIEGAVKEAEEALAGEDIAAMEAATQKLTETSGPLAQKMYAEQAEQAEGGGGADSAEQTEAGDDVVDAEFEEVKEDNK

SEQ ID NO: 12168 - protein, 608 aa, Exiguobacterium sibiricum 255-15
MAKIIGIDLGTTNSCVAVMEGGEPVVIANAEGNRTTPSVVAFKNGERQVGEVAKRQAITNPNTIMSIKRHMGTDYKVEVEGKDYTPQEVSAIILQKLKAQAEDYLGEKVTEAVITVPAYFNDAERQATKDAGTIAGLDVKRIINEPTAAALAYGLEKGEDHTILIYDLGGGTFDVSILELGDGVFEVVSTAGDSRLGGDDFDQKIIDHLVAEFKKDNGIDLAQDKMALQRLKDAAEKAKKDLSGVSSTQISLPFITAGAAGPLHLEMTLSRAKFDDLTADLVERTMAPTRRALSDAGMTPDKIDKIILVGGSTRIPAVQKAVQDFTGKESFKGVNPDEVVALGAAVQGGVLTGDVKDVVLLDVTPLSLGIETMGSVMTKLIDRNTTIPTSKSQVFSTAADNQPAVDIHVLQGERPMASDNKTLGRFQLTDIPPAQRGVPQIEVKFDIDANGIVNVSAKDLGTNKEQSITIQSSSGLTEADIDQMVKDAEANADADNKRKEEVELRNEADQLVFATDKAVKDLGEQIDAADKEKAEAAKEKVTTALAGTDVEAIRSAKDELSTVVQELTQKVYENMAQQQAGAEGAQAGGQDDNVMDAEFEEVDDKDNK

SEQ ID NO: 12169 - protein, 214 aa, Oryza sativa
  misc_feature (28)..(28): Xaa can be any naturally occurring amino acid
  misc_feature (76)..(76): Xaa can be any naturally occurring amino acid
  misc_feature (126)..(126): Xaa can be any naturally occurring amino acid
  misc_feature (151)..(151): Xaa can be any naturally occurring amino acid
  misc_feature (156)..(156): Xaa can be any naturally occurring amino acid
LCVSLHQEKLEPSCSLTTRFVLEIVHLXEAMKERELVFNQCLEPLSLIMHQLSTIFHWTKGKEILLMSGNVLGKFXETVIEAFNDMKSNANVMLASTAECYKGITLVGASHVVLLDVVWNPYVRRXVSNQAYRIGQEKIVYTYILIAEGTXRKTNXDKQARKDHMSKLLFSKEPHQYQSLQDFNLSKKVISNDKILEAMTSQGELKDMFLNLVI

SEQ ID NO: 12170 - protein, 441 aa, Bartonella quintana str. Toulouse
MIRKVILLVAGVLLGASSMIMVQSVAANNEGDTYQQLSLFGDIFERVRMQYVTVPDDKKLIENAINGMLTSLDPHSSYMNAEEAKDMWDSTKGEFGGLGIEVTMEKNLVKVVSPMDDTPASKAGILAGDLISKIDGVQTNGQTLNEAVKRMRGAPGTPITLTIIRSGVDKPLEIKVVRDIIKVKAVKYRVEDDIGYLRLIRFSEQTFGDLQTAIKDIQSKIPQDKLKGYVLDLRLNPGGLLNQAVNVSSAFLNKGEIVSTRGRKKNDVVRFDAKPGDIINGKPLIVLINGGSASASEIVAGALQDHRRATILGTQSFGKGSVQTVIPLGENGALRLTTALYYTPAGTSIQGTGITPDIIVEQPLPEQYKDYDVKLGESELKGHIKGKQESNKGSGSAAFVPKDPKDDTQLSEAYKLLRGEMAHAAFPPDPNKNVLKKDVLK

SEQ ID NO: 12171 - protein, 212 aa, Ralstonia eutropha JMP134
MNRRQTAFAASVRRAMFATALALAAASAALLPHPARAADKPAAMPAAAPAGNCPASLNFQFPRLQDEAPQNLCQYAGKVVLVVNTASYCGFTPQYEGLEALYSKYRDRGLVVLGFPSNDFSQEPGSSKEIADFCYNTYGVKFPMLGKSHVRGGDVNPMYALLAKETGTAPKWNFYKYLIDRSGNVVGSYNSMTKPDDKQFVAKIEQLLSSPR

SEQ ID NO: 12172 - protein, 639 aa, Shewanella sp. MR-4
MGKIIGIDLGTTNSCVAVLDGGKARVLENAEGDRTTPSIIAYTDDETIVGQPAKRQAVTNPNNTFFAIKRLIGRRFKDDEVQRDVNIMPFKIIQADNGDAWVESRGNKMAPPQVSAEILKKMKKTAEDFLGEEVTEAVITVPAYFNDSQRQATKDAGRIAGLEVKRIINEPTAAALAYGIDKKQGDNIVAVYDLGGGTFDISIIEIDSNDGDQTFEVLATNGDTHLGGEDFDNRLINYLADEFKKEQGLDLRKDPLAMQRLKEAAEKAKIELSSTNQTEVNLPYITADATGPKHLVVKITRAKLESLVEDLIIRTLEPLKVALADADLSVSDINEVILVGGQTRMPKVQEAVTNFFGKEPRKDVNPDEAVAVGAAIQAGVLSGDVKDVLLLDVTPLSLGIETMGSVMTKLIEKNTTIPTKAQQVFSTADDNQSAVTIHVLQGERKQASANKSLGQFNLDGIEPAPRGMPQIEVMFDIDADGILHVSATDKKTGKKQNITIKASSGLSEEEVAQMVRDAEAHAEEDKKFEELVQSRNQADGLVHATKKQVEEAGDALPADDKAKIEAAMSAVEVATKGNDKEAIEKATQELIEASAKLMEIAQAKAQTQGGAQEGAAKQSNATADDVVDAEFEEVKDDKK

SEQ ID NO: 12173 - protein, 287 aa, Cyanothece sp. ATCC 51142
MLQLETQSQPSPMSQPTTTAILVIGGAEDKVHGKEILHTFWFRSGGTDATIGIIPSASREPVLIGERYQSIFEEMGAKYVKVLDIRDRDQGNDSYFKEYVEECTGMFMTGGDQLRLCGLLADTPLMERIRQRVQLGEISLAGTSAGAAVMGHHMIAGGSSGESPNRALVDMAMGLGIIPEIIVDQHFHNRNRMARLLSALSTHPERLGIGIDEDTCAMFERDGLIRVVGKGTVTIVDGRDMTYTNQAEIAAADPLSLHNLKLNILSHGDCYHLHQHECIAKISNPIQ

SEQ ID NO: 12174 - protein, 872 aa, Cyanothece sp. ATCC 51142
MKILKTLTLRGPNYWSIRRKKLIVMRLDLEDLADKPSNEIPGFYDGLVEVLPSLVEHYCSPGHRGGFLERVKEGTYMGHIVEHVALELQELTKMPVGFGRTRETATPGIYNVVFEYVDEQAGRYAGRAAVRLCRSIVDTGTYPLKELEQDLSDLQDLQANASLGPSTQTLVTEAEARNIPWMALSARAMVQLGYGVHQKRIQATLSNYSGILAVELACDKEGTKTILQDAGVPVPRGTTIQFFEELESAIDDVGGYPIVIKPLDGNHGRGITIDINSWKEAEEAYDLASEESKTRTVIVERFYKGSDHRLLVINGKLVAVAERVPAHVIGDDKHTIEELIDITNEDPRRGEGHDNVLTRIKVDKTVLGMLDKQGLRLDSILDKGEIVYLRATANLSTGGSAIDRTDDIHPENLWMAERVAKIIGLDIMGIDVVTPDITKPLRDVDGVIVEVNAAPGFRMHVAPSQGLSRNVAAPVMDMLFPPESPSRVPIVAITGTNGKTTTTRLTAHIYRQTGKVVGYTSTDGVYIGEYLVEKGDNTGPFSAGMILKDPTVEVAVLESARGGILRSGLAFDTCDVGIVLNVAADHLGLGDINTIEQMARVKGVVAEVVHADGYAVLNADDPLVAAMAEQVKGKVAYFSMNPDNEIIHNHTRRDGMAAVYENGYISILEGQFTLRIEEAVNVPMTMGGMAPFMIANALAACLAAFCQGVDIEDIRQGVRTFKASANQTPGRMNLFNLGDYHALVDYAHNPAGYEAVGEFVKNWKGQRLGVVGGPGDRRDEDLILLGKIAARVFDRILVKEDDDKRGRARGEAADLIIDGILSENDKADYEAILDETEAIEYGLDKVDKGGLVVIFPESVTRAISLINRRNPI

SEQ ID NO: 12175 - protein, 721 aa, Oryza sativa Japonica Group
MASGVCPPAELGFGAEYYSVVNGVCSRAGSYFGGRPVLTQAVGYAVVLGFGAFFALFTSFLVWLEKRYVGSQHTSEWFNTAGRSVKTGLIASVIVSQWTWAATILQSSNVAWQYGVSGPFWYASGATIQVLLFGVMAIEIKRKAPNAHTVCEIVRARWGTPAHLVFLTFCLLTNVIVTAMLLLGGSAVVNALTGVNVYAASFLIPLGVVVYTLAGGLKATFLASYIHSVVVHAVLVVFVFLVYTSSSKLGSPRVVYDRLMAVASAARDCSADLSRNGQACGPVAGNFKGSYLTMLSSGGLVFGIINIVGNFGTVFVDNGYWMSAIAARPSSTHKGYLLGGLVWFAVPFSLATSLGLGALALDLPLTAAEAAKGLVPPATATALMGKSGSVLLLTMLFMAVTSAGSAELVAVSSLCTYDIYRTYLNPGASGKQILRVSRAVVLGFGCFMGVLAVVLNVAGVSLGWMYLAMGVIVGSAVIPIALLLLWSKANAVGAMGGAVSGCALGVAVWLTVAKVQYGRVNLDTTGRNAPMLAGNLVSILVGGAVHAACSLLRPQHYDWGTSREMITTVESVHAALDDELKEERLVHAKRWIVRWGLVFTAVIVVAWPALSLPARRYSLGYFTLWAAVAIAWGTVGSVVIILLPVAESWTTITKVCAGMFTNDAVYDRLDDVNLRLRAIMGAMPEAEKRYRQLHETEMHPAGTHPANDDDDDNNNNQMMHS

SEQ ID NO: 12176 - protein, 73 aa, Physcomitrella patens subsp. patens
VQMRARAKRGCATHPRSIAERVRRTRISERMKKLQDLVPNMEKTTNTADMLDETVEYVKSLQVKVSELQETIA

SEQ ID NO: 12177 - protein, 391 aa, Hirtella bicornis; identical to SEQ ID NO: 8739

SEQ ID NO: 12178 - protein, 147 aa, Pisum sativum
MGFTDKQEALVNSSWESFKQNLSGNSILFYTIILEKAPAAKGLFSFLKDTAGVEDSPKLQAHAEQVFGLVRDSAAQLRTKGEVVLGNATLGAIHVQRGVTDPHFVVVKEALLQTIKKASGNNWSEELNTAWEVAYDGLATAIKKAMT

SEQ ID NO: 12179 - protein, 429 aa, Sulfolobus solfataricus P2
MNVEKELREKGVEILRFTWVGLDGYIRSKGAYIDHVDELLKTGIGLTMAMMSFTPMDYISPYGTFGPQDEDVFLTPDLNTLSVFPPSAIVICNLYKHGNPWNYDPRSILIKTIEKAKEQYDFDFKSAFEIEFYLTKDKKPLDDARCFDPSAFYNNQIIPEIAKTLRQINIEPIRIIKEYGPGQYEFDIMHKDALRSADEVVIFKEVARQVASKHGVEANFMPKPFNKLAGSGLHLNISLWKDNQNLFYSHNDKYGLSDLAYNFIAGLLEHAKALTAIASPTINSYKRLVPGSWAPTKITYGYNNKSAMIRIPTPYPGMSQLDRRIEYRVPDPSTNPYLLLTAVIEAGLDGIERGLKPPEAVNENAYYRKDIDDIPRNLREALNELRKDTKLVERIGKEIIGEFIKVKLAEVEEYESLVTDWEYEVYRRL

SEQ ID NO: 12180 - protein, 391 aa, Homalanthus populneus; identical to SEQ ID NO: 8741

SEQ ID NO: 12181 - protein, 210 aa, Eucalyptus occidentalis
MVRGKIQLRRIENTTSRQVTFSKRRNGLLKKAYELSVLCDAEVAVIIFSQKGRPYEFSSNSEIQKTIDRYRRSTYDMDTYKTNLDQCILHLKQETTDMERKIELLEVSLRKLSGECLGSCSIDEIQMIGDQLERSLSSIRARKAQLFDDQIQHLQAKERSLKEENAKLLAKCLANPGQSTAHPRAAALHSRSSRSTDVETRLFIGLPELN

SEQ ID NO: 12182 - protein, 162 aa, Mycobacterium abscessus
MTDLASIPLTALDGSALSLADFGDNAVLVVNVASKCGLTPQYAALEKLASDYADRGLTVLGVPCNQFMGQEPGTAEEIREFCSSTYGVSFPLLEKADVNGDNRHPLYAELIKTADAEGTAGDVQWNFEKFLIARDGSVVNRFRPTTVPDAPEVIAAIEKELG

SEQ ID NO: 12183 - protein, 170 aa, Glycine max
MGASQSISEKSFHEFTVKDARGKDVNLNAYRGKVLLVINVASKCGFADANYTQLTQLYSTYKSRGLEILAFPCNQFLKKEPGTSQEAQDFACTRYKAEYPIFGKIRVNGSDTAPVFKFLKTQKSGVMGSRIKWNFTKFLVDEEGRVIQRYSPTTKPLAIENDIKKALRVA

SEQ ID NO: 12184 - protein, 391 aa, Hugonia platysepala; identical to SEQ ID NO: 8743

SEQ ID NO: 12185 - protein, 227 aa, Eucalyptus occidentalis
MAREKIQIKKITNATARQVTFSKRRRGLFKKAEELSVLCDADVALIVFSSSGKLFEYCSSSMKEILERHHSHSENLGKLDQPSLKLQLVENGDYSRLSKEVAEKGHQLRQMRGEELQGLNIDELQQLEKSLEAGLNRVIEKKGEKIMKEITDLQQKGAKLMEENKRLKQQVTEISGRKTTATDSETIINEEGLSSESITNVCSSSSGPPQEDDSSDISLKLGLPYNG

SEQ ID NO: 12186 - protein, 290 aa, Gluconobacter oxydans 621H
MAETWLNETLYPDWGQRFLVTRELARVKSDFQDVVVFESSSHGRVLVLDGVIQITERDEFVYQEMLTHVPLLAHPCAKRVLIIGAGDGGVLRRVLQHDTVEKAVMVEIDGAVIELSKQYLPDIAGDAWNDPRAEVIVGDGIDYVAKAADGSFDVIIVDSTDPIGVGEVLFTDEFYSNCARILSAEGLIVNQCGVPFMQADELYETSLRRAKFFPHVGAYVAAVPTYVGGFMTLGVASKGQAPNTQTVEQIRTRAEAAKILGTTRYWTPEIHVGSFNLPPYIAEHLPKTGK

SEQ ID NO: 12187 - protein, 391 aa, Hymenanthera alpina; identical to SEQ ID NO: 8747

SEQ ID NO: 12188 - protein, 574 aa, Oryza sativa
MEHSLVAEAEAQVFFKAKAKGGFRALPFIISNEILEKVAGFGLNINFITYLNMQYHLSHANAGSLLFVWGAVSNFAPIPGAVIADMYLGRFIVVAIGSIACFVGMVFLWLSAMIPGARPPPCDMSASPELCAPPEARHMAWLLAGFVFLSVGAGGVRPCSMAFGADQFSRHPKERRSRILQVYFNAYYGSIGVAFMVAVTVVVYVQDNLGWKVGLAVPTCLMLLSAASFLLGSGLYIKDRGSKRMFAGIGAAVAAAVRNRRAWLPAKTEDGVYHHLKDCKLTVPTDRLRFLNKACMISNTKEDKSGSGGADGISDRGRLCTVDQVEQLKSAIRVMPIWSSTIFLAQAMNQYFAVPQADAMDRRVGAGGFRVPSGTFAVFNMLTMSLWSGCYDRWTAPALRRLTGNPRGLTMKQRIGGGLVFGTAAMAAAAVVEAARRRQALGGGGMSAFWLVPQYALAGLAEAFGVIGVIEFFYTELPKSMASFSMALLYMALGAGSLVGSLIIKLVHEVSGRRGRTSWLAEDLNAGRYDYYYWLLAGLGAVNFVYFLWCGWAYGEEGQNVEWEDEGEGETTIA

SEQ ID NO: 12189 - protein, 392 aa, Hypericum empetrifolium; identical to SEQ ID NO: 8748

SEQ ID NO: 12190 - protein, 121 aa, Helicosporidium sp. ex Simulium jonesii
FTPQYAELEQLQQEFGAQGFDVLGFPCNQFMNQEPGDSCSIRDAARAKHGATFPMFAKIKVNGSEADPLYKWLKEQKGGILTSAIKWNFAKFLVDRQGKVVGRYAPTTSPKDIANDIKKFL

SEQ ID NO: 12191 - protein, 161 aa, Nostoc punctiforme PCC 73102
MSNTISDIAVKTINGEDKQLKDYTGKVLLIVNVASYCGYTSQYEGLEKLNQKYREQGLRILGFPCNDFGAQEPGSNEEIVQFCTSKYSVTFELFDKIHAKGPQQHPLYERLTKAVEPTGTIAWNFEKFLVNKKGEVTARFNSSVQPNSPELIAIIEKELAK

SEQ ID NO: 12192 - protein, 167 aa, Helianthus annuus
MGRGKIEIKRIENTSNRQVTYSKRKNGIIKKAKEITVLCDANVSLVIYGSSGKMYEYCSPKTNLIDMLDRYQRLSGNKLWDAKHENLQNEIDRIKKENESMQIELRHLKGEDMTSLNYEELIGYEDALENGLTNIREKKDEIPKIMRKREQVLEDVVIYAFMQIMLR

SEQ ID NO: 12193 - protein, 162 aa, Trema orientalis
MSSSEVDKVFTEEQEALVVKSWAVMKKNSAELGLKFFLKIFEIAPSANNLFSYLKDSPIPLEQNPKLKPHAMTVFVMTCESAVQFRKAGKVTVRESNLKRIGAIHFKNGVVHEHFEVTRFALLETIKEAVPEMWSPEMKNAWGEAYDQLVAAIKFEVKPSST

SEQ ID NO: 12194 - protein, 718 aa, Mannheimia succiniciproducens MBEL55E
MKLNKSKTYLATLVVSAVIGMSGNAFAVHPTLKASDIVIPQPTEENGLATKRATTRLTQSHYRKFQLDDEFSHKIFARYLDFLDYSHNLFIKSDIDELQAKYAALLDDELNEGKLDIAFAMYDLMAKRRYERYEYALSLLDKEPSLKDDDQIEIDRKKAAWPASVEEANKLWAARVKNDIIDLKLKDKKWSEIKKTLTKRYNLAIRRLTQTNADDITQLFLNAFAREIDPHTSYLAPRTAKSFNESMNLSLEGIGATLQQEDDVTTIKSLVPGAPAERSKRIKAGDKIIGVGQAKGEIEDVVGWRLEDVVDKIKGKKGSKVRLEIEPAKGGKSKIITLVRDKVRIEDSAAKLTVEKVNGQNVAVIKIPTFYIGLTADVRKLLEQMKAKKATSLIIDLRENGGGALTEAVELSGLFISDGPVVQVRDAYNRIRVHEDPDNAQVYTGPLLVMTNRFSASASEIFSAAMQDYNRGIIIGQDTFGKGTVQQSRSLNFVYDLDQEPLGFIQYTIQKFYRINGGSTQLKGVTADINFPAIIDTKENGEEKEDNALPWDKIPAATYSQVSHARDAVEVLKSKHLDRISKDPEFIALAEDLKIRDERSERKYLSLNYEKRKAENDKDDARRLKALNERFAREGKKALKDINDLAKDYEAPDFFLKEAEKMASDLAKFETDKESIQAKAMSLENKADTKDVKAESKKTAEVKTETVKSKEDVRPETK

SEQ ID NO: 12195 - protein, 159 aa, Populus euphratica
MNFGLRMVSEPDQAPIHSITLFVALLCACILIGHLLEKHRWINESITALAIGLCTGTLILLTTKGRSSHILLFDEQLFFIYLLPPIIFNAGFQVKKKQFFRNFMTIMLFGAVGTLISFIIISLGTAQLFKKLDIGFLDTVDYLGLGAIFSATDSVCRIR

SEQ ID NO: 12196 - protein, 499 aa, Nocardia farcinica IFM 10152
MIEMTLREIADVVGGTLHDAPDPEVRVTGTAEFDSRRIGSGDLFLALPGERADGHDYAAAAVAAGAAAVLAARPVGVPAVVVEPRRCSVPATSMALAHDADGSGAAVLAALAALARASVERLSAAGGLTVVGVTGSSGKTSTKDLLAAVLAPLGPVVAPPGSFNNELGHPWTALRATADTRFLVLEMSARGVGHIAALAEVAPPRIGVVLNVGTAHLGEFGSREAIARAKGELVEALPADGLAILNADDPNVAAMAARTAARVVRVGLSGDADYRASEVRLDEQARATFTLHTPAGSTEIRLGVHGEHQVGNALAAAAVASECGADLATVAAALSGARAVSERRMDVRTTADGVTVVNDSYNANPDSVRAALKALVTMSRAGERPRRSWAVLGEMAELGEESVLEHDGIGRLAVRLDVDRLVVVGTGRPSRAMHQGAVMEGSWGEESVLVPDIDAAVALLDREVEPGDVVLVKASKSVGLWEVAEHLTRRAGSDTEAAQ

SEQ ID NO: 12197 - protein, 453 aa, Prochlorococcus marinus str. MIT 9313
MPISRSLRSLGRQRSSWLVLLGAGGAATAIALASPSLGLPRSSSSAISDSPKEVIDQVWQIVYRDYLDSTGKYNPEVWKGLRKDLLAKNYSATSESYEAIRGMLASLDDPYTRFLDPKEFKEMQIDTSGELTGVGIQLSLDKDTKELVVVSPIEGTPASKAGVQPKDVIVFINGQSTKGMSTADAVKLIRGKEGSEVTLGLRRRGEVIQVPLIRARIEIQAVDIQLNTTVSGTKIGYIRLKQFNAHAAKGMRSAIKNLEKEGAQGYVLDLRSNPGGLLEASIDIARQWLDEGTIVRTKTRDGIQDVRRANGSALTQRPVVVLVNEGSASASEILSGALQDNHRGVLVGQKTFGKGLVQSVRGLSDGSGLTVTIAKYLTPSGTDIHKNGIKPDIKAVMSEKEINNLKLEDLGSGKDSQYKVAETTLIKALSKILDGPMYKPVGVKLPQAIPSTL

SEQ ID NO: 12198 - protein, 318 aa, Quassia amara; identical to SEQ ID NO: 8764

SEQ ID NO: 12199 - protein, 164 aa, Oryza sativa Indica Group
MADAGHDESGSPPRSGGVREQDRFLPIANISRIMKKAVPANGKIAKDAKETLQECVSEFISFVTSEASDKCQKEKRKTINGEDLLFAMGTLGFEEYVDPLKIYLHKYREMEGDSKLSSKAGDGSVKKDTIGPHSGASSSSAQGMVGAYTQGMGYMQPQYHNGDT

SEQ ID NO: 12200 - protein, 670 aa, Exiguobacterium sibiricum 255-15
METLSLILLMLALIILTQVLGHYIRFIPTALIQILVGTITALLISGLKIEVESEWFLLLFIAPLLYNDSSHFPRDELWKMRAAIFGNAIVLVLLTTVIGGYFINWLVPVIPVAAAFALAAILSPTDPIAVNGIAKRVQIPEQILNLVRGESLINDASGLVAFSYAVAAVVTGYFSIQQATTEFVYMFAVGAVVGLTISIAMNWLKMKLRRTGIEDVVFYALLQILTPFIIFFVAEEILHASGVIAVVTGGILHALIKERTETFFAQEQTLTDNIWTMIAYILNGIIFLLLGLTLPEATREIFADDAINNWRLMSFVIEIGTVILLIRLIWTMFFNWFDHRFLKKADHRKPSFKQDVITTLVGVRGTITMVGVLSLPFVTESGEGFPERSLIIFLAAGVIIFTLVLATILLPLLNRGEADAQPELDLNSYKQRMVKRAITEIKQVVQEENSTVAFDLLNEYHVMLRLLRAQEKSEEELTHFNQQLKKLRLEAVQWERDFTKQFLQEHKTPDQLKKEVFRSIDNRREAIEKEARFRLSQPIRKILWKRKRSNMSSDQLIHLTQVEHELYEQVMGEVISRLDGCRGDYPADVVQSVLEFYKRLRFKHTRWSSPVGGKADVDQQKEELCLRAIEVQRQEIASMSKEGDLSGEEEKELRRFIHYIESVVLYEYVE

SEQ ID NO: 12201 - protein, 559 aa, Neurospora crassa
MPLKSRWAVDVPRCSLQQWIFDSPCGPLPDRRAYIDPEQPDTNYLDLSSYRLLAKRVALGLQQAGLKEGDRVLLFSGNNIFFPSIFLGILMAGGIFTGANPSFVARELAYQLRDSEASFLVTAQGSLETAFQAAKEAGLPRDRIFVLGGDTPAAQEVVLSSNPGPGLKGRVAGARHWTELLQGNAKEAESWSWKEPKDPQTTTCCLNYSSGTTGVPKGVEISHYCYVANGVQVIHLNNLNPDWEERQKRARALCFLPLYHAYGQTYFVANMPRAGIPIYIMPSFDFVKMLEYVQRYRITSLTCVPPIVVALAKSPLTKKYDLSSVEGLGSGAAPLAKEVSDEAEKLFNGKFRLRQGWGMTETTCTCMSWDPLNKEPSSGVGEMMPNCSGKLMSLDGKVEITKAGERGEFWVTGPNLMRGYWRKPEATAETVVVDADGTRWLKTGDIAYFDAYKPGGIVHIVDRLKELIKVKGNQVAPAELEGLLLEHPEVADAAVIGVTINGEEVPRAYIVRQNPKSKITGQEIAGWMAGKVTRYKQLKGGVVFTDNIPKNPVSSDYIF

SEQ ID NO: 12202 - protein, 176 aa, Triticum aestivum
KLPNHHPHRFLSPTSAAPVPSPPRPKQWPSSLPSDAPIHENPRATIRSCRPRMSLPDVVYSCGSCGYALNLSSSNRSTSDVGSSYQKSLKKGLISFTSIDLSRFTQVDEISCFPFLTWRSYRPKTKLLCRKCGSSIGYGYGEPPVLCSFDPASSSSGTSQNYLIKIQALRLSDGTQ

SEQ ID NO: 12203 - protein, 275 aa, Bacillus subtilis
SELWYTEKQTKNFGITMKVNKTLHTEQTEFQHLEMVETEEFGNMLFLDGMVMTSEKDEFVYHEMVAHVPLFTHPNPEHVLVVGGGDGGVIREILKHPSVKKATLVDIDGKVIEYSKKFLPSIAGKLDDPRVDVQVDDGFMHIAKSENQYDVIMVDSTEPVGPAVNLFTKGFYAGIAKALKEDGIFVAQTDNPWFTPELITNVQRDVKEIFPITKLYTANIPTYPSGLWTFTIGSKKYDPLAVEDSRFFDIETKYYTKDIHKAAFVLPKFVSDLIK

SEQ ID NO: 12204 - protein, 521 aa, Brassica napus
MAQASRICHGVQQNPCAISNLSKSNHRKSPFSVSLKTHQQQRGAYQISSRGLKKSAMVLNRSVTRPVKVMASVSTAEKASEIVLQPIREISGLIKLPGSKSLSNRILLLAALSEGTTVVDNLLNSDDINYMLDALNKLGLNVERDSENNRAVVEGCGGIFPASLDSKGDIELYLGNAGTAMRPLTAAVTAAGGNASYVLDGVPRMRERPIGDLVVGLKQLGADVECTLGTNCPPVRVNANGGLPGGKVKLSGSISSQYLTALLMAAPLALGDVEIEIRVRLISVPYVEMTLKLMERFGVSAEHSDSWDRFFVKGGQKYKSPGNAYVEGDASSASYFLAGAAITGETVTVEGCGTTSLQGDVKFAEVLEKMGCKVSWTENSVTVTGPSRDAFGMRHLRAVDVNMNKMPDVAVTLAVVALFADGPTTIRDVASWRVKETERMIAICTELRKLGATVEEGSDYCVITPPAKLKPAEIDTYDDHRMAMAFSLAACADVPVTIKDPGCTRKTFPDYFQVLESITKH

SEQ ID NO: 12205 - protein, 280 aa, Triticum aestivum
MENDGVPNGPAAPAPTQGTPVVREQDRLMPIANVIRIMRRALPAHAKISDDAKEAIQECVSEFISFVTGEANERCRMQHRKTVNAEDIVWALNRLGFDDYVVPLSVFLHRMRDPEAGTGGAAAGDSRAVTSAPPRAAPPVIHAVPLQAQRPMYAPPAPLQVENQMQRPVYAPPAPVQVQMQRGIYGPRAPVHGYAVGMAPVRANVGGQYQVFGGEGVMAQQYYGYGYEEGAYGAGSSNGGAAIGDEESSSNGVPAPGEGMGEPEPEPAAEESHDKPVQSG

SEQ ID NO: 12206 - protein, 182 aa, Bdellovibrio bacteriovorus HD100
MSTLNHIEFNTADGKKATLADYSGKVLLVVNVASECGLTPQYEGLEKIHQKYESQGLRVLAFPANEFGAQEPGSNEQIQEFCRTQFGVKFPVFAKMVVKGEGQHPLYQQLTTLQPAAQQVPGGKLKSVLEEHGLLSGGPSDIMWNFEKFLIGKSGNVVARFAPDMTPEDPTIVKAIEAELAR

SEQ ID NO: 12207 - protein, 469 aa, Arabidopsis thaliana
MSEEVPQQFPSSKRQLHPSLSSMKPPLVAPGEYHRFDAAETRGGGAVADQVVSDAIVIKSTLKRKTDLVNQIVEVNELNTGVLQTPVSGKGGKAKKTSRSAKSNKSGTLASGSNAGSPGNNFAQAGTCRYDSSLGLLTKKFINLIKQAEDGILDLNKAADTLEVQKRRIYDITNVLEGIGLIEKTLKNRIQWKGLDVSKPGETIESIANLQDEVQNLAAEEARLDDQIRESQERLTSLSEDENNKRLLFVTENDIKNLPCFQNKTLIAVKAPHGTTLEVPDPDEAGGYQRRYRIILRSTMGPIDVYLVSQFEESFEDIPQADEPSNVPDEPSNVPDVPSNLPSTSGLPENHDVSMPMKEESTERNMETQEVDDTQRVYSDIESHDFVDGIMKIVPPDLDMGVDYWFRSEVGEVSITDMWPDESGPDWNQMITFDQDHAGPSDNKILEQPQTPSSPTPEESTATRSPTGS

SEQ ID NO: 12208 - protein, 489 aa, Gloeobacter violaceus PCC 7421
MPAMRLHELLARTGLDTRNLPDIDIAGLSTDSRQVQPGDLFIGLPGTRVDGSEFWPQAIAGGAAGLVISENARGVEAAVPVIRVPDVVGTCARLASAYYDFPARKLTLAGVTGTNGKTTTTHLIENLLQAQAPTGLVGTLYSRWPGQSQEARHTTPFALEIQKLLAQMVEAGCQYGVMEVSSHALAQQRVAGCRFEAAVFTNLTQDHLDFHPDMESYFQAKATLFSPEYRSGRAVINADDPWGVRLAAAYDQVWTYSFQPGADIYPEDAVFTPEGIRGTLVTPVGRAAFTSPLVGQFNLANLLAAVGATLALGIDLEAIAAGLSGFGGVPGRMERVSGSDDDIAVIVDYAHTPDGLRKLLEATRPFVRGRLICVFGCGGDRDRTKRPQMGRIAAELSDLPVVTSDNPRTENPEAILDDILAGIPVGVSPTVEVDRRRAILQALLEAKAGDCVVIAGKGHEDYQILGTTKIHFDDREQAREALSKRRSRG

SEQ ID NO: 12209 - protein, 391 aa, Lachnostylis bilocularis; identical to SEQ ID NO: 8776

SEQ ID NO: 12210 - protein, 446 aa, Rickettsiella grylli
MKLKIPFFFFLACFLLGFSSAFSNPAKVPSPQENKLSQDVLRFNRELEIIKNEYVQKISEHDLLQNAMQGMASGLDPHSSFLDADDLKDLKTATTGEFSGLGLEVGMEEGLLRVVTPIDDGPAQKAGIKPGDWIIRINNTPIQGLSLREAVRKMRGRKGSSIQLTLIRQGQPKPRFVHLKRGLVHIQSIKGHLLEPGYAYIRINSFQASTRHDLDHMLKKLQHQEKTPIQGLILDLRNNPGGLLTSAAEVTNAFLDAKTMHYDQVIVYTMGQSADAKLKILAKPNDQVYSEKLVVLINQGSASGAEIVAGALQDNHRAVILGTKSFGKGSVQTVIPLDDAAALKLTTALYYTPSGRSIQASGISPDIIVDELKINAFTKNPIEAISFHESELKGHLKNDKNPNHSFLSPSSSATNTTDLLKNDYQLFEAFNLLKSMIALQPTKTPL

SEQ ID NO: 12211 - protein, 844 aa, Arabidopsis thaliana
MSLLHTFKETLKPCGSFPSSSSLRVSSTQELEPSRKPPKSSLSQQLLRLDDSYFLPSKHESKISKTQVEDFDHNEDDHKRNIKFDEEEVDEDDERSIEFGRPGLSRAEFDYSGPYEPLMLSSIGEIPIIHVPASINCRLLEHQREGVKGLGKTIQTIAFLAAVYGKDGDAGESCLLESDKGPVLIICPSSIIHNWESEFSRWASFFKVSVYHGSNRDMILEKLKARGVEVLVTSFDTFRIQGPVLSGINWEIVIADEAHRLKNEKSKLYEACLEIKTKKRIGLTGTVMQNKISELFNLFEWVAPGSLGTREHFRDFYDEPLKLGQRATAPERFVQIADKRKQHLGSLLRKYMLRRTKEETIGHLMMGKEDNVVFCQMSQLQRRVYQRMIQLPEIQCLVNKDNPCACGSPLKQSECCRRIVPDGTIWSYLHRDNHDGCDSCPFCLVLPCLMKLQQISNHLELIKPNPKDEPEKQKKDAEFVSTVFGTDIDLLGGISASKSFMDLSDVKHCGKMRALEKLMASWISKGDKILLFSYSVRMLDILEKFLIRKGYSFARLDGSTPTNLRQSLVDDFNASPSKQVFLISTKAGGLGLNLVSANRVVIFDPNWNPSHDLQAQDRSFRYGQKRHVVVFRLLSAGSLEELVYTRQVYKQQLSNIAVAGKMETRYFEGVQDCKEFQGELFGISNLFRDLSDKLFTSDIVELHRDSNIDENKKRSLLETGVSEDEKEEEVMCSYKPEMEKPILKDLGIVYAHRNEDIINIGETTTSTSQRLNGDGNSADRKKKKRKGCSEEEDMSSSNREQKREKYKMLAEFKGMEILEFSRWVLSASPFDREKLLQDFLERVK

SEQ ID NO: 12212 - protein, 391 aa, Leonia glycycarpa; identical to SEQ ID NO: 8777

SEQ ID NO: 12213 - protein, 495 aa, Salmonella enterica subsp. enterica serovar Paratyphi B str.
MADRNLRDLLAPWVAGLPARELREMTLDSRVAAAGDLFVAVVGHQADGRRYIPQAIAQGVAAIIAEAKDEASDGEIREMHGVPVVYLSQLNERLSALAGRFYHEPSENMRLVAVTGTNGKTTTTQLLAQWSQLLGETSAVMGTVGNGLLGKVIPTENTTGSAVDVQHVLASLVAQGATFGAMEVSSHGLVQHRVAALKFAASVFTNLSRDHLDYHGDMAHYEAAKWMLYSTHHHGQAIVNADDEVGRRWLASLPDAVAVSMEGHINPNCHGRWLKAEAVEYHDRGATIRFASSWGDGEIESRLMGAFNVSNLLLALATLLALGYPLTDLLKTAARLQPVCGRMEVFTAPGKPTVVVDYAHTPDALEKALQAARLHCAGKLWCVFGCGGDRDKGKRPLMGAIAEEFADIVVVTDDNPRTEEPRAIINDILAGMLDAGQVRVMEGRAEAVTNAIMQAKDNDVVLIAGKGHEDYQIVGTQRLDYSDRVTAARLLGVIA

SEQ ID NO: 12214 - protein, 459 aa, Prochlorococcus marinus subsp. marinus str. CCMP1375
MINPMPPTVKTFSQIIRQFFAVLISFAIIFSISAEPLIALNDGQQLVLETWNIVNEGFLNPEKFNEVQWRRLRQQAIEKPITTSDEAYSAIETMLLPLGDPYTRLLRPNDFKNLKESNIGSEINGVGLQLGARNDDGEIVVISPLEGSPAADAQIKSGSILIKVDDESPKRLGLEATASKLRGETGSKVLLTLLSPENETKEITLERRSVDLRPVRTKRIRTEKHTLGYLRITQFSEGVPEKVKEALKELSEKEVEGIVLDLRNNSGGLVSSGLAVADAFLSEKPIVETKNRNEINDPIPSGKETLFDGPLITLVNEGTASASEILAGALQDNQRSLLLGKRTFGKGLIQSLTNLSDGSGLAVTVASYLTPSGRDIQNLGIEPDRNLEMPEPLDPGGSEDRWLLDAELLMEANIDLQEVQKEEENNNIELNEEIEVVQRTEFSSNDSENSTDLQIVDNN

SEQ ID NO: 12215 - protein, 391 aa, Gymnosporia arbutifolia; identical to SEQ ID NO: 8779

SEQ ID NO: 12216 - protein, 1520 aa, Coccidioides immitis RS
MDPTAMVIPSTATSSPAPIEASIANQSTLGSLEKATIPANQGNGVESVPNTATNLKRDADSEHPQATTPTGTTDGVHIGMSSTSSEYEATKSPRGIATPMEADGDSHMEDSSEAVDAVSSSSGMSGHESKRGVKRKSPIDESDFIRNNPSLYGLRRSNRTRSIRQTIQSTTDSESEVSRPIKRRRPQPNRKRSSSQSQDSDADSSSDVYSNTQRRQKVKRRRLVQPQVDLAPAHGEVRFSTRRSNKVLNYNEDDDDDLFGDESDNMTPLDWATVLDDNRPAIDVVLNHRLKDDVDPTRLDLGRSDFEFYIKWQGKSHYHATWETDESLVDCRSNRRLDNYVRKLLIQELSFMKDPDMIPEEKEKWNLDRERDIEAIEDFKLVERVIGSRKVAGVTEYYVKWKRLFYESCTWEGAELVSSIAQQEIDRYLDRCSRPPVSSRLESNQSTRSAFEPIHGTPDFVCNGQLKDFQVKGVNFMAYNWVRGRNVVLADEMGLGKTVQTVTFINWLRHVRNQQGPFIVVVPLSTMPSWAETFDYWTPDLNYVVYSGNEASRNIIKEYELLVDGNIKRPKFHVLLTTYEYVLVDASFLSQIKWQFLAVDEAHRLKNRDSQLYAKLVEFKSPSRLLITGTPVQNNLGELSALMDFLNPGLIEIDENMDLSSEAASVKLAELTKAIQPFMLRRTKSKVESDLPPKSEKIIRVELSDVQLEYYKNILTKNYAALNQGAKGQKQSLLNIMMELKKASNHPFMFANAEDRILQGSTRREDALRALITSSGKMMLLDQLLAKLKNDGHRVLIFSQMVRMLDILADYMDARGFAYQRLDGTIAAGPRRLSIEHFNAPDSTDFAFLLSTRAGGLGINLMTADTVILFDSDWNPQADLQAMARAHRIGQTKPVSVYRLVSKDTVEEEVIERARNKLLLEFITIQRGVTDKEATELKDKMVRAGHHINEPTSSEDISRILKRRGQRMFEQSGNQKKLEEIDIDAVLANAEEHKTEQAESMEADGGEEFLKAFEFVDVKVDDLTWDEIIPKEELERIKSEERKEMEAKYLAEEIERSQPRKRKEMADEREERQAKRKARQQVNMDVDDDSDAPPAPDPKRPLTEKEIRHLTRAYLRYGDFNDRERDILREAKLLDRDPSVVNGVLKEIVQSANRHLQEANDEIRALEREGKTFTKKERKAVLFNYGGVKRLNAETIVERPNEMRILRQITSRLSDPKSFRVPEATKAADYSCTWGAREDGMLCIGIARHGYGAWAQIRDDPDLGLTDKFFLEEHRADRKNELTRNGEGMKSPGAVHLVRRADYLLSVLKDKMSNGASPTAKKAVENHHRNNRKPGYSRQQNSGSVSASPAPPSIRKRRESDALRHRVHTRGARGSDRPNTPTSDTRKGISEVDKIRSRHNANFYSGRRNDYSGVVSNNENMLKMVFKPIRDHLRQISQCTKEGIPDKNRRAKELRRLLHSVGGFIHKTLDSEETRESLEARLWDYVARYWPNQATPGSALLDIYKRMVAAENAPQPKSTT

SEQ ID NO: 12217 - protein, 460 aa, Gluconobacter oxydans 621H
MIQEHAAEFVDLRFTDPKGKWHHTTQTVSTIEDDTFVEGFMFDGSSIQGWKAINESDMVLLPDPETAVMDPFSAKPQLILFCDIIDPKTGNFYNRDPRSTAKLAEAYLKDAGFGDTAFFGPEAEFFIFDNVQFGTGPNFGMYQLDSIEGPGASLKAYPEGNMGHRPVVKGGYFPVPPVDSENDLRAEMLSTMGEMGLPIEKHHHEVAQSQHELGTKFDTLVKSADFMQIYKYCVHNVAHSYGKTATFMPKPISGDNGSGMHVHQSIWKDGKPTFAGDKYADLSDEALYYIGGIIKHAKALNAFTNPSTNSYKRLIPGFEAPVLLAYSAANRSASCRIPHATNPKAKRVEVRFPDPTANPYLAFAAMLMAGLDGIRNKIHPGDAMDKDLYELPKEELAQIPTVCGSLREALEALKEDHAFLLEGGVFTKDQIESYIDIKWPEVYKFEHTPHPAEFEMYYSV

SEQ ID NO: 12218 - protein, 392 aa, Gymnosporia senegalensis; identical to SEQ ID NO: 8782

SEQ ID NO: 12219 - protein, 391 aa, Mesua sp. Coode 7884; identical to SEQ ID NO: 8786

SEQ ID NO: 12220 - protein, 663 aa, Debaryomyces hansenii CBS767
MIDTKPILSQGYGYGYALGLGTAFALIMMALSKMMAKFMNEKQNSERFSTASRSVGSGLIASSTVSAWTWPATLLTSGAWAYTYGLAGPFMYGIGGTIQIILFVFLAIEIKRNSPGCHTVAQLIYVRFGKAGHICYLCYCIATNVLVSSLLLLGGSQGFALTTGMHVTAASFLLPTGVCIYTFFGGLKATFISDWIHTVIIYIIICISCFTIYTTSTHIGSPGKMWDLLQEVEKVFPSASEGNFLSFKSRDMILTSWSVMLGGLSSVFGDPGYSQRAIASDPKGLFSGYVMGGVCWFVVPWALGTSAGLASRALLTNAISVTYPRELTSLEINGGMPVIYGLKAIFGLKGAAAGLLMLFMSVTSATSAELIAFSSITTYDVFQTYIKPKAGGKLLVKFAHCSVIFFSLLMAVLSIVFNYIGVTSGWLLGFIGIILSPEVAALVMAIYWKKMSRQSLLFGAPFGTLTGISCWLGSSYHFGGKVINKNTLMAPEATFIGNATAIGSTILYIVIITLIKPENFDFEIFLRSFKAGDDASASDRKAMEISVQDKKLLRKQSILVILLNLLVIGGAYIITPLSLYATGFTFTKKYFTQWVIIMMIWLVFASGYILAFPLWQGRFALLKIVKSLFKKNHESSEEGILIEGLVTYTKDEEYVIVKEVPIH

SEQ ID NO: 12221 - protein, 313 aa, Samadera baileyana; identical to SEQ ID NO: 8791

SEQ ID NO: 12222 - protein, 302 aa, Physcomitrella patens subsp. patens
MCAAAQNIDERARNDFLLLSREILRLDMRAREGVALLGSGFLKLDARAREDVLKLDTQARRDMLRLRHIALGLTETASMELSSAAEEHWSDGALDADLRLADLRARRRAMEDLYAAVLVVKNVHDALVSTLKTRSVDASKDNAERGAAEDNQGFRSYLRNIDPMAEGLVAFQDAYWKMASAFVEAEGMECTDPDELEFIVAALLDMEEVDGGSGALLVTEIASSPDVATRLALADALADAPSLWTLGNAGMGALQRLSMDSNPTVAAAATKAINELKSQWRQQDQLIFPYRQKDEDEPEMGL

SEQ ID NO: 12223 - protein, 360 aa, Oryza sativa Japonica Group
MARVHHKNGRGGGGGGGGGKGKGKGKWKMPASVARKQQAAMANVDQVTGDKIPKSFVFSRGKLPSTLRHLQQDLRKVMLPYTALNLKEKKRNNLKDFVNVSGPLGVTHFFILTNPKSSPHLRMAKTPQGPTYTFQIKEYALAADIANSQKRPRCPPEIFKNSPLTVLSGFGGLGEPFKSLVEYFRHMTPAIDPVTVKLSTCQRILLIHFDREKEMINFRHYSIKLQPVGVTRKIRKLMQNNQVPDLRDLNDVSDYVTKAGYGSESEVDDEAATVSLASDVDKLNRASRKSAIRLQEIGPRMKLHLVKVEAGLCSGDVLYPQPVGKEGLGKKGKEVEEETEGQEDEDLMESDDDPEDESEE

SEQ ID NO: 12224 - protein, 308 aa, Samadera bidwillii; identical to SEQ ID NO: 8796

SEQ ID NO: 12225 - protein, 516 aa, Triticum aestivum
MGSLHVSSSATQHSKLERAYQLLVFHVHPFWLQLLYFVSISFFGLVILKALPMKTSTVPRPMDLDLIFTSVSATTVSSMVAVEMESFSNPQLLLLTLLMLLGGEVFTSMLGLHFTYVKSKKKEAQAPHDHDDGDKGKPAPSSSLELAVTTGMDDVDRVEQGFKDQPRYDRAFLTRLLLFIVLGYHVVVHLAGYSLMLVYLSVVSGARAVLTGKGISLHTFSVFTVVSTFANCGFVPNNEGMIAFRSFPGLLLLVMPHVLLGNTLFPVFLRLAIWALRRVTRRPELGELRSIGYDHLLTSRHTWFLAFTVAAFVLAQLSLFCAMEWGSNGLRGLTAVQKLVAGLFMSVNSRHTGEMVVDLSTVSSALVVLYVVMMYLPPYTTFLPVEDDSDQQVGADQRDQKRITSMWRKLLMSPLSCLAIFIAVVCITERRQISDDPLNFNVLNITVEVISAYGNVGFSTGYSCGRQVTPDGGCRDTWVGFSGKWSWQGKLALIAVMFYGRLKKFSMHGGEAWRIV

SEQ ID NO: 12226 - protein, 284 aa, Alkaliphilus metalliredigens QYMF
MELWYTEEQTQHVRLSFKVKEHLFSEQSEFQKVDVLDTYEFGKLMTLDGLVMVTEKDEFIYHDMIVHVPMAVNPNIKNVLIIGGGDGGTARELMRYQSIKHVDMVEIDKMVCDVARDYFPTISSELENPRVSLYYEDGVAFIKDKENKYDLIIIDSTDPVGPGEGLFSQEFYTNCFKALTEQGILVNQNESPVYEQFAREAIRANSKLKKIFPIVEVYQAQIPTYPSGYWLFGFASKSLHPVKDLKSSVWNQLNLNTKYYNTQLHVGAFALPSYVKEQIENGNV

SEQ ID NO: 12227 - protein, 469 aa, Rhodopseudomonas palustris CGA009
MTTAKEVLKSIKDNDVKYVDLRFTDPRGKWQHVTFDVSMIDEEIFSEGTMFDGSSIAGWKAINESDMTLMPDPATATIDPFFAETTMVITCDILEPSTGEPYNRDPRGIAKKAEAQVKALGIGDSVFVGPEAEFFVFDDVRYSASPYNTGFKLDSSELPTNSDTEYEGGNLGHRIRTKAGYFPVPPQDSVQDMRSEMLGAMAKMGVKVEKHHHEVASAQHELGMKFDTLTHMADQMQIYKYCIHQVAHIYGKTATFMPKPVFGDNGSGMHVHQSIWKDGKPTFAGNKYADLSETCLHYIGGIIKHAKAINAFTNPSTNSYKRLVPGYEAPVLLAYSARNRSASCRIPYTTSPKAKRVEVRFPDPMANPYLAFAAMLMAGLDGIKNKIDPGPAMDKDLYDLPKEELKQIPTVCGSLREALENLDKDRAFLKAGGVFDDDFIDAFIELKMTEVARFEMTPHPVEFEMYYSY

SEQ ID NO: 12228 - protein, 872 aa, Oryza sativa Japonica Group
MDTPLEQKQKDSSAIIVLDSDDEDEAERCEQLASENNKQQAPSGPTSPCTTWIVSSAKDQVNGTLHVDGVQSTQIVPYGQNAPLINQSPLQTSWQPSIQYERVILQRRPEEQRVQDLVAASHAEKIAETQVFLTLPTLPNERKRRKSEPTTLVDGDGGTNLGKGKRKNHQNQAAVDSILDLQQTVVPLQQNDVPSQSYRTMIEEEKPVKESDGLEDLWKDFSLAAECTKLDTNEDMSNEKDVDDENEMDDDCNHDIRIHEDLGHVCRICGMIVRKAETIIDYQWKKASRTRTNYYESRSKDADDIDTGAVKVSEDFIVSDIAIHPRHAKQMRPHQLEGFSFLVKNLVGDKPGGCILAHAPGSGKTFMLISFIQSFLAKYPSARPLVVLPKGILGTWKREFQRWQVEDIPLYDFYSVKADKRTEQLEVLKSWEARMSILFLGYKQFSRIICGDGDGNIAAACRDRLLMVPNLLILDEGHTPRNRETDVLASLKRVQTPRKVVLSGTLFQNHVSEVFNILDLVRPKFLKMESSRPIARRIMSQVAISGIRSLKGVHDSAFTESVEDTLLNDDNFTRKSHVIRSLRELTKDVLHYYKGDILDELPGLVDFSVFLKLSTKQKEIVHKIEAYEKFKRSAVGTALYIHPCLSEISEGDAADRATNLTDATVDSLIESIIIKDGVKAKFFFNILSLANSAGEKLLAFSQYILPMKFLERLLVKRLGWHVGKEIFMISGDTSADDREVAMDQFNNSADAKVLFGSIKACGEGISLVGASRVIILDVHLNPSVTRQAIGRAFRPGQQKKVFVYRLVAADSPEVKFHETAFKKEVIPKLWFEWSELCTTEDFKLNQVDIDDSEDELLEANAIRQDIKALYRR

SEQ ID NO: 12229 - protein, 640 aa, Zea mays
  misc_feature (502)..(502): Xaa can be any naturally occurring amino acid
SGRGDYFEGVACDARGRVATISLQGKGLAGAVPPAVAMLPALTGLYLHYNALRGEIPRELAALPGLAELYLGVNNLSGPVPAELGRLGSLQVLQLGYNQLTGSIPTQLGHLNKLTVLALQSNQLSGAIPASLGDLPALARLDLSFNQLFGSIPSKLAEIPRLATLDLRNNTLSGSVPSGLKKLNEGFLYENNPELCGAQFDSLKACPNDGNDDNDDGRTPRKPESTSVKPQQIQKTADLNRNCGDGGCSKPSTLSTGAVVAGTVVIVAGAAACGLSAFSWHRRQKQKVGSSSVEHLEGRPSLDRSKEAYERSAVSSLINVEYSSGGWDTSSEGSQSQHGVARLSSAAECGSPSVRFNLEEVECATQYFSDVNLLGKSSFAATYKGVMRDGTAVAVKSISKSSCKSEEADFLRGLRALTSLRHENLVGLKGFCRSRASGGCFLVYEFMTNGSLSRYLDAKESDAADAAAVLDWPTRVSIIKGVAKGIEYLHSSKLAHQSISAXKVLFDHLYAPRLSGAGLHRLLADDVVFAALKDSAAMGYLAPEYATTGRSTDKQGDVYAFGVVVLQVLAGRRAVSPPHLQQGGGGGGRLDDLVDPRLRGRFSRAEAAKLAGVALLCTAEAPAQRPTMTAVLQQLGTSSQ

SEQ ID NO: 12230 - protein, 159 aa, Prochlorococcus marinus str. AS9601
MQVDVQNTTVLSADGSSIKLGEYSGEVILVVNVASYCGNTAQYDDLQKLHDLYASKGLRILAFPCNDFGKQEPDSISEIKDFCTTKYGVKFEIYEKVHAKGNTTEPYTTLNKVEPEGDVEWNFEKFLIGKDSKVIARFKPGVKPFDENLIAAIEVALDS

SEQ ID NO: 12231 - protein, 469 aa, Shewanella oneidensis MR-1
MSVESVLKQLEELEVKFVDLRFTDTKGKEQHVSIPSHQVDADFFEDGKMFDGSSIAGWKGINESDMVLMPDPTTFVLDPFTEETTALIRCDVLEPGTMTGYDRDPRSIAKKAEEYLRSTGIADTVLVGPEPEFFLFDDVRFGTDMSGCFVKIDAKEAAWNSGTSYEGGNTGHRPFVKGGYFPVAPVDSSQDLRSAMCLVLEEMGQVVEAHHHEVATAGQNEIATRFNTLTKKADEIQILKYVVHNMAHAYGKTATFMPKPIVGDNGSGMHVHQSLSKDGVNLFAGDKYAGLSETALYYIGGIIKHARALNAFTNPSTNSYKRLVPHFEAPVMLAYSARNRSASIRIPVVPSPKGRRIETRFPDPHANPYLGFAALLMAGIDGIQNKIHPGEAMDKDLYDLPAEEAAEIPQVATSLENALENLQADHEFLTRGGVFSEDFIQSYIALKSAEAERVARTTHPLEFEMYYSL

SEQ ID NO: 12232 - protein, 464 aa, Caulobacter crescentus CB15
MRKYLLIGVSAFVLGAGTMAYISPIAQANNAPKAQTYKLLELFGDVLGTVEDQYVTEVDDKKLIEAALDGMLTSLDPHSGYLAPDAFEDMQDTTRGEYGGLGLEVTSEEGVVKVISPMDGTPASRAGIQAGDYITAVNGQSVLGLTVNEAVKQMRGTAGEAVTLTIAREKTDPFDVKLVREVIKPKAAIARMEGDYGYVRLPGFNEKATDALASSVSELKSKNPKMKGLILDLRNNPGGLLDQAVGVADVFLDGGEVVSQRGRDPRNIQRYNARGGDMLNGLPMVVLINQGSASAAEIVAGALQDRKRAEVVGLTSFGKGSVQTVIPLRGGADGALKLTTARYFTPSGRSIQKTGIAPDLEVAQTRDQAQDIANRVWFSEASFKNALNADEGKSRVGAHTPAEAPPTGFDDKKGDFQLQRAIAVLQAGGVAKTPKLPKPAAKVAEVTAKAAAAAGGKTPVTEVK

SEQ ID NO: 12233 - protein, 212 aa, Triticum aestivum
MPESDNDSGGPSNTGGEGELSSPREQDRFLPIANVSRIMKKALPANAKISKDAKETVQECVSEFISFITGEASDKCQREKRKTINGDDLLWAMTTLGFEDYVDPLKHYLHKFREIEGERAAATSTSTAPQHLPDNNATGYADYGGAAVPAPAPGGMMMMGQPMYGSPPPQQHQQQQHQHQVAMGGRAGFPYHGGSSGGGGSSSSSGFGRKEG

SEQ ID NO: 12234 - protein, 1221 aa, Arabidopsis thaliana
MAFFRNYSNDTVSHNVLDENEERQNAATFQSSPLNEDVDGTYSERGFDMNMDVQYQSDPEPGCSIRQPNETAVDNVADPVDSHYQSSTKRLGVTGRWGSTFWKDCQPMGQREGSDPAKDSQSGYKEAYHSEDNHSNDRSEKLDSENENDNENEEEDNEMNKHQSGQADVPADEMLSDEYYEQDEDNQSDHVHYKGYSNPTNSRSLPKAGSAVHSNSRTSRAIHKNIHYSDSNHDHNGDADMDYEEEEDEDDPEDADFEPYDAADDGGASKKYGQGWDVSDEDPESDEEIDLSDYEDDYGTKKPKVRQQSKGFRKSSAGLERKSFHVSSRQKRKTSYQDDDSEEDSENDNDEGFRSLARRGTTLRQNNGRSTNTIGQSSEVRSSTRSVRKVSYVESEDSEDIDDGKNRKNQKDDIEEEDADVIEKVLWHQLKGMGEDVQTNNKSTVPVLVSQLFDTEPDWNEMEFLIKWKGQSHLHCQWKTLSDLQNLSGFKKVLNYTKKVTEEIRYRTALSREEIEVNDVSKEMDLDIIKQNSQVERIIADRISKDGLGDVVPEYLVKWQGLSYAEATWEKDVDIAFAQVAIDEYKAREVSIAVQGKMVEQQRTKGKASLRKLDEQPEWLIGGTLRDYQLEGLNFLVNSWLNDTNVILADEMGLGKTVQSVSMLGFLQNTQQIPGPFLVVVPLSTLANWAKEFRKWLPGMNIIVYVGTRASREVCQQYEFYNEKKVGRPIKFNALLTTYEVVLKDKAVLSKIKWIYLMVDEAHRLKNSEAQLYTALLEFSTKNKLLITGTPLQNSVEELWALLHFLDPGKFKNKDEFVENYKNLNSFNESELANLHLELRPHILRRVIKDVEKSLPPKIERILRVEMSPLQKQYYKWILERNFHDLNKGVRGNQVSLLNIVVELKKCCNHPFLFESADHGYGGDINDNSKLDKIILSSGKLVILDKLLVRLRETKHRVLIFSQMVRMLDILAEYLSLRGFQFQRLDGSTKAELRQQAMDHFNAPASDDFCFLLSTRAGGLGINLATADTVVIFDSDWNPQNDLQAMSRAHRIGQQEVVNIYRFVTSKSVEEEILERAKRKMVLDHLVIQKLNAEGRLEKRETKKGSNFDKNELSAILRFGAEELFKEDKNDEESKKRLLSMDIDEILERAEQVEEKHTDETEHELLGAFKVANFCNAEDDGSFWSRWIKPDSVVTAEEALAPRAARNTKSYVDPSHPDRTS

SEQ ID NO: 12235 - protein, 1627 aa, Gibberella zeae PH-1
MMSTPTFGDPSNGHLSAGDEISMSFDTGDHATDSDSHDAPDHTLDPPSPTSSDDANHDSNMIQDDTHMSASEQSSEDNASDDGDFDMEESVLSQNEDVIEDRASSTDSARTSKRKAPVEEEDYIKANPELYGLRRSTRPREQRKIVESDDSDSEPPVNRRIVKRRRVETSRPSSKIGTPTLRASTADSDSDSDNYGGARAKSLQKKARMQREAQPDLALAEKRWSSRRAAQIQQGAYEESDVDEDEEDDDDELGLASYTVDYVDDSPYIEKVVRHRLKDGLELSYNSTKNDFEYFIKWQGKSHLHDTWETFDDIRGYRGHRKVENYFKKFVDYELAIRFGTDIPPETKEQFFLDRERDEEAYEDYTKVERVVAVRDGDDGTEYLVKWKGLTYEECTWEIASDISDAFQDQIDQYLDRASRSWQSDRKETNPETRSRMVKLEEQPDFIKNGELRNFQLRGLNFLCLNWTKGNNVILADEMGLGKTVQTVSFLSWLRNARQQEGPSLVVAPLSVIPAWCDTFNHWSPDLNYVVYLGPEDARNIIREHELLVDGNPKKPKFNILVTSYEFILQDWQFLQSIKWQTLAVDEAHRLKNRESQLYNRLVNFGIPCKVLITGTPIQNNLAELSALLDFLNPGKVDIDEDLDSLSANDAQEKLQQLHKAIAPYILRRTKETVESDLPPKTEKIIRVELSDVQLDYYKNILTRNYSALCDATNGHKNSLLNIMMELKKISNHPYMFPGAEEKVLAGSVRREDQIKGLIASSGKMMLLDQLLSKLNKDGHRVLIFSQMVKMLDILGDYCSLRGYKFQRLDGTIAAGPRRMAINHFNADDSDDFCFLLSTRAGGLGINLMTADTVIIFDSDWNPQADLQAMARAHRIGQKRPVNIYRLVSKETVEEEVLERARNKLLLEYLTIQAGVTDDGKAAFKEELNKKGLRVEGPSSSEDIQMVLKMRSSKMFEQSGNQERLEQLDIDSILENAEITKTKVDDKINLSSGGIDWDNFMQITDVKVDDINLDWDQIIPADKLAEIKAEEEKKQHEAYVAKVAAESAPRRATIKNRHNENDRADRLKKRQREQRDKEDDDNRRILLADPKRPLTDKEQRGLIKAYFRYGSMDDRGDEIIKDAKLKERDQDYVKSVLDEFIKAAKEAVDENLAQMVEEEKRLGKTLTKKDRKAVLIDFGDLKKVNAETAIERPKQLQLLRQAIRSHSDWHSFRLPDATKAANYSCAWGAKEDAMLLIGIDRHGFGAWPQIRDDPDLDMTEKLFLEEHRVEKKEERSKGNDKMKAPGAVHLVRRSEYLLSVLQAKHSNDRGVQRAVENHHRNNKKSLANGHRGSATASPAPHNGKKHRDRDREHLHGDPHRSRGHADERGTPRPDYKRKHLSHEDSRSPKHRRIEEHRRSSKHGDDRDRSEKRRYRDDEDRRDDRRDDRRADKHRLSHNHRDDRRDDRRDDRRDDRRDDRRDDRRDERRLDRHREDRDRERERERAQDSHPQDERRAKALRRLDELRRIGDNKDQRAQDNDAMIWFLLKPVRENFERILSTTKDNVKSSKERANIFKVELVVIGTFLDEKLAATAADEGLKSNFWDFLAALWPVDDTSKSVTGKRLSNMYRTLHSRDKEPGSAKTNGV

SEQ ID NO: 12236 - protein, 720 aa, Microcystis aeruginosa PCC 7806
MGRVVGIDLGTTNSVVAVMEGGKPVVIANSEGMRTTPSVVGFNKDGELVVGQMARRQGVLNPQNTYYGVKRYIGRRYSELNPESKRVPYTIRRDEMGSIKIKCPRLQKEFAPEEISALVLRRLAEEASRYLGEEVTGAVITVPAYFNDSQRQATRDAGRIAGLEVLRILNEPTAAALAYGLDEQESKKILVFDLGGGTFDVSILEVGDGVFEVKATSGDTQLGGNDFDKRIVDWLANQFLEQEGVELRQDRQALQRLTEAAEKAKIELSGVSVTDINLPFIIATEDGPKHIETRLSRAQFEELCGDLISRLRRPLKRALSDAGLSPVQLDEVVLVGGGTRMPVVKDLVRSFIDREPNQNVNPDEVVAVGAAIQAGILGGEVKDVLLLDVTPLSLGLETIGGVMKKLIPRNTTIPVRRSDLFSTSENNQTVVEIHVLQGEREMASDNKSLGRFKLTGIPPAPRGIPQVQVSLDIDANGILQVTARDKMTGREQSVTIQGASTLSEGEINRMIGDAARFAEADRTRREKVDKRNRARSLVDQAQRRLKDVTLDFGNEFTRSYRRQIESLSTEIIDALEKNDDRRIDRAQADLQDVIYELNREVRLQYDEEDEGFFSAIRKTFTGDKEDELPYEPRRDRYRQDYRPSTPGYQSDYRPNYSANQDSYRPRNQDNYYNGRDSDWQSPPPSEEKSYNNSKSNRSSGNRSRNIPPQNNWDDDDDDWF

SEQ ID NO: 12237 - protein, 159 aa, Erythrobacter sp. SD-21
MTTIADFTIATNKGEDLDLQEKLGKVLLVVNTASKCGFTPQYDGLEKLYQDYGDKGFEVLAFPCNQFGAQEPGDAEEIEQFCKVNFGLTFPLMKKVDVNGDEASPLFDWMKKEAPGLMGSKAIKWNFTKFLIDREGNVVKRYGPADAPASIAKDIEKLL

SEQ ID NO: 12238 - protein, 391 aa, Micrantheum hexandrum; identical to SEQ ID NO: 8813

SEQ ID NO: 12239 - protein, 286 aa, Klebsiella pneumoniae subsp. pneumoniae MGH 78578
MADNPLWHETLHDHFGQYFSVDNVLYHEKTDHQDLIIFDNRAFGRVMALDGVVQTTERDEFIYHEMMTHVPLLAHGNAKHVLIIGGGDGAMLREVSRHRSIETITMVEIDAGVVSFCRQYLPNHNAGAYDDPRFTLVIDDGVNFVNQTTQTFDVIISDCTDPIGPGESLFTSAFYEGCKRCLNPGGIFVAQNGVCFLQQDEAVGSHRKLSHYFRDVSFYQAAIPTYYGGIMTFAWASDNEALRHLSSEIIQARFHKANLTCRYYNPAIHTAAFALPQYLHDALSAP

SEQ ID NO: 12240 - protein, 391 aa, Microdesmis puberula; identical to SEQ ID NO: 8815

SEQ ID NO: 12241 - protein, 470 aa, Zymomonas mobilis subsp. mobilis ZM4
MANSASDLLKLIKEKEIDWVDLRFTDPKGKWQHLTMASTVVGEDDLNDGFMFDGSSIEGWKTINESDMILKPDLDAFYIDPFSASPMLILICDIVEPATGEFYSRDPRSTAKRAEAYVKTLGLGDTVYIGPEAEFFLFDDVRFDSGYNGSFYRVDDIELPTNSGREYDNGNLAHRPGVKGGYFPVAPVDSAVDIRSEMVSTMLEMGLPMDKHHHEVAPAQHELGLTFGTLTQTADRMQVYKYVVHQIAQAYGKTATFMPKPISGDNGSGMHTHISIWDGGKPTFAGSEYAGLSENALYFIGGIIRHAKAINGLTNPSTNSYKRLVPGFEAPVLLAYSARNRSASCRIPYGTGEKSRRVEIRFPDATANPYLCYTALLMAGIDGIQNKIHPGEAMDCNLYDLPPEELAKVPTVAGSLREALDALSEDFDFLTKGDVFTEDQIKSYIEIKRAEVLRWEMAPSPVEFEMYYSL

SEQ ID NO: 12242 - protein, 391 aa, Neoscortechinia kingii; identical to SEQ ID NO: 8818

SEQ ID NO: 12243 - protein, 324 aa, Yersinia pestis KIM
MTVQPQAELAMILPPIFHGCYCEGEAPNMSQKELWYETLHANFGQYFSVENVLFREKTEHQDLVIFENPELGRVMALDGVVQTTERDEFIYHEMMTHVPLLAHGQAKKVLIIGGGDGAMLREVSRHKNIEQITMVEIDAGVVEFCRQYLPNHSAGAYDDPRFKLVIDDGVNFVNQTTEKFDVIISDCTDPIGPGESLFTSVFYEGCARSLNEGGIFVAQNGVCFLQQDEAVNSHNKLSHYFSDVSFYQAAIPTYYGGIMTFAWATQNPALRQLDLATLQNRFAQAGLACRYYNPAIHVGSFALPQYLLDALTTIPKVIGVDSSE

SEQ ID NO: 12244 - protein, 392 aa, Ochna multiflora; identical to SEQ ID NO: 8819

SEQ ID NO: 12245 - protein, 68 aa, Arabidopsis thaliana
MTTSKRLADRKIEKFDKNILKRGFVPETTTKKGKDYPVGPILLGFFVFVVIGSSLFQIIRTATSGGMA

SEQ ID NO: 12246 - protein, 439 aa, Pseudomonas fluorescens PfO-1
MLHLSRLTSLALTIALVIGAPLAFAAQPAPAVAPAGTAATSKAPLPLEELRTFAEVMDRIKAAYVEPVDDKTLLENAIKGMLSNLDPHSAYLGPEDFAELQESTSGEFGGLGIEVGAEDGFIKVVSPIDDTPASKAGIQAGDFIVKINGAPTRGQTMTEAVDKMRGKIGQKITLTLVRDGGTPFDVTLARAVIQVKSVKAQLLESGYGLIRITQFQVKTGEEVSKALAKLRKDNGKKLNGIILDLRNNPGGVLQAAVEVVDHFITKGLIVYTKGRIANSELRFSATGKDESEAVPMVVLINGGSASASEIVAGALQDQKRAVVMGTTSFGKGSVQTVLPLNNDRALKITTALYFTPNGRSIQAQGIVPDIEVRRAKITNEADSDYFKEADLQGHLGNGNGGADKPTGSGGKAKAMPQDDDYQLAQALSLLKGLSITSGR

SEQ ID NO: 12247 - protein, 392 aa, Ochna sp. Davis 31-01; identical to SEQ ID NO: 8822

SEQ ID NO: 12248 - protein, 1019 aa, Synechococcus elongatus PCC 6301
MAVLHGGWLGDRFCVWAEAWQAGEPQSAAEIAIHPYAIAATDLNDWCQKYRLGSLTGTPTEVLLSIPSDLKKEAVLPFLSGQEIPDGALLWSWQIPVLSLEAAIAGQWLATLPLGSAEDHPWLGPDLRFWSHIYRWAQSLLARGRFYPALESSDRGLTAVWLPLFNQAGDRQRFDRYSQQLPFSQFCYQAIETAAACPWQPQPQDLLLRVLQTWLTARLQPAIAAGTLVSADLLAAWQQSLANGKPLKLEDSEASRLQTAIDRWLLPVQNGAAQAWRMVLRLVPPTEQEQPWQLEFGLQAATDPDRFRPASLLWQDPLPPGLPDQSQELLLRGLGQACRLYPQLQTSLATACPEFHPLTTAEVYQLLKQVIPQWQEQGIEVQLPPGLRGQGRHRLGVEVSATLPSDRPSVGLEALLQFRWELSLGGQRLTKAEVERLAALETPLVEINGDWIEVRPQDIESAREFFRKRKDQPNLTLADAIAIASGESPNVGRLPVVNFEAAGLLEEALAVFQGQRSPAALPAPPTFQGELRPYQERGVGWLSFLQRFGIGACLADDMGLGKTIQLLAFLLHLKHSNELTRPVLLVCPTSVLGNWEREVQKFAPELRWKLHYGPDRAQGKALATALKDCDLVLTSYSLVARDQKAIAAIDWQGIVLDEAQNIKNDQAKQTQAVRAIAQSPTQKPRFRIALTGTPVENRLSELWSIVEFLQPGHLGTKPFFQKRFVTPIERFGDADSLTALRQRVQPLILRRLKTDRSIIADLPEKQEMTVFCPLVQEQADRYQVLVNEALANIEASEGIQRRGQILALLTRLKQLCNHPSLLLEKPKLDPNFGDRSAKLQRLLEMLAELTDAGDRALVFTQFAGWGSLLQQFLQEQLGREVLFLSGSTKKGDRQQMVDRFQNDPQAPAIFILSLKAGGVGLNLTKANHVFHYDRWWNPAVENQATDRAFRIGQRRNVQVHKFVCAGTLEEKIDQMIASKQALAQQIVGSGEDWLTELDTNQLRQLLILDRSAWVEEEEP

SEQ ID NO: 12249 - protein, 208 aa, Macaranga heynei
QASRFLFMKNKVRMICDCLAPPVKVIQDKSLAQPLSLCGSMLRSPHGCHAQYMANMGSIASLVMSVTIDEDGDEMDDDQQKGRKLWGLVVCHHTSSRFVSFPLRYACEFLIQVFGVQINKEVDLAAQMREKHVLQTQTVLCDMLLRDAPAAIITQSPNVMDLVKCDGAALYYRKKFWLLGVTPTKAQIRDIAEWLLEYHSESTGLSTD

SEQ ID NO: 12250 - protein, 496 aa, Staphylococcus aureus subsp. aureus MRSA252
MDDKQHTTSSDDERAENATSNQDQQTNSSKRVHLKRWQFISILIGTIIITAVITVVAYIFINQKISGLNKTDQANLNKIENVYKILNSDYYKKQNSDKLSKAAIDGMVKELKDPYSEYLTKEQTKSFNEGVSGDFVGIGAEMQKKNDQIMVTSPMKGSPAERAGIRPKDVITKVNGKSIKGKALDEVVKDVRGKENTEVTLTVQRGSEEKDVKIKREKIHVKSVEYKKKGKVGVITINKFQNDTSGELKDAVLKAHKDGLKKIVLDLRNNPGGLLDEAVKMANIFIDKGKTVVKLEKGKDTEAIQTSNDALKEAKDMDISILVNEGSASASEVFTGALKDYNKAKVYGSKTFGKGVVQTTREFKDGSLLKYTEMKWLTPDGHYIHGKGIKPDVTIDTPKYQSLNVIPNTKTFKVGDDDKNIKTIKIGLSALGYKVDNESTQFDQALENLVKAFQQANKLEVTGEFNKETNNKFTELLVEKANKHDDVLDKLINILK

SEQ ID NO: 12251 - protein, 1112 aa, Arabidopsis thaliana; identical to SEQ ID NO: 8833

SEQ ID NO: 12252 - protein, 1168 aa, Arabidopsis thaliana; identical to SEQ ID NO: 8832

SEQ ID NO: 12253 - protein, 528 aa, Ustilago maydis 521
MYPIFVFAAEVAGLVTAPVNPALTVGELAKSLQQASVDIVLSHPSCQDNVRAAWEQAKIAMGRPIATSSSDAVSDGLFMFDDADELVVGKHGEPDIRAQMTDNLLESYRVEDPATETAFIMFSSGTSGSAKGVEITHSNVIHSVMALVATHDDYFGQKDVQVGFLPFYHIFGLIKLMHHPFYLGMKIVVLPKFSLDLFCEKIQEHRATASLVVPPVLLQLAKSPVPENYDMSSLKCVQCGAAPLSAELFELLEKRYPGMVVLNGYGLTESLPSVICSGPKELPNSKGAAGRIAPGVEVRLVSEEGHDVGQEQGREGVPGEVWLRGPTIMKGYLDNEEATREAFTADGWFKTGDVAVMRNTEIFIVDRIKDLIKFKGFQVSPAELEAVITSHPEVADVAVFGVWCPAQMTEVPRACIVPRNLELLNQPEECMELEKRVRSHMEKLVAAHKKIRGGIEWVATIPKSPSGKILRRLLRDEAARAAVKADKKNQLRSTLVITLSATNTSKSNKDEEESRETIFSPVSPVAAA

SEQ ID NO: 12254 - protein, 692 aa, Yersinia pseudotuberculosis IP 32953
MNKFVRLAAIAGLLLAGASYATDTTYRIDQLPQLRQEPEHATVSERVTSRFTRSHYRQFALDDQFSAKIFDRYLNMLDYSHNVLLASDVAQFADKKYSLDKELKSGQLDTPFALFNLAQKRRFERYQYALSVLDRPMVFTGNDTIDIDRAKAPWPSSEAELNALWDAKVKYDQLNLKLAGKTDKEIKETLTKRYQSAIKRLTQSNSEDVFQLIMNAFAREIDPHTNYLSPRNTEQFNTEMSLSLEGIGAVLQMDDDYTLINSMVPGGPAAKSKTIAVGDRVIGVGQAGKPMVDVIGWRLDDVVALIKGPKGSKVRLEILPAGKGTKPRTVTLTRERIRLEDRAVKMSVKTIGKERVGVLDIPGFYVGLTEDVKVQLQKLEKQNVSSIIIDLRSNGGGALTEAVSLSGLFIPSGPVVQVRDNNGKVREDSDTDGVVYYKGPLVVLVDRYSASASEIFAAAMQDYGRALIVGEPTFGKGTVQQYRSLNRIYDQMLRPEWPALGSLQYTIQKFYRVDGGSTQRKGVTPDIVMPTGVDPAETGENFEDNALPWDRINAASYTKTGDLKPWEPELLKNHAERIAANPEFQYIQKDIERYKALKDKRNIVSLNYAQREKENRDDDMTRLTRLNERFIREGKKPLKSLDDLPKDYQEPDPYLDETVNIALDLAHQEKAQPQIASRPVAAATATAGATVK

SEQ ID NO: 12255 - protein, 921 aa, Physcomitrella patens subsp. patens
MGKGSIGSGYDCEEELREDEEEESQEEAGEEEEEEEREEEEDEEEEEEEGVNVREDDEAESQKAQNVAALIRGDVQVNRQALLPKVLTVSDAAVVIRRPFKSPCPKASSGSNIELLRRLSARKRFIPWGCSRSPLTSITNTPIPLAPAKEEEPLKIELPPGVEPLVLWQPDENDGGSEEGPAEKLQPIIVDPHLTKFLRQHQREGVQFMFECVAGLRGMAISKDEKATSGGCILADDMGLGKTLQSITLMWTLLKQGFDGRPMATRVVIITPTSLVSNWEQEITKWLSHSTVNVLAMCESTRSDVLQGISTFLSPQNFYQVLIISYETFRMHAARFEKEGSCDLLICDEAHRLKNDKTLTNQALASLPCFRRVLLSGTPMQNDLEEFYAMVNFTNPGVLGNASTFRKYYENPILTGREPDATDEARAISIERSAELSEKVNQFILRRTNALLSNHLPPKIVEVVCCKLTELQTSLYRHFIRSKNVRQALEDQTKRAKVLASITALKKLCNHPKLIYDTIRAGGSEAAGFGDCLKLFPPHLTLDLFAQICRERNYPFVRLDGTTSIGKRQKLVSRFNDPNQNEFAFLLSSKAGGCGLNLIGGNRLVLFDPDWNPATDKQVFQRQMSKEGLQKVVDKEQSTDAKAQVNMLSTDDLRDLFTLREDVRSDTHDSISCERCDAEGGPGEMTSTSDISAVMVEDIGEFAKVAGCAGKLRSWERQVGTPAEEDLLSWAHHSDSSTIPDAMLEAASRNQISFTFTCQIDGKLTPIDSFPRSSALYTTPSLKARACAIPVTRTLRDPKISQTPNSFTSGPSTNIREELGAVTTAQSILRGLPPSARKAEAPGIVTPPARSILRGLPPSAKKSPATVLPRTPVLPPKKRPKITIVHKASRHIAASQHSSDESSASEFVADDDEDDNDEDFA

SEQ ID NO: 12256 - protein, 469 aa, Methylococcus capsulatus str. Bath
MTPKDVLQIIKEKEVRYVDLRFADTRGKEQHVTVPASTIDEAAFEEGKMFDGSSIAGWKGINESDMILMPDASTAVMDPFFDDPTLILRCDIVEPATMQGYERDPRSIAKRAEAYMKSTGIADTALFGPENEFFIFDDVRWGANMSGSFYKVDSEEAGWNSEKVYEDGNIGHRPGVKGGYFPVPPVDSFQDLRSAMCNTLEDMGMVVEVHHHEVATAGQCEIGVRCNTLVKKADEVLLLKYAVQNVAHAYGKTATFMPKPLVGDNGNGMHVHQSLAKDGKNLFSGDLYGGLSETALHYIGGIIKHAKALNAFCNASTNSYKRLVPGFEAPVMLAYSARNRSASIRIPYVMNPKARRIEVRFPDSTANPYLAFAAMLMAGLDGIQNKIHPGDAMDKDLYDLPPEEEKAIPQVCYSFDQALEALDKDREFLTRGGVFTDDMIDAYLDLKGQEVTRLRMSTHPVEFDMYYSL

SEQ ID NO: 12257 - protein, 120 aa, Physcomitrella patens subsp. patens
GLVRHMSLPSTNGGPNSPGLEDNHYGAVPMRTRAKRGCATHPRSIAERVRRTKISERMKRLQDLVPNMDKQTNTSDMLDETVEYVKSLQRKVQELSDTVARLKADASQRAKNSNNNNSSN

SEQ ID NO: 12258 - protein, 247 aa, Zea mays
PRSFPVPAATVRLCKWPSAVRRAELVTWPVVRVSLQPRGLHAAGLPLSATRRRPPLLTTGLRTRPAAADHPRRCSYARRRKPRSGPGKRRGRGPRIPAATLQKQKTALANVDQITGAKIPKSFVFSRGKLPSTLRHLQQDLRKVMLPYTALNLKEKKRNNLKDFVNVAGPMGVTHFLILSNPQSLPHLRFAKSPQGPTFTFQIEEYSLAADIANSQKRPRCPPGIFKNSPLVVLGGLTGLGNPFRSL

SEQ ID NO: 12259 - protein, 116 aa, Oryza sativa Japonica Group
MPDSDNESGGPSNAGEYASAREQDRFLPIANVSRIMKRALPANAKISKDAKETVQECVSEFISFITGEASDKCQREKRKTINGDDLLWAMTTLGFEDYIDPLKLYLHNLFWHGTDE

SEQ ID NO: 12260 - protein, 190 aa, Xylella fastidiosa 9a5c
MHTHVSHAFASKLSLLSLDRFPMSSIYTFTFTRLDGRPQALADWRGQVLLLVNVASRCGFTPQYAGLEMLWQRYRDAGLIVIGFPCDQFAGQEPGDEAKIAEFCTLNYGVDFPMAAKIKVNGADAHPLWQWLKHRRRGLFGMAAIKWNFTKFLIGRNGQPIARYSPIKSPEQLEVHIVRALGEEGGGNTH

SEQ ID NO: 12261 - protein, 391 aa, Pera bicolor; identical to SEQ ID NO: 8839

SEQ ID NO: 12262 - protein, 459 aa, Helicobacter pylori J99
MVLLTMTKRLFKGLLAISLAVSLHGGEVKEKKPVKPVKEDPQELAAKRVEAFSRFSNVVTEIEKKYVDKISISEIMTKAIEGLLSNLDAHSAYLNEKKFKEFQAQTEGEFGGLGITVGMRDGVLTVIAPLEGTPAYKAGVKSGDSILKINNESTLSMSIDDAVNLMRGKPKTSIQITVVRKNEPKPLVFNIVRDIIKIPSVYVKKIKDTPYLYVRVNSFDKNVTKSVLDGLKANPNIKGVVLDLRGNPGGLLNQAVGLSNLFIKEGVLVSQRGKNKEENLEYKANGRAPYTNLPVVVLVNGGSASASEIVAGALQDHKRAIIIGEKTFGKGSVQVLLPVNKDEAIKITTARYYLPSGRTIQAKGITPDIVIYPGKVPENENKFSLKEADLKHHLEQELKKLDDKTPISKEADKDKKSEEEKEVTPKMINDDIQLKTAIDSLKTWSIVDEKMDEKVPKKK

SEQ ID NO: 12263 - protein, 646 aa, Acidovorax sp. JS42
MGKIIGIDLGTTNSCVAIMEGNNTRVIENSEGARTTPSIIAYQEDGEILVGASAKRQAVTNPKNTIYAAKRLIGRKFDEKEVQKDIDLMPFTITRADNGDAWVEVRGQKLAPPQISAEVLRKMKKTAEDFLGEPVTEAVITVPAYFNDAQRQATKDAGRIAGLDVKRIINEPTAAALAFGLDKQDKGDRKIAVYDLGGGTFDVSIIEIADVDGEKQFEVLSTNGDTFLGGEDFDQRIIDYIIGEFKKEQGVDLSKDVLALQRLKEAAEKAKIELSNSSQTDINLPYITADASGPKHLNIKLTRAKLESLVEDLIERTIAPCRTAIKDAGISVSDIDDVILVGGMTRMPKVQEKVKEFFGKEPRKDVNPDEAVAVGAAIQGQVLSGDRKDVLLLDVTPLSLGIETLGGVMTKMITKNTTIPTKFAQTFSTAEDNQPAVTIKVFQGEREIASANKLLGEFNLEGIPPASRGTPQIEVTFDIDANGILHVGAKDKGTGKENKITIKANSGLSEDEIQKMVKDAELNAADDKKKLELVQARNQGEAAVHTVTKSLSEHGDKLDAGEKEKIEAAVKDLEAALKTEDKAAIDEKTTALMAASQKLGEKMYGDAQAAQGAEAAGAQAAASGSAGAAAQDDNVVDAEVKEVKKG

SEQ ID NO: 12264 - protein, 391 aa, Peridiscus lucidus; identical to SEQ ID NO: 8841

SEQ ID NO: 12265 - protein, 391 aa, Petalostigma pubescens; identical to SEQ ID NO: 8842

SEQ ID NO: 12266 - protein, 304 aa, Glycine max
MQAGHQAMVSGLLLYPPSLKLLETMCREQVLRKEKGKSEMLEPAVTSSSGGSGSSLGKTCSLSTRNQGQKRKGIDVEESEEQSEDTELKSALGNKSSQRTGSARRNRAAEVHNLSERRRRDRINEKMKALQQLIPHSSKTDKASMLEEAIEYLKSLQLQLQLMWMGSGMAPIMFPGIQHYMSQMGMGMARPPFPPPIHNPMQLPRLPLDQSVSASQTPNQTLMSQNPILGAFNYHNQMQNPALSEQYARYMGYHLMQNASQPMNVFRYGPQGVRHSQTMITPSNSSGNMSGAANIDEAVSGKMG

SEQ ID NO: 12267 - protein, 391 aa, Phyllanthus epiphyllanthus; identical to SEQ ID NO: 8844

SEQ ID NO: 12268 - protein, 146 aa, Triticum aestivum
DKIVLISNYTQTLDMFDRLCRERGYGSLRLDGTMNVTKRQKLVDKFNDPNGLEFVFLLSSKAGGCGLNLIGANRLVLFDPDWNPAADQQALARVWRDGQKKDCFVYRFIATGTIEEKIFQRQSHKQSLSSSVVDSAEDVERHFTLD

SEQ ID NO: 12269 - protein, 391 aa, Pimelodendron zoanthogyne; identical to SEQ ID NO: 8847

SEQ ID NO: 12270 - protein, 142 aa, Brassica napus
  misc_feature (80)..(80): Xaa can be any naturally occurring amino acid
  misc_feature (96)..(96): Xaa can be any naturally occurring amino acid
MAYSMLSSAAVVTSPAQATMVAPFTGLKSSSAFPVTRKANNDITSIVSNGGRVNCMQVWPPIGKKKFETLSYLPDPYRKXMGVREVDYLLRNKWIXLCVEIRVGATGFCVPWSMEAHLDTTMAVIGQCGSFLCSDALTLLKC

SEQ ID NO: 12271 - protein, 547 aa, Triticum aestivum
  misc_feature (510)..(510): Xaa can be any naturally occurring amino acid
MGLDLGALALKYTGLAVSDHDSIVAINIFIALLCGCIVFGHLLEGNRWVNESTTALVLGLITGGVILICTKGVNSRILIFSEDIFFIYLLPPIIFNAGFQVKKKQFFRNFATIILFGAAGTLISFVIITFGAMGLFSKLDVGPLELGDYLAIGAIFSATDSVCTLQVLNQDEAPLLYSLVFGEGVVNDATSVVLFNAIQNIDINHFDVFVLLQFIGKFLYLFFTSTVLGVAAGLLSAYIIKKLCFARHSTDREVAIMILMAYLSYMLSMLLDLSGILTVFFCGIVMSHYTWHNVTESSRVTTKHTFATLSFIAEIFLFLYVGMDALDIDKWKLASSSPKKPIALSAVILGLVMVGRAAFVFPLSFLSNLSKKESHPKISFNQQVIIWWAGLMRGAVSIALAYNKFTTSGHTAVRVNAVMITSTIIVVLFSTMVFGLLTKPLINLLIPPRPGTAADISSQSFLDPLTASLLGSDFDVGQLTPQTNLQYLLTMPTRSVHRVWRKFDDKFMRXPMFGGRGFVPFVPGSPIERSVHGPGLLGTVTEAEDRS

SEQ ID NO: 12272 - protein, 1172 aa, Arabidopsis thaliana; identical to SEQ ID NO: 8555

SEQ ID NO: 12273 - protein, 455 aa, Zea mays
MLSRYSSLMVTLHGNLSRCYKAMSALRPDGVSRHFMSAGGFERVVLGVVLVMSISGASYTAPSSSALTEENLLFLEAWRAVDRAYYDKSFNGQSWFRYRENALRNEPMNTREETYAAIKKMLSTLDDPFTRFLEPEKLKSLRSGTQGALTGVGLSIGYPMAINGSPSGVAVMTATPGGPAEKAGILPGDTILAIDNRSTEDMDIYDAAERLQGPEGSSVDLSIRSGTNTRHVVLKRQTVNLNPVRSRMCEIPGSKDSSKIGYIKLTTFNQNAAESVKEAIKTLRDNNVKSFVLDLRNNSGGLFPEGIQIAKIWMDKGVIVYICDSQGVRDIYEADGADTIAASEPLVVLVNKGTASASEILAGALKDNKRAVVYGEPTYGKGKIQSVFGLSDGSGLAVTVARYETPAHTDIDKVGVIPDRPLPASFPTDEDAFCSCLRDSTAACNLNAAQLFAKS

SEQ ID NO: 12274 - protein, 457 aa, Prochlorococcus marinus str. NATL1A
MHCTFKYLTRCAPWSPQKINPMLSTVKSLTKPLQRLFAVLISFGILFQVFTQPAFALNDGQLLVIEAWNQVNAGYLDPKKFDEIQWKKLRQKALEKPINNSQQAYSAIEAMLLPLGDPYTRLLRPVDYEAMKKSNIGSEINGVGLQLGARKEDGDIVVISPLEGSPASDAGITSGTIIKKVNGQSPKQLGLEATAAKLRGQTGTQVIVELEQPDNEIKEISLERRSVDLRPVRTKRIRNESHTFGYLRITQFSEGVPEQVKEALEELSGKEIDGLILDLRNNSGGLVSSGLAVADDFLSNMPIVETKKRDSINDPISSGLETIYDGPMVTLVNEGTASASEILAGALQDNKRSELIGNKTFGKGLIQSLTNLSDGSGLAVTVASYLTPSGRDIQNLGIEPDRLLEMPEPLNPGSDDDRWLLDAELIMQATLDKEEVSEKLSKETLVKEEQLISQEIE

SEQ ID NO: 12275 - protein, 636 aa, Vibrio vulnificus CMCP6
MGKIIGIDLGTTNSCVAVLDGDKPRVIENAEGERTTPSVIAYTDGETLVGQPAKRQAVTNPENTLFAIKRLIGRRFEDEEVQRDIEIMPYKIVKADNGDAWVEAKGQKMAAPQVSAEVLKKMKKTAEDFLGEEVTGAVITVPAYFNDAQRQATKDAGRIAGLEVKRIINEPTAAALAYGLDKQGGDRTIAVYDLGGGTFDISIIEIDEVEGEKTFEVLATNGDTHLGGEDFDNRLINYLVAEFKKDQGIDLKNDPLAMQRVKEAAEKAKIELSSTNQTDVNLPYITADATGPKHMNIKVTRAKLESLVEDLVQRSLEPLKVALADADLSVGDITDVILVGGQTRMPMVQAKVTEFFGKEPRRDVNPDEAVAVGAAVQGGVLAGDVKDVLLLDVTPLSLGIETMGGVMTKLVEKNTTIPTKANQVFSTAEDNQSAVTIHVLQGERKQAMYNKSLGQFNLEGINPAPRGMPQIEVTFDLDADGILHVSAKDKQTGKEQKITIQASGGLSDAEIEKMVQEAEANKEADKKFEELATARNQADQIIHGTRKQVEEAGEALPADEKAKIETAISELEEARKGEDKEAIEAKIQALMAAAQKLMEIAQQQAQAQQGSAEAGAQSQEDDVVDAEFEEVKDDKK

SEQ ID NO: 12276 - protein, 181 aa, Brassica napus
MASSMLSSAAVVTSPAQATMVAPFTGLKSSSAFPVTRKANNDITSIVSNGGRVSCMKVWPPVGKKKFETLSYLPDLTEVELGKEVDYLLRNKWIPCVEFELEHGFVYREHGSTPGYYDGRYWTMWKLPLFGCTDSAQVLKEVQECKTEYPNAFIRIIGFDNNRQVQCISFIAYKPPSFTGA

SEQ ID NO: 12277 - protein, 446 aa, Staphylococcus aureus subsp. aureus Mu50
MPKRTFTKEDIRKFAEEENVRYLRLQFTDILGTIKNVEVPVSQLEKVLDNEMMFDGSSIEGFVRIEESDMYLHPDLDTWVIFPWTAGQGKVARLICDVYKTDGTPFEGDPRANLKRVLKEMEDLGFTDFNLGPEPEFFLFKLDEKGEPTLELNDDGGYFDLAPTDLGENCRRDIVLELEDMGFDIEASHHEVAPGQHEIDFKYADAVTACDNIQTFKLVVKTIARKHNLHATFMPKPLFGVNGSGMHFNVSLFKGKENAFFDPNTEMGLTETAYQFTAGVLKNARGFTAVCNPLVNSYKRLVPGYEAPCYIAWSGKNRSPLIRVPSSRGLSTRIEVRSVDPAANPYMALAAILEAGLDGIKNKLKVPEPVNQNIYEMNREEREAVGIQDLPSTLYTALKAMRENEVIKKALGNHIYNQFINSKSIEWDYYRTQVSEWERDQYMKQY

SEQ ID NO: 12278 - protein, 164 aa, Cupriavidus taiwanensis
MSNVYQFEASSLAGQPVPLSQFQGKVMLVVNTASECGFTPQYEGLQKLYDEYHGRGLEVLGFPCNQFGKQEPGDAQQIGQFCETRFAVRFPMFAKIDVNGPNAHPLYQWLTTEKRGVLGTQGIKWNFTKFLLRRDGTVFKRYAPTTKPEELRADIERLLSDPAA

SEQ ID NO: 12279 - protein, 520 aa, Mycobacterium smegmatis str. MC2 155
MAMKLRPSRPVGHHLAPLAAAVGAVASENPAGSSSDLAAVHVTGVTLRGQDAQPGDLFAALPGASAHGARFAADAVAAGAVAVLTDPSGADLLAGTLDVPVLVHPAPRSVLGEAAAIVYGRPAERLRVVGVTGTSGKTTTTYLAEAGLRAAGRVAGLIGTVGVRIDGTDLPSALTTPEAPALQALLALMVERGVDTVVMEVSSHALAQGRVDGIGFAVGGFTNLSRDHLDFHPTMADYFEAKARLFDPQSPNHAAAAVICVDDQYGVQMAARAETPLTVSTSGAAADWRVEKITTAGPGAQEFVLVDPGGMHHQLGVGLPGRYNVANAALAVALLDAVGVSPEQAAPGLRTATVPGRLESIDLGQDFLALVDYAHKPGALQAVLETLRAAEPRRIAVVFGAGGDRDPGKREPMGRVTAELADLVVVTDDNPRSEDPATIRSAILAGARAVASDAEIVEIGDRRAAIDHAVAWAQPGDIVLIAGKGHESGQTVGDHTRPFDDRDELAAALEASGKTRDRSS

SEQ ID NO: 12280 - protein, 656 aa, Magnaporthe grisea 70-15
MAIGLGMVFWLCLLFSPLAFVKTANAQDADSYGTVIGIDLGTTYSCVGVMQKGKVEILVNDQGNRITPSYVAFTDDERLVGDAAKNQAASNPFRTIFDVKRLIGRKFTDKDVQQDIKHFPYKVVNKGGKPVVSVDVKGETKQFTPEEVSAMILGKMKEVAEAYLGKKVTHAVVTVPAYFNDNQRQATKDAGVIAGLNVLRIVNEPTAAALAYGLDKTGEENQIIVYDLGGGTFDVSLLSIDNGVFEVLATAGDTHLGGEDFDQRIINHFVKMHNKKHNVDVTKDAKAMGKLKREAEKAKRTLSSQKSTRIEIESFFDGKDFSETMTQAKFEELNIDLFKKTLKPVEQVLKDAKLKKEDINDIVLVGGSTRIPKVQALIKEYFNGKNPSKGINPDEAVAFGAAVQAGVLSGEEGTGDVVLMDVNPLTLGIETTGGVMTKLIPRNTPIPTRKSQIFSTAADNQPVVLIQVFEGERTMTKDNNLLGKFELTGIPPAPRGQPQIEVSFELDANGILKVSAHDKGTGNTEQITITNDKGRLTPEEIDRMVTEAEKFAEEDKATRERIEARNGLENYAFSLKNQVKDEEGLGGKIDESDKEALLDAIKEATEWLEENGATAEAADFEEQKEKLSGVAYPITSKLYSGGAGGDSDEPRSHDEL

SEQ ID NO: 12281 - protein, 118 aa, Candida glabrata CBS 138; identical to SEQ ID NO: 493

SEQ ID NO: 12282 - protein, 660 aa, Chlamydia trachomatis D/UW-3/CX
MSEKRKSNKIIGIDLGTTNSCVSVMEGGQPKVIASSEGTRTTPSIVAFKGGETLVGIPAKRQAVTNPEKTLASTKRFIGRKFSEVESEIKTVPYKVAPNSKGDAVFDVEQKLYTPEEIGAQILMKMKETAEAYLGETVTEAVITVPAYFNDSQRASTKDAGRIAGLDVKRIIPEPTAAALAYGIDKEGDKKIAVFDLGGGTFDISILEIGDGVFEVLSTNGDTHLGGDDFDGVIINWMLDEFKKQEGIDLSKDNMALQRLKDAAEKAKIELSGVSSTEINQPFITIDANGPKHLALTLTRAQFEHLASSLIERTKQPCAQALKDAKLSASDIDDVLLVGGMSRMPAVQAVVKEIFGKEPNKGVNPDEVVAIGAAIQGGVLGGEVKDVLLLDVIPLSLGIETLGGVMTPLVERNTTIPTQKKQIFSTAADNQPAVTIVVLQGERPMAKDNKEIGRFDLTDIPPAPRGHPQIEVTFDIDANGILHVSAKDAASGREQKIRIEASSGLKEDEIQQMIRDAELHKEEDKQRKEASDVKNEADGMIFRAEKAVKDYHDKIPAELVKEIEEHIEKVRQAIKEDASTTAIKAASDELSTHMQKIGEAMQAQSASAAASSAANAQGGPNINSEDLKKHSFSTRPPAGGSASSTDNIEDADVEIVDKPE

SEQ ID NO: 12283 - protein, 443 aa, Dehalococcoides sp. CBDB1
MTRAESVEYVLKTAKDHNVRFIRLWFTDILGSLKSFSIAYNELERALEDGMGFDGSSIEGYARIDESDMVALPDPDTFKIIPWSNGDYQVGRMFCDIKKPSGEQFEGDPRYVLKRNLKKAAEMGFTFYIGPELEYFYFKNDHSTEFLDEGGYFDLTPRDLATDLRRETIVALQDMGIIVEYAHHEVAPSQHEIDIRYTDALTMADNVMTYRLLVKEVAMRHGLHASFMPKPVGSVNGSGMHTHQSLFKGDRNAFFDAKDSYYLSTMAKQYIAGILKYAPEFTSVTNQWINSYKRLVPGFEAPVYLSWARRNRADLVRVPEYKPGHEKSTRIELRSADPGCNPYLAFSVMLAAGLKGIEEKLTPPAPIEENVYEMNEAERAKRGIGTLPGSLLEALKLTEGSSVVREALGDHVFDAFVANKKIEWSQYSIAVTDWELKRYLPVL

SEQ ID NO: 12284 - protein, 520 aa, Oryza sativa Japonica Group
MLRTKTPRPRGGKSRRATAAAGKEREREREREREGRSPSGELSLQLEHVSLFSFLADAPREGAAAARTPFTPFEELLEGSCDPDPTPPPPLPPLQPQATPMDADEVVEEKDSGILSQDFFCTPDYITPDAPQLGSGFDANKENIPCPNSPEKSVCRSKRYKRDCSPKGLGSNDIFDSQWIAPVQFEGLDDSEEEQLKESSSHKRGSYVSQSAVALRCRVMPPPCIRNPYLNTDHQIDDNVFGGRQCKSSGFSPSVDGDGLSRYRTDFHEIEQIGRGNFSVVFKVLKRIDGCLYAVKRSIRQLHNDRERRQAVKEVQALAALGCHENIVGYFTSWFENKQLFIQMELCDRCLSMDRNQPLKCGEALELLYQICKGLDFIHERGIAHLDVKPDNIYVRNGVYKLGDFGCATLIDRSLAIEDGDSRYMPPEMLNDKYEHLDKVDIFSLGAAIYELIRGTQLPDSGPQFTSLREGKIALLPGCPMQFQSLIKSMMDPDPVRRPSAKEVLRHPIFDKLHKAPAKK

SEQ ID NO: 12285 - protein, 391 aa, Podostemum ceratophyllum; identical to SEQ ID NO: 8866

SEQ ID NO: 12286 - protein, 468 aa, Pseudomonas fluorescens PfO-1
MSKSVQLIKDHDVKWIDLRFTDTKGTQHHVTMPARDALEDDFFEVGKMFDGSSIAGWKGIEASDMILLPDDETAVLDPFTEEPTLILVCDIIEPSTMQGYDRDPRAIARRAEEYLKTTGIGDTVFAGPEPEFFIFDEVKFKSDISGSMFKIYSEQGSWMSDQDVEGGNKGHRPGVKGGYFPVPPFDHDHEIRTSMCNALEEMGLTVEVHHHEVATAGQNEIGVKFNTLVKKADETQTLKYVVHNVADAYGRTATFMPKPLYGDNGSGMHVHMSISKDGKNTFAGEGYAGLSDTALYFIGGIIKHGKALNGFTNPATNSYKRLVPGFEAPVMLAYSARNRSASIRIPYVNSPKGRRIEARFPDPAANPYLAFAALLMAGLDGIQNKIHPGDAADKNLYDLPPEEAKEIPQVCGSLKEALEELDKGRAFLTKGGVFSDDFIDAYIALKSEEEIKVRTFVHPLEYELYYSC

SEQ ID NO: 12287 - protein, 885 aa, Desulfitobacterium hafniense DCB-2
MEILKIQAIPGANVYSYRPVIRAVVDLQEWTERTSDTFGDFNTRLVQCLPSLYEHFCSRGKPGGFVERLKEGTLVGHIIEHVTIELLTRAGQNIPYGKTLCLPEHPGHYEIIFNYDSLEGGLEGFKQGYALVQELLAGQKPNVTNRIERIREVIQRFELGASTRAIIEAAEGRGIPVIRLNDSSLLQLGYGRNQKRVQAAMSDQTSCIGVDIACDKGLTKKLLYEGGIPVPDGVVTRNEDEAVEVFRQLDRLVVVKPYNGNQGKGVTLKLGTEAEVRAAFRVAQTYEEQVVVEEYIEGKNYRLLVVDGKMAAAAERIPAHVIGDGVSTVGELVQLANSDPQRGEDHEKALTKIKIDPVVLMTLTQKKIALETVPADGEVVYLRDSANLSTGGISVDVTERVHPDNAALAEYAARIVGLDIAGVDMVLEDIERPHQEQRGAIIEVNAAPGLRMHQYPTVGRPLDVGKIIVDHVMPKGNGRIPVISVTGTNGKTTTTRMIGKMLTDRELAVGMTTTDGIYVGGKLLLKGDTTGPESAQIVLRHPDVQVAVLETARGGILRAGLAYDYADVAVVTNVANDHLGQYGMESLEDIAHVKSLIAEVVRPHSYVVLNADDPLVASFARKTKGKVIFFSTEKDNLTIRKHLAVGGIAVFVRRGNILLCQGDQSHKICGVKDLPVTWNGKALHNLQNALAAIAVGWSLGLKAEGIRTSLSEFTSDPECNRGRLNPYTIGGVQVFIDYGHNAAGIKAIAQTLRKFKAPAVVGCVTVPGDRPDETIREVARVAARGFHRLIIREDGDLRGRRPGEIAGMIMEEAIASGMDPRRISVVLPEREAFCHGLDTCKPGEIFVMFYEHLEPIEEEIALRLESGPLAKEEEGFLEVANLGAI

SEQ ID NO: 12288 - protein, 395 aa, Quiina pteridophylla; identical to SEQ ID NO: 8869

SEQ ID NO: 12289 - protein, 273 aa, Desulfitobacterium hafniense DCB-2
MNHYVEGKLLIIGGAEDKKGECKILKRFIQEAGGRESRVVVLTAATEMPEQVGSEYKELFENLGAAEVQVLDIAERVSANRESISQELQKATGIFFTGGDQLRITGILGGTRLGRTLHNLYQRGVIIAGTSAGASVMSDTMIVGGEAGTPKKDTLTMAPGLGLLHSVVVDQHFAQRGRIGRLLTAIAQNPYVLGVGIDEDTSILVYSDGHFTVVGSQTVTVVDASPTMASNVSEISPGQALVLTPVLMHILSDGYRFDLKRRAASLNETPSGG

SEQ ID NO: 12290 - protein, 338 aa, Picea sitchensis
MAENNNNSNSNNGCDLPIKRVRPQEEEEDAMDGVDGGYPSVIPGWFAEISPMWPGEAHSLKVEKVLFQGKSKYQDVMVFQSLTYGKVLVLDGVIQLTERDECAYQEMITHLPLCSVPNPRKVLVIGGGDGGVLREVSRHMSVEQIDICEIDGMVIDVSKQYFPEIAVGFDDPRVTVNVGDGVAFLRESPEGVYDVVIVDSSDPIGPAEELFKKPFFELVARALRPGGVMCTQAESIWLHMPIIEDIVSACRQTFKGSVNYAWTTVPTYPSGVIGFMLCSTEGPAVDFQHPINPIEKQESNVELQRPLKFYNSEMHTASFCLPAFARRAIGSNVQPPLS

SEQ ID NO: 12291 - protein, 360 aa, Stackhousia minima; identical to SEQ ID NO: 8871

SEQ ID NO: 12292 - protein, 337 aa, Glycine max
MAKETSVVYLYPSKSQVWGENFDHKKLVITTLAANGKKEESNGAPNDTYPAFPGWYADVSWPGEAHTYKIEKILFHGKSEFQELLVFESSRQGKVAILDGHIQLTENDEFAYQEMLTHLALCSIPDPKKVLLIGGGDGGILREISRHSSVEHIDICELDQMVIDVYSEFFPDIAVGYEDPRVHVHISDGVAFINSVPEGTYDVIISDAFPAMGHSADVLADECFLESVAKALRPGGVFSAPADSLWHKNFVVADTIANCKKIFKGSVNYAWTTVPTYASGVIGFMLCSTEGPPVNFKHPINKLNPEKNGVAKGPTKFYNPEIHAAAFCLPSFVDKVD

SEQ ID NO: 12293 - protein, 686 aa, Idiomarina baltica OS145
MKSGLFKLNALALLVVAPSALAIPPTHDISELPQLTQDSQHETVSERVLAYFTRYHFSQPELDDSLSEQIHDRYLEMLDFNKMFLLKSDVDASEEYARLFDDMLESGELEIAYELYQTSLERRFQRYVYALSLLDKDKPMSFDEKGEKYYYDREDADWAKDEEALNELWQKRVKYDALNLKLAGKEWPDIVETLGKRYNSALNRLTNSKNEDAFQTLMNAFARSIEPHTSYLSPANSERFQQNMNLELEGIGAVLQSEYDYTVIRSLVPGGPADKTGELSPEDKIVAVGQGVGEDAEDFVDIIGMRLDDVVDMIKGPKGSSVRLQVLEASQGVGGTPKVVEIVRDKVKLEDRAAKAHVEVPEEGPNKGRKMGVIEIPGFYNNLTADVKKLLEDLKSKEVEGIVIDLRSNGGGALNEAIGLTGLFIDQGPVVQVSDGRGHVEISKDRDGVTYYEGPLVVLVDRYSASASEIFAAAMQDYKRALIVGENTFGKGTVQQHRGLNRRFDFFSEPLGSVQYTIAKFYRIDGGSTQLKGVAPDVTLPSYVEASEWGESREDNALPWDQIKPAQYDTFSYLDSAEIQSLNKNAHERLEKDPEFSYIFKDIDELRKNMEKTWVSLNIEERESEQAADKKERLARVNDRLKRMGMKPVESIDDVDDEVLEVDPYLDETISVAFEFIDDVKLAQND

SEQ ID NO: 12294 - protein, 546 aa, Glycine max
MGFEISTVVSKLQTLSTSDHASVVSMNLFVALLCGCIVLGHLLEENRWMNESITALLIGVCTGIVILLFSGGKSSHILVFSEDLFFIYLLPPIIFNAGFQVKKKQFFVNFMTIMLFGAIGTLISCTIITLGATQIFKRLDVGPLELGDFLAIGAIFAATDSVCTLQVLNQDETPLLYSLVFGEGVVNDATSVVLFNAIQSFDLNQIDPSIAGHFLGNFLYLFIASTMLGVLTGLLSAYIIKKLYIGRHSTDREVALMMLMAYLSYMLAELSYLSGILTVFFCGIVMSHYTWHNVTESSRITTKHSFATLSFVAEIFIFLYVGMDALDIEKWKFVSDSPGTSVATSSVLLGLILLGRAAFVFPLSFLSNLAKKSPNEKISFRQQVIIWWAGLMRGAVSIALAYNQFTMSGHTSLRSNAIMITSTITVVLFSTVVFGLLTKPLIRLLLPHTPHHKESSITIITDPSTPSLKSVTIPLLGSAQESEVDIDGHDIHRPSSIRALLTTPTHTVHRLWRKFDDAFMRPVFGGRGFVPVEPGSPTERNGHQWR

SEQ ID NO: 12295 - protein, 1158 aa, Chenopodium quinoa
MAAYRIAVPFPLMLAEVGAETTAPMNSTISASAMAEESESNPTDAVIFFGVSLIPGIACRHFLRGTRVPYTVALLIIGIGLGSLEYGTKHGLGRFGDGIRIWENIDPELLLAVFLPALLFESSFSMEIHQIKRCAAQMILLAGPGVLISTFCLGAALKLSFPYDWSWKTSLLLGGLLSATDPVAVVALLKELGASKKLSTIIEGESLMNDGTAIVVYQLFLKMILGRTFNWASILKYLVQVSFGAVGFGIAFGIASVLWLGFIFNDTIIEITLTLAVSYVAYFTAQEGADVSGVLTVMTLGMFYAAAARTAFKGESQQSLHHFWEMVAYIANTLIFILSGAVIAQGVLSSDNIFENHGTAWGYLILLYVYVLVARGVVVGVLYPFLCYFGYGMEWKEAMILVWAGLRGAVALSLSLSVKRSSGDPAYLSTQTGTLFVFFTGGIVFLTLIINGSTTQFVLQFLGMDKLSKAKRRILEFTKYEMEKKALEAFGDLGEDEELGPADWPTVKRYIKSLNSIDGDRIHPHDASDNGFLDPMNLKDMRVRLLNGAQAAYWAMLDEGRITQSTANVLMQSVDEALDSVDHEPLCDWKGLKNSVHFPKYYRLLQGGIYPKKLVTFFTVERLESACYICAAFLRAHRTARGQLHDFIGYSEISSAVITESETEGEEARKFLEDVRTTFPEVLRVVKTRQVTYAVLQHLIEYIESLEKAGILEEKEMLHLHDAVQTDLKRLVRNPPTVKIPKIGELISMHPFLGALPSGVRDLLVGSTKEEVKVRGMTLYKEGGKPNGIWLISNGVVKWACKVKKNKHALHQTVTHGSTLGLYEVLIGKPYLCDMITDSVAVCFYIETEKILAALGSDPAVEHFFWKESVIVLAKVLLPRVFENMSMQDMRKLTAERSTLNTYLRGETIEVSSHSIGFLLEGFVKSHPLAEELIPSPAALWPAQGNSSFLSQEGSGYKSTSFLHQGTSYYVETRARVLLIDMVPIQADNTLLRRKSSLLLHDQSSRSLSSRDHAGLLSWPENQYKSYQHLPDGQEIDDSQNLSAKAMRLSIYGSTAKDVPVRGLSFQGYTLGNPSHVRSYPQVPIGQKQLPLTSVKSEGSNTVRKRLGEDVMREELLPPTHSRHPSRAVDDSSSESGGEDEVFVRIDSPSKLSFRQAP

SEQ ID NO: 12296 - protein, 1033 aa, Gibberella zeae PH-1
MAQSWKHILNPVVEQEQHNDQPTPISNTSLTNQQSAPLSNVPAELYFNANESFNMDFSLNGWNDYTGELPRESEYLGPGSSNPLANVPVHQQNYFPTDMILDPQLMGLDMGIIDANFNFMLPVTTEQQANSSELAHSIENSQYLGIPMDSSQDESSVTPDVICSSQSNSTPETVPDVDDTEEGAQEEEESLFVTDQDEITVHYGMLHNVEVKLVPDDMSSFDDRLKTGDSPYQYFKPTEYQKQVMLCFPEDEKHFGHLSSAAGQTLMPLITRPRVEVAPLALKIDLREIIHRANKSADARVKVDINIYGPRSVGTSIGEVLSNGKLWLQRSSHSKNGTEYDNPHFLSITVADGHNGLVQNEVVASNGPTKKKTREEQLRKMVEEVYNAVDNTRELELVEGGDRVTRQLLRHQKEALGFMLERESGHINDKYRLWKEIIQDGRVQYRHRITKRRRDTRPEEKGGGILADDMGMGKSLSILALVMKTLDNGQEWANLKNAEHKGRKTTRFSRSTLVVVSAALLVDEWMNEVKKHLQTGLKIVKYHGDRRPKDLSELNMVEDSDIVVTTYHTLTTEYLIGKGKTSPLYKLGWYRVVLDEAHIIRRPSTKFFQACDYLHANSRWCLSGTPIQNKLADIGSLFRFIRAEPFDKASEFRKWIETPFGNSYDDLTLVKDRLVMLLEALCLRRTREVLDLPKTRQFVRHLNFTKPERDQYERTRNIIMRNMEHRMGEVEKSSQFGMFQMWLQLRIVCNHGTYQKLFSWHRRNLLEEREAIVGTAGQYGEMLCVGCEQPMPVLGHDWSKKMFEDGCSHVLCTKCIEDSQFSELEISQRRCPVCVRWYQAPSPAGDEEDGTSRRKRKRNATTKDDHEHYFNAEGHSTKIRALVEDVRKDLWTTKSIIFSCWTRTLHLIARHLEKAGIPYLQLDGNSPLPQRQQTLNKFENGTETPVLIMTTGTGAFGLNLTSANRIFIAELQWNPSVESQAISRAIRLGQKKEVRVTRYITKDTVEEVNRQDIKQQQEYKKQIAALGFEEEMD

SEQ ID NO: 12297 - protein, 189 aa, Saccharum officinarum; identical to SEQ ID NO: 8877
  misc_feature (3)..(3): Xaa can be any naturally occurring amino acid
  misc_feature (52)..(52): Xaa can be any naturally occurring amino acid
  misc_feature (161)..(161): Xaa can be any naturally occurring amino acid

SEQ ID NO: 12298 - protein, 79 aa, Brassica napus
MGKKNCELCDGVARMFCESDQASLCWNCDGKVHGANFLVAKHTRCLLCSVCQSPTPWKASGLRFGPTVSVCESCLALVP

SEQ ID NO: 12299 - protein, 318 aa, Simarouba amara; identical to SEQ ID NO: 8880

SEQ ID NO: 12300 - protein, 165 aa, Brassica napus; identical to SEQ ID NO: 517

SEQ ID NO: 12301 - protein, 318 aa, Simarouba glauca; identical to SEQ ID NO: 8881

SEQ ID NO: 12302 - protein, 485 aa, Propionibacterium acnes KPA171202
MRVLDVATLAQWVEAAPVNDSAQVGPDVVIDTRKVTPGALFIALPGTRVDGHDFTQAAQDTGAAAVLVTRRTDAQLPHLVVDDGQAGLSRLARHVVATERERGMRTIALTGSSGKTSTKDMLAQILETFGPTVAPVGSFNNEIGVPLTACRSNENTSFLVSEMGTRGLGHISWLTSIVTPDVAMVLNVGNAHLGEFGSREVIAQAKGEIVEALSVDGWAVLNAADTLVAGMAPRTRGHIAWFSPDADHRRPDADIEVWAESTHADDLDRHSFTLAARRGESTWRSPVRLMTMGAHQVANAVAATAAALAALAMNDDIDDQTVTRIAEALSNAVSRSAMRMQLRERADGLVLVEDCYNANPDSMAASLTAMGHVLATRRARDPQTRGVAVLGDMLELGQDSARLNAESGRLAAHAGFDVIIAVGDEAENIAEGARAEGARVIVSTVEDASGSLGWTSHDVVLLKASRGLALERVGREVFEEREAQA

SEQ ID NO: 12303 - protein, 174 aa, Arabidopsis thaliana
  misc_feature (48)..(48): Xaa can be any naturally occurring amino acid
  misc_feature (100)..(100): Xaa can be any naturally occurring amino acid
  misc_feature (135)..(135): Xaa can be any naturally occurring amino acid
MASSMLSSAAVVTSPAQATMVAPFTGLKSSAAFPVTRKTNKDITSIAXNGGRVSCMKVWPPIGKKKFETLSYLPDLSDVELAKEVDYLLRNKCIPCVEFXYSTDFVYREHGNTPGYYQWTDWTRWKLPLFPCTDXSAQGVEGKLKKCRKEHPGRPSLRSWGIRQHPVQVQCRQV

SEQ ID NO: 12304 - protein, 318 aa, Simarouba glauca; identical to SEQ ID NO: 8883

SEQ ID NO: 12305 - protein, 154 aa, Physcomitrella patens subsp. patens
MDTAAGRPKDDVSLPKATMTKIIKEMLPPDVRVAKDAQDLLVECCVEFINLISSESNEICSKEEKRTIAPEHVLRALEILGFGEYMGEVQGAFEQHKNETLESPKVGGRWAKEGGGGMTEEEAIAAQQRMFAEARARMNSAGAPAPSAQANDSS

SEQ ID NO: 12306 - protein, 672 aa, Aspergillus awamori
MARISHQGAAKPFTAWTTIFYLLLVFIAPLAFFGTAHAQDETSPQESYGTVIGIDLGTTYSCVGVMQNGKVEILVNDQGNRITPSYVAFTDEERLVGDAAKNQYAANPRRTIFDIKRLIGRKFDDKDVQKDAKHFPYKVVNKDGKPHVKVDVNQTPKTLTPEEVSAMVLGKMKEIAEGYLGKKVTHAVVTVPAYFNDAQRQATKDAGTIAGLNVLRVVNEPTAAAIAYGLDKTGDERQVIVYDLGGGTFDVSLLSIDNGVFEVLATAGDTHLGGEDFDQRVMDHFVKLYNKKNNVDVTKDLKAMGKLKREVEKAKGTLSSQMSTRIEIEAFHNGEDFSETLTRAKFEELNMDLFKKTLKPVEQVLKDAKVKKSEVDDIVLVGGSTRIPKVQALLEEFFGGKKASKGINPDEAVAFGAAVQGGVLSGEEGTGDVVLMDVNPLTLGIETTGGVMTKLIPRNTVIPTRKSQIFSTAADNQPTVLIQVYEGERSLTKDNNLLGKFELTGIPPAPRGVPQIEVSFDLDANGILKVHASDKGTGKAESITITNDKGRLSQEEIDRMVAEAEEFAEEDKAIKAKIEARNTLENYAFSLKNQVNDENGLGGQIDEDDKQTILDAVKEVTEWLEDNAATATTEDFEEQKEQLSNVAYPITSKLYGSAPADEDDEPSGHDEL

SEQ ID NO: 12307 - protein, 483 aa, Thauera sp. MZ1T
MRSSKLKQFGLVMTGMVAGIMISLNFSANADRSAPLPLPVDELRAYADVFNAIKQGYVEPVEDKKLITDSISGMLSGLDPHSAYLDAEAFKDLQVGTQGEFGGLGIEVGMEDGFVKVISPIEDTPAFRAGVLAGDLIVKLDDTPVKGMSLNDAVKRMRGKPRTDIILTIMRKGQSQPIVIKLTREVIKVQSVKSKVVEPGYAYLRIAQFQENTAASVVEHLAKLGAQGPVQGLVLDLRNDPGGLLHGAVGVSAAFLPEETLVVSTDGRTEDAKREYRAIQADYLRGTRDDFLRRLPAYARDVPMVVLVNAGSASASEIVAGALQDHKRARVIGTQTFGKGSVQTILPLNNNTAIKLTTARYYTPSGRSIQAKGIAPDIVVEETANGSGRRVREADLLGHLENDKGAVEAAKAAAGKADGAPAEETAAETARFELAGDNDHQLKQAIRLLKGEDIAHAAPAVEAEAAGGQAAAAGAAQPAAAKQ

SEQ ID NO: 12308 - protein, 1873 aa, Kluyveromyces lactis NRRL Y-1140
MSSQESRLDRQVILLETGSTQVVRNMAADQLGDLAKQHPEQTLPLLSRVYPYLLSKQWETRVTAARAVGGIVSHAPLWDPNADDEESKNPQTQQPLGPESAKVKIEEEMKVKLEELSHTDEWNELQDDTHYFTLNSWKISELLKSGKSLLAASANDYESKALNINNNGSADIEQDDANNVKHLKKEDSFADLKKENSTDSLADEDTVNETKESKRSARMLAMARRKKKIQAKTVNKKPVDLSQSSATRNMIPNKEDLSDSPTPVPMTLTNPKLEITEQSDEKRLMVESMVQPILEKHEKIRGFVWQFQGIYELLLDNLMNEQWEIRHGAALGLRELMKKHAPSVGRLSGKSKQDNDSRNYCSLEDLATRLLTIFALDRFSDFVNDTAVAPVRESAAQTLATLLIHLDDEIALKVFQKLEQLVLQDPGLTGSPNKIWQATHGGLLGIRYFVSIKTDFLFKHNLLNNVVNIVLYGLKESDDDVQSVSAAILSPITDDFVKLQTDTIDLVLTTVWNSLTHLDDDLSSSVSSVMDLLAKLCKHEQVLAVLKQKSIDSPSEWSFKSLVPQLYPFLRHSITMVRKSVLNLLSAFLSLNDSATKNWINGKLFKLIYQNILLEQNVEVLDLSCKLYAAMLNGYVNSKGQEKSIDFVFSKYLTSILHLLITPIGEQGKNYAMDIQHITKPSSSYLINLERKRSNATANSSNVTATYSHRVNIDSPMLAGDVTLIGLDIIYNTRVKAAKTLGLTLSFFQESTLRSFFENVLASCLDLPYSTPRMLVAIVLSSFCTNWKENQQHNPVPAFMSTLFSSTFLGFLTGATTLPVFRELTPILKALRTQCQSLMTTFVDVGMLPPQRVPAIAIIVKGEPEAGPEAFSIQTAEKVQTEFYAKLFSLLPNAQKILAQKPLEDARYRVSLAIESAKESERERQLEVLSSYASAVMLIDGLPNKLNPLIRSLMDNVKSEKHTILQQTSGDSIVNLISELVSAQKHNVANKIVKNLCGFICVDTSEVPEFDGTNTTVITTLVKEAASLSLQEDSEMKKMTESARIKRKGGMHTLMKLLIKFQEKTLEVVPQLKKSLFEPLEKIDILSSNGDETTFKKTGQEIVDAFGIIRALFTYMPESVQDEEVLSRLPVFRDFLRSNVSVIRYSAARTLSELACHKPVVLMSYVITDILPMLNNAGSVTDRQGVVELLYHLSIQLESDILPYVVFLIVPLLGRMSDSNEDIRKLATTTFASIIKLVPLEAGIAAPVGLSEELLRGREKERDFIQQMMDPSKAKPFKLPVAIKATLRKYQQDGVNWLAFLNKYHLHGILCDDMGLGKTLQTICIIASDQYLRSEDYKKTQSEKTRPLPSLIICPPSLTGHWEQEFQQYSPTLNVLVYAGGPSVRYPLQGQVPTADIVVTSYDVARNDVDFLKKYDYNYCVLDEGHIIKNSQSKLAKAVKLINSNHRLVLTGTPIQNNVVELWSLFDFLMPGFLGTEKMFQERFAKPIASSRNSKTSSKEQEAGALALEALHKQVLPFMLRRLKEEVLSDLPPKIIQDYYCELSDLQKQLYNDFVKKQKNVVEKDIENTAEVENKQHIFQALQYMRKLCNHPSLVLNSSHPQFQQVQSYLSQTGMDLHDIGHAPKLEALKTLLLECGIGIQDVEKKSNKNPSIDNVISQHRVLIFCQLKDMLDMVENDLLKKHLPSVTFMRLDGSVDSRDRQKVVRKFNEDPSIDCLLLTTKVGGLGLNLTGADTVIFVEHDWNPMNDLQAMDRAHRLGQKKVVNVYRIITKGTLEEKIMGLQKFKMNIASTIVNQQNAGLGSMNTHQLLDLFDADNIPSQEKVEKKKTVEDVANESGLTGKAKEAVGELKELWDSSQYEEEYNLDNFIKTLR

SEQ ID NO: 12309 - protein, 129 aa, Triticum aestivum
  misc_feature (4)..(4): Xaa can be any naturally occurring amino acid
  misc_feature (12)..(14): Xaa can be any naturally occurring amino acid
  misc_feature (28)..(30): Xaa can be any naturally occurring amino acid
  misc_feature (38)..(38): Xaa can be any naturally occurring amino acid
  misc_feature (44)..(45): Xaa can be any naturally occurring amino acid
  misc_feature (47)..(47): Xaa can be any naturally occurring amino acid
  misc_feature (49)..(49): Xaa can be any naturally occurring amino acid
  misc_feature (52)..(53): Xaa can be any naturally occurring amino acid
  misc_feature (55)..(55): Xaa can be any naturally occurring amino acid
  misc_feature (59)..(59): Xaa can be any naturally occurring amino acid
  misc_feature (63)..(63): Xaa can be any naturally occurring amino acid
  misc_feature (73)..(73): Xaa can be any naturally occurring amino acid
  misc_feature (79)..(79): Xaa can be any naturally occurring amino acid
  misc_feature (83)..(83): Xaa can be any naturally occurring amino acid
  misc_feature (86)..(86): Xaa can be any naturally occurring amino acid
  misc_feature (89)..(89): Xaa can be any naturally occurring amino acid
  misc_feature (97)..(97): Xaa can be any naturally occurring amino acid
  misc_feature (103)..(103): Xaa can be any naturally occurring amino acid
  misc_feature (106)..(106): Xaa can be any naturally occurring amino acid
  misc_feature (109)..(109): Xaa can be any naturally occurring amino acid
  misc_feature (116)..(116): Xaa can be any naturally occurring amino acid
  misc_feature (120)..(121): Xaa can be any naturally occurring amino acid
MEAXTAAKRARXXXVPAAADGAGEQAGXXXVIPGWFSXINPMWXXEXHXLKXXKXLFQXKFGXKKLWVFNPPXNGKGSXLIGXFKXNRXGTIAPNKXMFTNFXLVXLKXPKKALSXGGGXXGGFGEGPR

SEQ ID NO: 12310 - protein, 479 aa, Methylococcus capsulatus str. Bath
MPDIPVYGLSLDSRSVRTGDAFFALSGSREHGSRYAEEAVRRGALIVVYDSSGAGVRAPEPGLGFAVPVRDLGRHLGSIAARFFGHPSETLDVIAVTGTNGKTSCTHFIAEALQPDHPTAVIGTLGWGLPGNLRRIAHTTPDAIEIHAILATLKAQGFRLAALEASSHGQAQGRINGVHCRGALYTRITRDHLNYHGTFESYLAAKLGLLANPALEFVAVTLDDPSVDAILRSVPAGVKVIGYSLGGGESVDFPVLRVEALEQTREGLHLKVDYAGRTIEIDAPVYGDFNAENLLGTLAVLVGLGYPAEAAASRVGRVRPVPGRMERFRENGLTVIVDYAHTPDALRNVLTSLRRHCRERLWVVFGCGGDRDRGKRPEMGAIAARIADHVIVTDDNPRSEPGDAIVQDILAGCGETAVTVVRDRRTAIRAAIAQAGDGDIVLVAGKGHEAFQEVAGVFYEFSDREEVRKALSARYGSGG

SEQ ID NO: 12311 - protein, 314 aa, Debaryomyces hansenii
MSIEAPQIDLKSFQHACINVIDNKYWFHETSAEGFPGQAFALEIDQILYHVHSQYQDILIFKSTTFGNVLVLNGIIQCTERDEFAYQELITHLPIMCHASPRRVLVIGGGDCGVVRELIKHLDEGVDEITMVEIDDMVIKLSAKFLPEMAKFHDHPRVKMIIDDGFKYLKSLSAQAHEKYDVIITDSSDPDGPAEDFFQTNYFKLLSNALNPDGIVIMQSSENIWLNINYLSQLMQKANRVFNNVAYSQCYMPSYTSGQLGLIVATNDTSNVLSIPSRKFSPEKELHLFKYYSSSVHQASFVLPTWAHKTLNNN

SEQ ID NO: 12312 - protein, 198 aa, Sophora affinis; identical to SEQ ID NO: 8892

SEQ ID NO: 12313 - protein, 181 aa, Arabidopsis thaliana
MVSFMFSSTDEVTSPAQATMDAPFTGLKSSASFPVTRKANNDITSITSNGGRVSCMKVWPPIGKKKFETLSYLPDLSDVELAKEVDYLLRNKWIPCVEFELEHGFVYREHGNTPGYYDGRYWTMWKLPLFGCTDSAQVLKEVEECKKEYPGAFIRIIGFDNTRQVQCISFIAYKPPSFTEA

SEQ ID NO: 12314 - protein, 776 aa, Listeria monocytogenes EGD-e
MIKLDMTMLDSFKEDPNLRKLLFSGHFGLEKENIRVTSDGKLALTPHPAIFGPKEDNPYIKTDFSESQIEMITPVTDSIDSVYEWLENLHNIVSLRSENELLWPSSNPPILPAEEDIPIAEYKTPDSPDRKYREHLAKGYGKKIQLLSGIHYNFSFPEALIDGLYANISLPEESKQDFKNRLYLKVAKYFMKNRWLLIYLTGASPVYLADFSKTKHEESLPDGSSALRDGISLRNSNAGYKNKEALFVDYNSFDAYISSISNYIEAGKIESMREFYNPIRLKNAHTDQTVESLAEHGVEYLEIRSIDLNPLEPNGISKDELDFIHLFLIKGLLSEDRELCANNQQLADENENNIALNGLAQPSIKNCDNEDIPLADAGLLELDKMSDFIKSLRPEDTKLRAIIEKQKERLLHPEKTIAAQVKQQVTKEGYVDFHLNQAKTYMEETEALAYKLIGAEDMELSTQIIWKDAIARGIKVDVLDRAENFLRFQKGDHIEYVKQASKTSKDNYVSVLMMENKVVTKLVLAEHDIRVPFGDSFSDQALALEAFSLFEDKQIVVKPKSTNYGWGISIFKNKFTLEDYQEALNIAFSYDSSVIIEEFIPGDEFRFLVINDKVEAVLKRVPANVTGDGIHTVRELVEEKNTDPLRGTDHLKPLEKIRTGPEETLMLSMQNLSWDSIPKAEEIIYLRENSNVSTGGDSIDYTEEMDDYFKEIAIRATQVLDAKICGVDIIVPRETIDRDKHAIIELNFNPAMHMHCFPYQGEQKKIGDKILDFLFD

SEQ ID NO: 12315 - protein, 469 aa, Salmonella typhimurium
MSAEHVLTMLNEHEVKFVDLRFTDTKGKEQHVTIPAHQVNAEFFEEGKMFDGSSIGGWKGINESDMVLMPDASTAVIDPFFADSTLIIRCDILEPGTLQGYDRDPRSIAKRAEDYLRATGIADTVLFGPEPEFFLFDDIRFGASISGSHVAIDDIEGAWNSSTKYEGGNKGHRPGVKGGYFPVPPVDSAQDIRSEMCLVMEQMGLVVEAHHHEVATAGQNEVATRFNTMTKKADEIQIYKYVVHNVAHRFGKTATFMPKPMFGDNGSGMHCHMSLAKNGTNLFSGDKYAGLSEQALYYIGGVIKHAKAINALANPTTNSYKRLVPGYEAPVMLAYSARNRSASIRIPVVASPKARRIEVRFPDPAANPYLCFAALLMAGLDGIKNKIHPGEPMDKNLYDLPPEEAKEIPQVAGSLEEALNALDLDREFLKAGGVFTDEAIDAYIALRPEEDDRVRMTPHPVEFELYYSV

SEQ ID NO: 12316 - protein, 216 aa, Yarrowia lipolytica CLIB122
MNILNNVDGSAKWEQGTSVICSVTGPIETRRRTDEPTLAQVELVIRPAIGQATTRETLIKDRIYSVLAATVVRNLYPRMLLQIVIQILEQGEGTGYNVLKLAACLNAVCLALIDSRTPMTGLFTAVAIAIVDDKLILHPTRKQVSQSTSTHAVSYFVENNKATGLLMCESEGEFTENQLFEVLEQAARACEDVALDMRERIEKGVKEGLRIDAGQE

SEQ ID NO: 12317 - protein, 443 aa, Alkaliphilus metalliredigens QYMF
MSNLNSDDVRRMVKEENVRFIHLQFTDIFGKLKNVAITPQQLDTALDNEIMFDGSSIDGFTGVEESDMYLAPDPSTFVIFPWVSNGFGTVARMICDVYKPDGSHFEGCPRGILKRTLSELKEYGFDYFVGPEVEFFLFERDANGNPTREINDHAGYFDLAPTDEGEIARRHMCLTLEEMGFYIEMSHHEAAPGQHEIGFRYDDALTTADNVSTFKQVVKTIAKEHKLHATFMPKPLTGKHGTCMHLNQSLYKDGKNAFVDTNDELQLSQEAYYFIGGLIKYAREFAAITNATVNSYKRFVPGFEAPTDIAWATANRSPLIRIPAKRGEATRVELRNPDPTANHYLAFAAALAAGLEGIKNKIIPPECCNVNMYDIDEKIKEKQDIEKFPSDLREAINELENSELMKKTLGEHTHRTYIAAKKAEWNEYAHQIHDWEFKRYLNE

SEQ ID NO: 12318 - protein, 444 aa, Bradyrhizobium sp. BTAi1
MRKNWLFLAGTLTGVGLTLLVSGPDGAQLIARAKAAAGMADTYSQLNLFGAVFERVRADYVEKPDDPALIEGAINGMVSSLDPHSRYMNDKSWRDMQETTSGEFGGLGIEVTMEDGLVKVVAPIDDTPASKAGILSGDLIAKIDGEAVQGLTLEQAVAKMKGGVNTKTKLTIMRKGKDAPLDVTLTREIIRVRPVRYHTEGGDIGYIRITSFNEQTTESLRKAITSISKDIPQDKLAGYVVDLRNNPGGLLDQAVSVSSTFLPRGEVVSTRGRNPEETQRFTARGGDLTKGKPLVVLINGGSASASEIVAGALHDHKRATLVGTRSFGKGSVQTIIPLGAGNGALALTTARYYTPSGRSIQAQGIAPDIEVKQDVPDDLKDRTDIKGEASMRGHLSAADGTEQTGSQSYVPPDEKDDKALHAAFNVLRGVTVNADVRAKAAVPN

SEQ ID NO: 12319 - protein, 211 aa, Macaranga oblongifolia; identical to SEQ ID NO: 8898

SEQ ID NO: 12320 - protein, 154 aa, Sesbania rostrata
QKKTKNMGFTDKQEALVNTSYEAFKKNLPGHSVLFYSFILEKEPAAKGLFSFLKDSDGVPQNNPSLQAHAEKVFGLVHDAAAQLRATGVVVLADASLGSVHVQKGVTDPHFVVVKEALLKTLKEAAGATWSDEVSIAWEVAYDGLAAAIKKAMS

SEQ ID NO: 12321 - protein, 1134 aa, Colwellia psychrerythraea 34H
MAKNTFTPELLEKHFTKNEWKKGARIFQANGVKTCALDGEVIRGVVFSERSRESSYLTRLVFDGKFGDIASYCDCYVGRDCKHGSALAQCYIHEHFDRNSIATSETIIDKWLNRFQAQPTRYQPNTQQKSLLYFLKPNPYNEDDFLTLGIKSARPKNSGGWNSSIGSEYSASSLINSAYANDEDVAVLTELMRTNQYGDTIKYFDLFERIIKTNRSFWHTTYDLSEPVTLSEPLEAEWQWLALGNSLHTLKLVLMQPSESIRIIKAQPLCFYDEEKNCFGKINTNTQCDFEAGLLNSPIFEEDKLPWIMSKLSMSLGDAVKRLPKPKTKYSQELTQPDVYLHFTTPVASNRQTGYVQVNFSYQGNLVNPHDENVTITPSNVTKLSIDSDAQSDADSNIESGAYSNIEDEVERENVSPREIKIYRDLAFEQTVIDKLTTLKFNPQPKPKRYTYTSQDDLNKSKTPEFAMLMQGSVLWQRFLHQELSPLEDLGWHITFADDFYYKALSTDSVFDAEVMETDDHDFFSLGLNLTIDGKKMPAFPILLSAIEQLPRSALLDREKEDLISPDSPIYVDLDNGGFVALRYQSVQPILKQFIELFMPNALSHDGTIELSRFQGHQTLSMLDDQGMIAKGTSKLRALADKLKDFQQVTTIPVPEGLNATLRTYQHQGLNWLQFLREYQLNGILADDMGLGKTIQTLAHLLIEKQQGRLTKPILIVAPTSVIFNWANEIDKFTPQLSYQVLHGNKRHEQFGCLEGVENGENQVDIIITSYALITKDLAHYTDRKFYYLVLDEAHYIKNTKTKLYQAFLTLKAQHKLCLTGTPMENHLGEFWAQFNFLLPGFLGGQRQFTKLFRTPIEKHGELERKQLLNQRIKPFILRRTKDKIATELPPKTEIIQTLRIEGKQAELYESVRLAMDSRLKDIIADKGLKRSQIEVLDALLKLRQVCNHPKLLKLEGAKKVNQSAKLDYLMETLPEQIDEGRKILIFSQFTSMLSLIEDELIDAGIGYVKLTGSTTKRQEVVDKFQRGEVPVFLISLRAGGVGLNLTAADTVIHFDPWWNPAVENQATDRAYRIGQNKPVFVYKLIIENSIEEKIQKIQQNKAELAKALLSEEVSDNKLSLTDDILDSLLTPLS

SEQ ID NO: 12322 - protein, 373 aa, Bacillus pumilus SAFR-032
MKALHFGAGNIGRGFIGSLLKTSGFELVFTDVNEAVINELNARGEYTVELAAPGQKQEIVGPVTAINSAQDPAALTEAVASADLITTAVGPAVLKIIASSIAEGLKQKNPDHIINIVACENMIGGSSHLKEAVFSHLTEEEQKALSQTVGFPNAAVDRIVPIQHHEDILKVSVEPFFEWVIDETGFIGDVPQIDGATFVQDLTPYIERKLFTVNTGHALAAYVGYQQGVQTIKEAVDTPEIRQVVEGALHETGSYLIDTYGFKKEEHDAYIQKIIKRFENVFISDEVTRVARSPLRKLGADDRLIGPAKKMKQPVYLIKGIAAALAYDFAEDEEAVRLQKLRKEKGIEGVLEEVCGLTPTDDLYQAILKETTR

SEQ ID NO: 12323 - protein, 692 aa, Podospora anserina
MDHAPADQEHIANATLGQGAGYGVVLGLGGAFAIGMIATTFILKRYNRELQTSEMFNTAGRTVKSGLVAAAVVSSWTWAATLLQSTGVCYRYGVSGPFWYASGATVQIILFATLAIELKRRAPNAHTYLEVIKARYGTVAHLVFMVFGVITNILVSLMLIVGGSATLNALTGMHTIAAIYLLPLGVIAYTMVGGLKATILTDWAHTFILLLIIIIFALTAYASHDLLGSPSAVYDLLVEAATRHPVDGNKEGSYLTMQSREGAIFFVINIVGNFGTVFLDNGYYNKAIAASPVHALPGYIIGGICWFAIPWLTATTMGLAGLALENNPRFPTYPDRMLDSDVSAGLVLPYAAVALLGKGGAMATLLIVFMAVTSAFSSQLIAVSTICTYDLYRAYFKPEASGKRLIYMSHCVVVGYGLFISTFSVGLWYAGISMGYLYVMMGVIISSAVLPATLALLWSGQNKWAAAGAPVLGLATSLTAWLVTSKKQCGELTVQCTGSNIPMLAGNVAALLSPVVFIAILTAIFGVDKYDWKSMLEIRRGDDHDLAQEAGVDLEDVNGGHEETQAEFEAEQSKLLKAGKISRWTTVILALAFLVLWPMPMYGSGYIFSKPFFTGWVTIGIIWIFGSFIGVGLFPVWESRATLTRTCKYIWKDLTGKSHIKTIHAQEAAVVGTPGDQTPPEKAGLKEEVRSS

SEQ ID NO: 12324 - protein, 148 aa, Sesbania rostrata
GAFTESQEALVTSSYETFKQNASDLSVLFYTFILEKAPGAKNLFSFLKDSDGVPKDNPNLKAHAAKVFELVVDSAVQLRTKGAVVIADANLGPVHVQKGVTDAHFVVVKEALLKTVKEATGAKWSDELSNAWEVAYDELAAAIKKAMG

SEQ ID NO: 12325 - protein, 1261 aa, Arabidopsis thaliana
MKKRGFYNLKHPFDPCPFEFFCSGTWKPVEYMRIEDGMMTIRLLENGYVLEDIRPFQRLRLRSRKAALSDCICFLRPDIDVCVLYRIHEDDLEPVWVDARIVSIERKPHESECSCKINVRIYIDQGCIGSEKQRINRDSVVIGLNQISILQKFYKEQSTDQFYRWRFSEDCTSLMKTRLSLGKFLPDLSWLTVTSTLKSIVFQIRTVQTKMVYQIVTDEEGSSSTLSSMNITLEDGVSLSKVVKFNPADILDDSQDLEIKQETDYYQEEDEVVELRRSKRRNVRPDIYTGCDYEPDTIDGWVRMMPYQFGKCAVNVESDEDEDDNNEDGDTNDDLYIPLSRLFIKKKKTNSREAKPKSRKGEIVVIDKRRVHGFGRKERKSELSVIPFTPVFEPIPLEQFGLNANSFGGGGSFSRSQYFDETEKYRSKGMKYGKKMTEMEEMMEADLCWKGPNQVKSFQKRTSRSSRSVAPKTEDSDEPRVYKKVTLSAGAYNKLIDTYMNNIESTIAAKDEPTSVVDQWEELKKTNFAFKLHGDMEKNLSEDGEGETSENEMLWREMELCLASSYILDDNEVRVDNEAFEKARSGCEHDYRLEEEIGMCCRLCGHVGSEIKDVSAPFAEHKKWTIETKHIEEDDIKTKLSHKEAQTKDFSMISDSSEMLAAEESDNVWALIPKLKRKLHVHQRRAFEFLWRNVAGSVEPSLMDPTSGNIGGCVISHSPGAGKTFLIIAFLTSYLKLFPGKRPLVLAPKTTLYTWYKEFIKWEIPVPVHLIHGRRTYCTFKQNKTVQFNGVPKPSRDVMHVLDCLEKIQKWHAHPSVLVMGYTSFTTLMREDSKFAHRKYMAKVLRESPGLLVLDEGHNPRSTKSRLRKALMKVGTDLRILLSGTLFQNNFCEYFNTLCLARPKFIHEVLMELDQKFKTNHGVNKAPHLLENRARKLFLDIIAKKIDASVGDERLQGLNMLKNMTNGFIDNYEGSGSGSGDALPGLQIYTLVMNSTDIQHKILTKLQDVIKTYFGYPLEVELQITLAAIHPWLVTSSNCCTKFFNPQELSEIGKLKHDAKKGSKVMFVLNLIFRVVKREKILIFCHNIAPIRMFTELFENIFRWQRGREILTLTGDLELFERGRVIDKFEEPGNPSRVLLASITACAEGISLTAASRVIMLDSEWNPSKTKQAIARAFRPGQQKVVYVYQLLSRGTLEEDKYRRTTWKEWVSCMIFSEEFVADPSLWQAEKIEDDILREIVGEDKVKSFHMIMKNEKASTG

SEQ ID NO: 12326 - protein, 472 aa, Haemophilus somnus 2336
MSNTTAITNVFKLIEENDIKFVLLRFTDVKGKEHGVSLPVSLVDEDLFEDGKMFDGSSVEGWKAINKADMLLMPIAETAVVDPFAQIPTLSIRCSIFEPTTMQSYDRDPRSIAMRAENYMRSTGVADDVFFGPEPEFFLFDDVRFDVSMNGNSYTVDDIEAAWNTNKHYEGGNKAYRPLKKGGYCAVAPNDIAHDIRSEMCLLMEEMGLVIEAHHHEVATAGQNEIATKFNTLTLKADETQIYKYIVQNVAYEHGKTACFMPKPIINDNGSGMHCNMSLSKDGKNIFQGDKYAGLSETALYFIGGIIKHAKALNAFTNPSTNSYKRLVPGFEAPVLLAYSASNRSASIRIPAVTNPKAIRIEARFPDPLANPYLAFSALLMAGLDGIQNKLYPGDAMDKNLYDLPPEELKDIPAVASSLSEALDNLEKDYEFLTHGKVFSKEFIDTFIAMKRKEVERLNMTPHPVEFEMYYA

SEQ ID NO: 12327 - protein, 465 aa, Ralstonia solanacearum GMI1000
MTRSSLARAPVLLHIGAGSFHRAHQAWYLHRVNAAVPPGERWTLTVGNIRDDMHATLAALAAQQGAYTLETVTPQGERAYETIRSIARVLPWSADLAALINTGADPACRIVSFTVTEGGYYLDEHDRLDVTHPDLAADLRGARSTLYGALAALLAERRQRGAGPLTLQSCDNLRSNGARFRAGMRAFLALRGDAALLAWFDANVSCPSAMVDRITPRPTDDVRTRVHAATGVDDRCPVMGESFIQWVIEDNFIAGRPAWEIAGAEIVADVHPYEEAKIRILNATHSCIAWAGTLAGLTYIHEGMRDAAIYRFAYDYVTDDVIPCLTPSPLDLERYRDVVLERFGNPYVLDTNQRVAADGFSKIPGFIAPTLAECFARGADPVATAVLPALFLGFLEGWARGTLPYVYQDGVMDGAAARSIVEAPDSVAAFCSDRQLWGSLAGRDALVQAVRAGRARVEAWRAARR

SEQ ID NO: 12328 - protein, 184 aa, Pseudomonas aeruginosa PAO1
MKPRVLLSVLALAGLPLSGWAADCPELLQGQLTKLRSKESIDLCQRYAGKPLVVVNTASHCGFTPQFKGLEALYQRYKGQGLEVLGVPSDDFKQEAADTAETAKICYGNYGVTFAMTQPQHVRGDEAIPLFRQLAEQSGQAPRWNFYKYVVDRQGRVVAQFSSKTTPDDPQLQAAIEKAIASQP

SEQ ID NO: 12329 - protein, 129 aa, Brassica napus
PSLLSPPLLLARARFYKGFGARDGRRRQREPRGGGGVREQDRFLPIANISRIMKKAVPANGKIAKDAKETLQECVSEFISFVTSEASDKCQKEKRKTINGDDLLWAMATLGFEEYVDPLKIYLQKYRDM

SEQ ID NO: 12330 - protein, 428 aa, Prochlorococcus marinus str. MIT 9301
MNASFNKLLTFKTFITALMIIVFSINLLLVERVNALSDSRQLVLDAWTLVNEGFYDPEKFDEIQWKRIRQKTLQKQIETSEEAYSAIEDMLRPLDDPYTRVLRPKDYELLKSSNFGSEINGVGLQLGEDDDNRVKVISTLGGSPAEEAGIISGDLIETVDGISSEKLGLAGTASRLRGESGTKVLVELSSESGEIREVDLERRSVDLRPVRTKRLRDDSHTIGYLRITQFSESVPKKVEEALQELKEKDVEGLILDLRNNSGGLVSSGIAVADSLLSEKPVVETKDRNGIKDAIISQKETYFDGPMVTLVNKGTASASEILAGSLQDNERSILMGEQTYGKGLIQSLKSLGEDSGIAITVASYLTPKGNNIQGQGMTPDKLLDLPDANDYGSTDDKWVKNAELFLGSLLEKEEVSVQTIELNNEEIKS

SEQ ID NO: 12331 - protein, 215 aa, Vitis vinifera; identical to SEQ ID NO: 563

SEQ ID NO: 12332 - protein, 635 aa, Haemophilus somnus 129PT
MGKIIGIDLGTTNSCVAVMDGDKPRVIENAEGERTTPSIIAYTNDNETLVGQPAKRQAVTNPKNTLFAIKRLIGRRFEDQEVQRDVAIMPFEITKADNGDAWVSVKGEKMAPPQISAEVLKKMKKTAEDFLGETVTEAVITVPAYFNDAQRQATKDAGRIAGLEVKRIINEPTAAALAYGLDKGKGNQTIAVYDLGGGTFDLSIIEIDEVGGEKTFEVLATNGDTHLGGEDFDNRVINYLVDEFKKEQGVDLRNDPLAMQRLKEAGEKAKIELSSAQQTDVNLPYITADATGPKHLNIKLTRAKLEALVEDLVARSMEPVKVALSDAGLSVSEINDVILVGGQTRMPLVQQKVAEFFGKEPRRDVNPDEAVAIGAAVQGGVLAGDVKDVLLLDVTPLSLGIETMGGVMTTLIEKNTTIPTKKSQVFSTAEDNQSAVTIHVLQGERKQASANKSLGQFNLEGINPAPRGMPQIEVTFDIDADGIIHVSAKDKGTGKEQKITIKASSGLSDEEIQQMVRDAEANAEADRKFEELVQARNQADHLVHSTRKQLAEVGEKLSAEDKAPIESAVNELETAAKGEDKTEIDAKVQALIQVSEKLLQASQQQAQADAGAQQSQSTKGGDDVVDAEFEEVKDK

SEQ ID NO: 12333 - protein, 556 aa, Yersinia pestis KIM
MWSLKESMEIFFTILILILVVSLSGVVTRMLPFQVPLPLMQIVCGALLAWPNFGLHVNFDPELFLVLFIPPLLFADGWKTPTREFIHHGREILGLALALVLVTIVGIGYLIYWMVPGIPLVAAFALAAVLSPTDAVALSGIVGKGRIPKSIMGVLEGEALMNDASGLVALKFAIAVAMGTMIFTVSGATLEFLKVAIGGLLAGVAITWLYSKSLRIMSRWSGDDPATQIVLLLLLPFASYLVAEHLGVSGILAAVAAGMTISQSGIIRNAPLAMRLRADSVWSMLEFVFNGMVFILLGLQLPGILETSITQAELDPTIQTWNLFADVAIIYGALLLLRFGWLWSMKKISKRVLTKRPLQFSDYTTRELWVASFAGVRGAITLAGVLSIPLFLSDGSAFPSRYQLVFIATGVILLSVIIGVIALPPLLRGVVVADKSASREEIRLARAAMAEVAIVSLNKMEERLMTSSEENIDSELLKEVSSRVIGTLRRRTGSKDEVENTLLIENLERRFRLTALRAERGELYHLRATQKISNETLQKLLHDLDLLEALLIEKEG

SEQ ID NO: 12334 - protein, 503 aa, Prochlorococcus marinus subsp. marinus str. CCMP1375
MNYQLHELFKAVGIHRQIVGKDLIIDSISCDSRHISKGGLFFGLPGEKVDGGIFWRKALASGAVAAVIGEEAAQKDPPSNEDMVFVVSDPVAHWMGEMASVFWKRPSSQIDLIGVTGTNGKTTTTYLIEHLCKQSGITSALFGTLYNRWPKHSEVAIHTTAFGDVLQSQLAQAVAAGARLGVMEISSHALDQRRVAGCSFSGAVFTNLTQDHLDYHESMEAYFQSKALLFQAPLLRDKESCSVVNIDDPWGLRLSKQLNKSCWRASLEKRVIDSIQPELFLTDLNITNKGIEGVLHSPFGQGPFVSSLIGRFNLMNMLEAVGILIQHGVSLQELLPSIKSFSGVPGRMEQIKVEGDLPVVLVDYAHTPDGLKNALIALRSFGSGRLFCVFGCGGDRDRSKRPLMGAIASKFADHVTLTSDNPRTEDPQQILNDVLPGIATETELIIEIDRANAIQMAIMKALPGDIVLIAGKGHENYQILGLETIEFDDREIAKKILHLKLNP

SEQ ID NO: 12335 - protein, 240 aa, Saccharomyces cerevisiae YJM789
MSTFIFPGDSFPVDPTTPVKLGPGIYCDPNTQEIRPVNTGVLHVSAKGKSGVQTAYIDYSSKRYIPSVNDFVIGVIIGTFSDSYKVSLQNFSSSVSLSYMAFPNASKKNRPTLQVGDLVYARVCTAEKELEAEIECFDSTTGRDAGFGILEDGMIIDVNLNFARQLLFNNDFPLLKVLAAHTKFEVAIGLNGKIWVKCEELSNTLACYRTIMECCQKKDTAAFKDIAKRQFKEILTVKEE

SEQ ID NO: 12336 - protein, 546 aa, Arabidopsis thaliana
MTMFASLTSKMLSVSTSDHASVVSLNLFVALLCACIVIGHLLEENRWMNESITALLIGLGTGVVILLISRGKNSHLLVFSEDLFFIYLLPPIIFNAGFQVKKKQFFRNFVTIMAFGAIGTVVSCTIISLGAIQFFKKLDIGTFDLGDFLAIGAIFAATDSVCTLQVLNQDETPLLYSLVFGEGVVNDATSVVLFNAIQSFDLTHLNHEAAFQFLGNFFYLFLLSTGLGVATGLISAYVIKKLYFGRHSTDREVALMMLMAYLSYMLAELFALSGILTVFFCGIVMSHYTWHNVTESSRITTKHAFATLSFLAETFIFLYVGMDALDIEKWRFVSDSPGTSVAVSSILMGLVMLGRAAFVFPLSFLSNLAKKHQSEKISIKQQVVIWWAGLMRGAVSMALAYNKFTRSGHTELRGNAIMITSTITVCLFSTMVFGMLTKPLIRYLMPHQKATTSTTSMLSDDSTPKSIHIPLLDGEQLDSFELPGSHQDVPRPNSLRGFLMRPTRTVHYYWRQFDDAFMRPVFGGRGFVPFVPGSPTERSSHDLSKP

SEQ ID NO: 12337 - protein, 616 aa, Acholeplasma laidlawii
MNGVKTMAKTNKIIGIDLGTTNSVVSVMEGNEAKVIPNAEGGRTTPSIVAFKGDEILVGEVAKRQLITNPDTIYSIKRHMGDLNYKVKAAGKEFTPQQISAYILQNLKKTAEDYLGATVTEAVITVPAYFNDAQRQATKDAGTIAGLNVRRIINEPTASALAYGIDKTDKEQTILVFDLGGGTFDVSILHLADGTFEVVSTSGDNKLGGDDFDHKIYEFLAAEFNKEHGIDLLKDKMALQRLRDAAEKAKKELSGVTTSSISLPFITMGAAGPLHFEYNLTRAKFNELTKDLVDRTMVSVRRALADAKLTNSDINQILLVGGSTRIPAVQELVTKEFGKEPNRSVNPDEVVAMGAAIQGAVLAGDVKDVLLLDVTPLSLGIETLGGVATSLIERNTTIPTSKSQVFSTAADNQPAVDIHVLQGERPMAADNKTLGRFQLTDIPPARRGVPQIEVTFDIDANGIVSVKAKDLGTNKEQKITISGNGGLSKEEIDAMIKQAEENAEADNKRKESADARNEADSMIFQSRKAIEDLGAEVTDEEKETVENAIKDLEEALKGDDVEAIKAKNEALAKASQSIAMKAYEKANKSNGSDVNGATDADDNKDDAVEAEFTEKQ

SEQ ID NO: 12338 - protein, 437 aa, Vitis vinifera
MNHPLLPDWNIEGDVPVTNQKKPMGQEHELVELLWRNGQVVLHSQTQRKSGLAPNESKQVQKHDQTMLRNGGSCGNWSNLIQDEESISWIQYPLDDSLDKEFCSNLFMELPPNDPVQPEKPVRHSEQEKSVPSSQQPIFKHLGSPEFPGNPMPPPKFQVPGSGSGNMAQGGDAKEGSVMTVGLSHCGSNQVVNEADLSRFSSSGGDRRQTETLEPTVTSSSGGGSGSSFGRTYKQSTDTNSHKRKGREAEESECQSEAAEHESAARNKASQRSGSTRRSRAAEVHNLSERRRRDRINEKMKALQELIPHSNKSDKASMLDEAIEYLKSLQLQLQLMWMGGGVAPMMFPGVQHYMARMGMGMCPPPLPSIHNPMHLPRVQLVDQSTSAVPPSNQPPICQTPVLNPVNYQNQMPNPNFPEQFAHYMGFHPMQTPSQVSC

SEQ ID NO: 12339 - protein, 183 aa, Pseudomonas syringae pv. tomato str. DC3000
MKIRFVSIPLLLLSMSGAVMAADCPPLLQGELPKLRAKENIDLCKRFAGKPLVVVNTASFCGFAPQFKGLEELSQRYKGQGLEVLGLPSNDFKQEAKDGEETAKVCYVNYGVTFTMTEPQAVRGDDATHLFKVLAEQSSAPRWNFYKYVVDRQGKVVANFSSMTKPDDPELIAAIEKAIASKP

SEQ ID NO: 12340 - protein, 1064 aa, Synechococcus sp. CC9311
MSLLHATWLPAIRTPTSSGRAALLVWADTWRVAEPAGPSTTPALHPFTLSPDDLRALLTERDLLPDGIIDATACLTLPSRSVKPRKKRETETSSTEQPSWTGLPLQAGEPIPKQTEWWPWQVQGLAIDPMAATAWLSKLPLSGRHPDLADELRWWSHMQRWSLSLVARSRWLPQVELSKGEGYPHRARWVPLLNREEDRRRLEDLAAGLPLVATCALPWREPTGKRSNRITRLRPEAMRAANPVACCRPRSGRLRVATLLADLMDAQLRKGFTPDPDGLDPLLRAWEEALSSDTGEIQLSDEETERLATASNHWREGVAGNVAAARACLELATPADDEDLWPLRFFLQAEADPTLKLPAGAAWAAGPSGLQLGEIKVEHPSEVLLEGMGRALTVFQPIERGLDSATPESMQLTPAEAFVLVRTAVRQLRDVGVGVDLPPSLSGGLASRLGLAIKAELSERSRGFTLGENLDWSWELMIGGVTLTLRELERLAGKRSPLVRHKGAWIELRPNDLKNAERFCAANPDLSLDDALRLTATEGDTMMRLPVHQFDAGPRLQAVLEQYHQQKAPDPLPAPEGFSGQLRPYQERGLGWLAFLHRFDQGACLADDMGLGKTIQLLAFLQHLKAENELKRSVLLIAPTSVLTNWKREATAFTPELKVHEHYGPKRPSTPAALKKALKDVDLVLTSYGLLQRDSELLESHDWQGLVIDEAQAIKNPSAKQSQAARDLARPKKNSRFRIALTGTPVENRVSELWALMDFLNPRVLGEEEFFRHRYRMPIERYGDLSSLRDLKARVGPFILRRLKTDKAIISDLPEKVELSEWVGLSKEQKSLYAKTVEDTLDAIARAPRGKRHGQVLGLLTKLKQICNHPALALKEQGASEDFLKRSVKLQRLEEILDEVVEAGDRALLFTQFAEWGKLLQDYLQRRWRSEVPFLSGSTSKSERQAMVDRFQEDPRGPQLFLLSLKAGGVGLNLTRASHVFHIDRWWNPAVENQATDRAYRIGQTNRVMVHKFITSGSVEEKIDRMIREKSRLAEDIIGSGEDWLGGLEMGQLKELVSLEDNQA

SEQ ID NO: 12341 - protein, 205 aa, Kluyveromyces lactis NRRL Y-1140; identical to SEQ ID NO: 572

SEQ ID NO: 12342 - protein, 686 aa, Ashbya gossypii ATCC 10895
MDHLNPPLSQGVGYAIVVGLGAVFAIGMVMTTYIFERYQREVITAEEFATARRTVKTGLIASAVVSSWTWQPRYCQSTTMAYKVGVSGPFYYAAGACVQIILFSTLAIKCKQRAPNAHTFLEIIKARYGRKAHILHMCYALVTNVLVTTMLLTGGSAVVSELTGMHTAAACFLLPVGVIIYTLFGGIKATFLTDYVHTVIIVGIILTFTFSVYRTSDMLGSASKVYDLLREAARQHPVKGNRNGEYLTMKSESGGIFFVVSLVGNFGTVLLDNGYFTKAFSSSPAAALPGYVVGGIVWFAIPCLVATSLGLACLALELLPSFPNYPSRLSQEQVDAGLVLPVAAFNLLGKGGAMAALLMVFMAVTSAMSAELIAVSTIFTYDIYRGYVNPDAPGKRLIVTSHAACVVFGVAMSAVSVGLYYAGISLGYLYEVMGIIISSAVIPSALTLFWSKQNIYAVTIAPLVGTTLAVTSWLVCAKVLYGSITVENTYKDYPMLTGNLVALLSPALLIPLLTYSLGADSYDWIAMKTDILRVDETDELLDADKGLAMVVTRELFESSSVPSAIEKEEINHTTEPNLQREMTNGLEEERILKRASRLATILCAIFILSFLVLWPVPMYGTGYIFSKGFFTGWVSVLTLWLFCTGFAVCIYPLWEGRHGLFTTVRGIYWDCTGQKAKLRDWQCSQI

SEQ ID NO: 12343 - protein, 91 aa, Brassica napus
  misc_feature (30)..(30): Xaa can be any naturally occurring amino acid
IVPHCAQISKGSVTHACPSVHTHSSGVTAXTLCSTEGPDVDFNPPVTPIDDSKSSGPFKFYNAEIHSAALCLPSFAKKVIDSPTQLKMGKK

SEQ ID NO: 12344 - protein, 147 aa, Lotus japonicus
MGFTAQQEALVGSSYETFKKNLPTNSVLFYTVILEIAPTAKDMFSFLKESGPKHSPQLQAHAEKVFALTRDAATQLVAKGEVTLADASLGAVHVQKAVTDPHFVVVKEALLQTVKEAVGADEWSDDLSTAWEGAYDGLATAIKKAMG

SEQ ID NO: 12345 - protein, 188 aa, Stangeria eriopus; identical to SEQ ID NO: 8924

SEQ ID NO: 12346 - protein, 212 aa, Macaranga praestans
  misc_feature (18)..(18): Xaa can be any naturally occurring amino acid
  misc_feature (79)..(79): Xaa can be any naturally occurring amino acid
  misc_feature (194)..(194): Xaa can be any naturally occurring amino acid
IPQASRFLFMKNKVRMIXDCLAPPVKVIQDKSLAQPLSLCGSILRSPYGCHAQYMANMGSIASLVMSVTINEDGDEMDXNQQKGRKLWGLVVCHHTSSRFVSFPLRYACEFLIQVFGVQINKEVDLAAQIREKHVLQTQTVLCDMLLRDAPAAIITQSPNVMDLVKCDGAALYYRKKFWLLGITPTEAQIRDIXEWLLGDHSESTGLSTDSL

SEQ ID NO: 12347 - protein, 644 aa, Cryptococcus neoformans var. neoformans B-3501A
MTKAIGIDLGTTYSCVAVWQNDRVEIIANDQGNRTTPSYVAFNDSERLIGDAAKNQVAMNPYNTVFDAKRLIGRKFNDAEVQADMKHWPFKVVEKGGKPVIKVEYKGEEKTFTPEEISSMVLTKMKETAEAYLGGTVSKAVVTVPAYFNDSQRQATKDAGAIAGLDVLRIINEPTAAAIAYGLDKKSEGEKNVLIFDLGGGTFDVSLLTIEEGIFEVKATAGDTHLGGEDFDNRLVNHFVQEFKRKNKKDLSSNARALRRLRTACERAKRTLSSAAQTTIEIDSLFDGIDFYTSITRARFEELCQDLFRSTMDPVEKVLRDSKIDKSSVNEIVLVGGSTRIPKIQKLVSDMFSGREPNRSINPDEAVAYGAAVQAAILTGDTSEATQDLLLLDVAPLSMGIETAGGIMTPLIKRNTTVPTKKSEVFSTYSDNQPGVLIQVFEGERAKTKDCNLLGKFELSGIPPAPRGVPQIEVSFDIDANGILNVNAADKSTGKTSKITITNDKGRLSKEEIERMLAEAERFKAEDEAAAATVQAKNGLESYAYSLKTTLSDNKDKFDSADHETLSKKVEEVINALDTMQSASKEEFESLQKELEGIANPIMTKFYGASGGMPGGAGAPGGFPGGGAGGGAAQEEGPSVEEVD

SEQ ID NO: 12348 - protein, 206 aa, Macaranga puncticulata
DIPQASRFLFMKNKVRMICDCLAPPVTVIQDKSLAQPLSLCGSMLRSPHGCHAQYMANMGSIASLVMSVTINEDGDEMDDDQQKGRKLWGLVVCHHTSSRFVSFPLRYACEFLIQVFGVQINKEVDLAAQMREKHVLQTQTVLCDMLLRDAPAAIITQSPNVMDLVKCDGAALYYRKKFWLLGVTPTEAQIRDIAEWLLDYHSEST

SEQ ID NO: 12349 - protein, 178 aa, Nicotiana tabacum
QQQLADIPEDAFGSDETKSEKITESEKGHSYVSQSAIALRYRVMPPPCIRNPYLRDASEIDVDPFGNRRSKCAGFNPVIFGNDGLSRYRSDFHEIEQIGTGNFSRVFKVLKRIDGCMYAVKHSTKQLHQDTDRRKALMEVQALAALGPHENVVGYYSSWFENEHLYIQMELCDHSLSN

SEQ ID NO: 12350 - protein, 378 aa, Listeria monocytogenes str. 1/2a F6854
MEESPQNEPNKVEKDEEQKSKPGNGYIKMKLFPFIMLLFAFVFVTALVTTIVMSLGDDKQVKVSIPERKEFTKLYDVYDEITSKYYKDTNSTTMIDGAISGMVNSLDDPYSTFMSKKESSEFNDTISASFEGIGAEIQEKDGAIVIVSPIKNSPAEKAGLRPQDIITQVDGKSVKGDTATEATQKIRGEKGTKVTLTIQRSNEDKPFDVTITRDEIPIETVYKEMGSDKIAHVTISTFSETTYDELEKALKSLEKDGMKGLVLDLRGNPGGLLDQAVSISSLFVPDGKIVVQEQDKDGDKSAIKADSSSHGDYKVKVPTTMLIDGGSASASEILAAAAKESGGIKLVGTKSFGKGTVQTATTLSDDSTLKLTVAKWLT

SEQ ID NO: 12351 - protein, 399 aa, Oryza sativa
MYGSPVSKDLNLPVQPPAMSSSGLLRYRSAPSTLLAEFCDDFLPPAAAPRAASPDADNVFSRFLADHQIRDKSPPATAAAAAAAAHFPDDPTMATQHHHQQQMMFQHHPQQMASVEGLYRTVSSTGIDAATAAANAAGGGGGGLLRQSSSPAGFLNHLNMDNGYGSMLRAGMAAAGGGVGFRNGANAAAAADSPGGSGGRLKGQLSFSSRQGSLMSQISEMDSEELGGSSPEGAGGGGGGGGRGYLSGYPMSSGWEESSLMSDTNISGVKRQRDSSEPSQNGGGGGGLAHQFSLPKTSSEMAAIEKFLQFQDAVPCKIRAKRGCATHPRSIAERVRRTRISERIRKLQELVPNMDKQTNTADMLDLAVDYIKDLQKQVKGLNDSRANCTCSAKHQQYSG

SEQ ID NO: 12352 - protein, 536 aa, Oryza sativa
GMGMEVAAARLGALYTTSDYASVVSINLFVALLCACIVLGHLLEENRWVNESITALIIGLCTGVVILLMTKGKSSHLFVFSEDLFFIYLLPPIIFNAGFQVKKKQFFRNFMTITLFGAVGTMISFFTISIAAIAIFSRMNIGTLDVGDFLAIGAIFSATDSVCTLQVLNQDETPFLYSLVFGEGVVNDATSIVLFNALQNFDLVHIDAAVVLKFLGNFFYLFLSSTFLGVFAGLLSAYIIKKLYIGRHSTDREVALMMLMAYLSYMLAELLDLSGILTVFFCGIVMSHYTWHNVTESSRVTTKHAFATLSFIAETFLFLYVGMDALDIEKWEFASDRPGKSIGISSILLGLVLIGRAAFVFPLSFLSNLTKKAPNEKITWRQQVVIWWAGLMRGAVSIALAYNKFTRSGHTQLHGNAIMITSTITVVLFSTMVFGMMTKPLIRLLLPASGHPVTSEPSSPKSLHSPLLTSMQGSDLESTTNIVRPSSLRMLLTKPTHTVHYYWRKFDDALMRPMFGGRGFVPFSPGSPTEQSHGGR

SEQ ID NO: 12353 - protein, 155 aa, Physcomitrella patens subsp. patens
MDTAGSRPKDDVSLPKATMTKIIKEMLPPDVRVAKDAQDLLVECCVEFINLISSESNEICSKDEKRTIAPEHVLRALEILGFGEYIGEVQAAYEQHKNESLESPKVGGRWAKEGGGGGMTEEEAIAAQQRMFAEARARMNSGGAAAPAAQANDSD

SEQ ID NO: 12354 - protein, 673 aa, Vibrio fischeri ES114
MNCRFRVSLIAAGVMLAASAHALEAKVLDAKFSETDLPVLAAETQHATASKRVTSRFTRSHYKHFSLDDDFSVAIYERYLDMLDYNRNVFIQADLASFAPLSTQLDDQLKVGDTKAAFDIYNLSLKRRFERYVYALSLLDKEFDYTVDESIELDRSEAAWPKDEAELNELWRKRVKYDALNLSMAGKDWPEIQEMLGKRYNNALKRLTQSHNEDAFQLYINAFAREVDPHTSYLSPRNAEQFQSEMNLSLEGIGAVLQATDDYTVIRSLVAGGPALTSKKLSEGDRIIGVGQEGEKIVDVIGWRLDDVVQLIKGPKGTKVKLEILPEGKDSKSHTVTIVRDKIRLEDRAVKSEVIEQNGKKIGVLEVPSFYVGLAEDTKKEIAELKEKDISGIIVDLRNNGGGALTEATALSGLFITAGPVVQVRDSYGRVNVNADTDGEISYTGPMTVLVNRYSASASEIFAAAMQDYGRAVILGENSFGKGTVQQHRSLNHIYDLFDKPLGHVQYTIQKFYRINGGSTQNLGVVPDIAFPTAIDPKDTGESVEDNALPWDSIKAADYAKTNQIAETIEPLAKKHVERIKTDEEFGFIQEDIARYKAEKDITSISLNKKVREKESDDADARRLTRVNERQKLLGKEEFKTLDDIPKDYEVPDAYLDEAVSITIDLALMNQKK

SEQ ID NO: 12355 - protein, 468 aa, Ustilago maydis 521; identical to SEQ ID NO: 586

SEQ ID NO: 12356 - protein, 551 aa, Salinibacter ruber DSM 13855
MRRSRANVSLLGMALAVSMGMGVLVGFWAPDDDLFELRKGLRIFGAVYEEVVTGYVEPVDPGHLVRVGVDAMLEELDPYTTYVDESENARIAIITEGQYGGVGLDIGRRNGALTVVAPVAGGDAYQQGVRTGDVITEVADQPAASLSVEDVEALLRGQPGTTVPVTVERAGRPSPLTLTLTRERVELPDVTYQGRVGAERELGYVKLERFTRDAPGAVEAALDDLRDTGPLQGVVLDLRDNPGGLLRAAVRITALFVPQGTEVVSTRGRDDDETESYTTDRVPLLPETPVVVLVNGQSASASEIVAGALQDHDRGVVMGTTTYGKGLVQNVRSLPHNTALKLTTAQYYTPSGRTIQRLDANPTDTTAPPSRVHETTGGRTVRDGHGIRPDVRVASPSPSPLEQALTRRGAFFRYANHYAATHDTLAADFSVDESDLGAFRTWLDREDVAYSLRAERTLDSLRAQAEAHNYEGLRDETAALDAALDEAKAAAFDRHAPALMRHLRREILARYVSASRRIEALLPADGQVTAATDLLQTPDRYERLLTPEGRR

SEQ ID NO: 12357 - protein, 312 aa, Eurotium rubrum
HHGKKAIQFGGGNIGRGFVAAFLHDAGYEVVVIDVMDNVINSLQKSSSYQVTEVSEQGEDTKTVSNYRAINSKTHESDVVKEVATADVVTCADGPNVLKFIAPVIAKGIDARTESKPVAVIACENAIGATDTLHGYIKEHTNDSRVKSLGERAQFANSAIDRIVPNQPADSGLNVRIEKFYEWVVEKSPFGSVGHPDISAIHWVDNLEPYIERKLYTVNTGHATTAYYGYQSGKKMIADSLADEKIRGIVHNVLAETAALIVDKHGISEQEQKKYVDTIVGRISNPYLEDQVERVGRAPVRKLSRKERFIGP

SEQ ID NO: 12358 - protein, 191 aa, Gemmata obscuriglobus UQM 2246
MKALLVAAVAAVAGFALVGHAEDKKVSPLDYKMKDIDGKDVELSKYKGKVVLFVNVASKCGLTPQYNALQALHEKYEKEGLVLIGVPANEFGAQEPGTDTEIKKFCSTEYKVTFPMLAKVAVKGDKQVPLYKTLVEATPNKEGKIEPVSWNFEKFLVGRDGTVVARFKPQTKPDAPEITKAIETELAKKVK

SEQ ID NO: 12359 - protein, 98 aa, Zea mays
MGLGVVAELVRLGVLSSTSDHASVVSINLFVALLCACIVLGHLLEENRWVNESITALIIGLCTGVVILLTTKGKSSHILVFSEDLFFIYLLPPIIFNA

SEQ ID NO: 12360 - protein, 163 aa, Saccharomyces cerevisiae
MSEFYKLAPVDKKGQPFPFDQLKGKVVLIVNVASKCGFTPQYKELEALYKRYKDEGFTIIGFPCNQFGHQEPGSDEEIAQFCQLNYGVTFPIMKKIDVNGGNEDPVYKFLKSQKSGMLGLRGIKWNFEKFLVDKKGKVYERYSSLTKPSSLSETIEELLKEVE

SEQ ID NO: 12361 - protein, 456 aa, Synechococcus sp. WH 5701
MLNNSLMVLAEVATPNAQTNVLDLPLQAHLLFIGILFLGTLAISRFSPKIGIPAILGVLLLGLSINVNILEITHEQASNFQLLGLALLLFYAGLKTDLAAIRGFLEYGVVLAVGGVVVSSLILGGLIWFLGSPSAQVLSVGIETIPLGAAMLIAACLGSTDAGATLSVLRSVRDKVPLRLQHLLEFESSVNDPSALLFYGLVVGIFVVSSTAGVGPSLESTVVTQVKIFFQQIGAGLVVGFVFGYLARFVINDLVEERSQLLVVAMSVAFVVYGSATLLGGSGFIAVYVTGLFLTNTRYRSPEINHVTIQEVLLPFNTMTEITIFLIFGLLVYPPDLVDALPIGLLSALGLMFVARPISVLILQPLSPFSFKESLLVSWCGLRGAVPLALSHDLSLAIPRIRGIDPAIIGEISKNAESIIFIVVVVNLFVQGVSLPYLARTLGLKPDIHLDSGLAT

SEQ ID NO: 12362 - protein, 950 aa, Zea mays
  misc_feature (42)..(42): Xaa can be any naturally occurring amino acid
LLDLQKKVRSDISAEYWLQKKCAYPERQLFDWGMMRIRHPFXMYGIGDSFSVDVDDVHRRKRFTERMSRLEEEEKNQADIRKRKFFAEILNASREHQVQLGTTFKQRKQRNDGVMAWHVRARQRISRQEKNRINLLKTGDQEAYMRMVEESKNERLKMLLDKTNELLEGIGKAVQRQKDAEHVSKPEGGSEVPKGSESEDCSQISGIKSESAEESTSDDDGDLPGPADESKFNAGRRLDVTVHSIEEKVTEQPSALEGGELRPYQLEGLQWMLSLFNNNLNGILADEMGLGKTIQTIALIAYLLEKKEVAGPHLIIAPKAVLPNWSNEFKTWAPSIGTILYDGRPEERRLLRDKNFDGEQFNVLLTHYDLILKDKKFLKKVHWHYLIVDEGHRLKNHECALARTLVSGYMIRRRLLLTGTPIQNSLQELWSLLNFILPNIFNSSQNFEEWFNAPFACDVSLNDEEQLLIIHRLHQVLRPFLLRRKKDEVEKYLPVKTQVILKCDMSAWQKAYYEQVTSREKVALGYGIRKKALQNLSMQLRKCCNHPYLFVEHYNMYQREEIVRASGKFELLDRLLPKLQRAGHRVLLFSQMTKLLDILEVYLQMYNFKYMRLDGSTKTEERGRLLADFNKKNSEYFMFLLSTRAGGLGLNLQTADTVIIFDSDWNPQMDQQAEDRAHRIGQKNEVRVFVLVSVGSIEEEILDRAKQKMGIDAKVIQAGLFNTTSTAQDRRALLQEILRRGTSSLGTDIPSEREINRLAARNDEEFRLFEKMDEERRLRENYKSRLMDGNEVPNWVFANDNETLRKKTVADEFRNIIVGSKRRRKEVVYSDSFGDQWMKSDEGFEEIAKMTPRVKRTAYSPDIQVEYNERRKRPKSVENSADGASNPTRTPDKGRAGVSSYSKDETEDDGEDEVITSGLQKGNSFTWKTLGRKRSSHLSSSSDSKGRPPF

SEQ ID NO: 12363 - protein, 180 aa, Zea mays
MADHHHHHHHGHPPDGPGGAGDQLEVIKEQDRLLPIANVGRIMKQILPPNAKISKEAKETMQECVSEFISFVTGEASDKCHKEKRKTVNGDDVCCAFGALGFDDYVDPMRRYLHKYRELEGDRAASSRGGGGGGPAGAGDPASASAAAGPSPSAASAGHFMFGAAMDRPDNNSSAGARPF

SEQ ID NO: 12364 - protein, 193 aa, Streptomyces coelicolor A3(2)
MRARPRDPGKIQTAPPSILCMTSAPNTRNDDNLPLDVEIGALQGGAADLSQYAGRVVLVVNVASKCGLTPQYAGLERLHERYAEQGFTVLGVPCNQFMGQEPGSADEIAEFCSATYGVTFPMTGKAEVNGEGRHPLYDRLTGFADAEGHSGDIRWNFEKFLIGRDGKVAARFSPQTEPEAAEVVAAVEERLAG

SEQ ID NO: 12365 - protein, 427 aa, Prochlorococcus marinus str. MIT 9312
MNSSFNKLLTFKTLITALMIIVIYTNFLLIERVDALSDSKQLVLDAWTLVNEGFYDPDKFDEIQWKRIRQKTLQKQIETSEEAYSAIEDMLRPLEDPYTRILRPKDYELLKSSNFGSEINGVGLQLGEDDDSKKVKVISTLGGSPAEEAGIVSGEFIEKVDGISSEVLGLANTASKLRGESGTKVLVQISSEAGEIREVDLERRSVDLRPVRTKRLRDDSHTIGYLRITQFSESVPKKVEEALQELKEKEVEGLILDLRNNSGGLVSSGIAVADSLLSERPVVETKNRNGIKDAIISQKETFFDGPMVTLVNKGTASASEILAGSLQDNSRSILMGEQTYGKGLIQSLKSLGEDSGIAITVASYLTPKGNNIQGQGMKPDKLLDLPDATEYGSADDKWVKNAELFLDSLLEKEEVSSQTSELSNEEV

SEQ ID NO: 12366 - protein, 344 aa, Glycine max
QLRRPPPNDDVSDLTRVHTKDEKNDHTLVVHGLADACRFVCNDAKFLSRGIMRMDARARQDVAFLGTEFLKLDARAREDTEKIDRDVKEKASRLSHIATILKDKAQSRLKNAADEHWNDGALETDLRLADFRAKQRAMEDPLMALELIKNIHNRMVSKMYNFPLRRDKGSLSENNVRGRIMLEKNGKTTNSFPGDVTTERIAALQEAYWSMASALSEADGIDYTDPEELELLVRTLIDLDAMDGKQSVSLLAECSSSPDVSTRRALANALAAAPSMWTLGNAGMGALQRLAEDSNPAIAAAASKAIYELKKQWEIEEGDSWRFMMDENTMEEKGSIESDNEDTK

SEQ ID NO: 12367 - protein, 275 aa, Bacillus clausii KSM-K16
MEFWFTEKQTERFGITMKIKRTLHTEKTDFQQLDMVETEEFGNMLLLDGMVMTTEKDEFVYHEMVTHVPLFTHPNPKHVLVVGGGDGGAIREILKHPSVEKATLVDIDGKVIEYSKTYLPTIACALEDERVDVKVADGFMHIAQSANEYDVIMVDSTEPVGPAAKLFERGFYEGISKALKEDGIFVAQTDNPWFHQELVSNVYKDVKEIFPITRLYTANIPTYPSGMWTFTIGSKKHDPLAVEATRFHDVQTKYYTPDIHRAAFVLPKFVQDLLK

SEQ ID NO: 12368 - protein, 1100 aa, Glycine max; identical to SEQ ID NO: 8953

SEQ ID NO: 12369 - protein, 340 aa, Solanum dulcamara
MEVISNHTNGSVITINGHHHTNGKSDHRNGGVTAHDNGNKLSLGSYNSIKPGWFSEFSALWPGEAFSVKIEKLLFQGKSDYQDVMLFESATYGKVLTLDGAIQHTENGGFSYTEMIVHLPLGSIPTPKKVLIIGGGIGFTLFEVLRYSTIEKIDIVEIDDVVVDVSRKFFPYLAANFNDPRVTLVLDDGAAFVKAAQAGYYDAIIVDSSDPIGPAKDLFERPFFEAVAKALRPGGVVCTQAESIWLHMHIIKQIIANCRQVFKGSVNYAWTTVPTYPTGVIGYMLCSTEGPEVDFKNPINPIDKDSTHVKSKLGPLKFYNSDIHKAAFILPSFARSLIES

SEQ ID NO: 12370 - protein, 1036 aa, Glycine max; identical to SEQ ID NO: 8954

SEQ ID NO: 12371 - protein, 158 aa, Geobacillus kaustophilus HTA426
MSVYEFSVKTIRGEEQPLSAYRGKVLLIVNTASRCGFTPQYKELQELYDEYRDRGFVVLGFPCNQFGGQEPGTEAEIEQFCQLNYGVTFPLFAKVDVNGDHAHPLFQYLKEEAPGALGTKAIKWNFTKFLVDRHGRVVARFAPQTKPSELKEDIEKLL

SEQ ID NO: 12372 - protein, 531 aa, unidentified eubacterium SCB49
MKFKREYIPLLIGLAMAGGIYLGSKLNFNDTGEQLFATNSKKDKLNRLIDYIDYEYVDDINTDSIVDVTVNEILENLDPHSVYIPESEYEDTADDMRGNFTGIGVSFHVYKDTIAVIRAIEGGPAVKAGVKEGDRILKADDRELFGNAMSRDSIPEYLKGEKGSKVTLQIYRPSEDQVIDLTLRRDDVPLISVDAAYAINDEIGYIKLNRFAETSYDEFKVALHELNDKEIATLILDLRGNPGGYIATAEKILDEFLEDDTLLLITKNKKGEEDKTYATGRGDFEGHKVYVLIDENSASASEIVAGALQDNDKGIIVGRRSFGKGLVQREMSLGDGSAVRLTIARYYTPSGRSIQRSYEEGNEAYFKEYETRYHNGELLDADNIVVSDSLVYKTVKGRTVYGGGGITPDIFVPKDTTREHETIDFISRSGSMSFYVFTLIDKNRKELNALSFEDFSKTFNPTTEDVQGYIDYIWDLSSVRLNLEASSSELKLALKAAVAEQLFGPEEKEILNNLQDPMILKVLEIEEKNKE

SEQ ID NO: 12373 - protein, 1100 aa, Glycine max; identical to SEQ ID NO: 8955

SEQ ID NO: 12374 - protein, 469 aa, Methylobacillus flagellatus KT
MAVADVLKLVKENDIKFVDFRFTDTKGKEQHVTVPISAFDEDKFTEGHAFDGSSIAGWKGIQASDMLLIPDPNTANIDPFMDEPTLFLTCDVVDPTDGKGYDRCPRSIAKRAEAYLKSSGIGDAAFFGPEPEFFIFDSINWSVDMSGSSVKINSEEAAWASNEKFEGGNTGHRPGVKGGYFPVPPIDSLHDIRSAMVVALEELGVPVEVHHHEVATAGQCEIGTKFSTLVQRADWTQILKYVVLNTAHAYGKTATFMPKPISGDNGSGMHVHQSVWKDGKNLFAGNGYAGLSEFALYYIGGIIKHARALNAITNPGTNSYKRLVPGFEAPVKLAYSAKNRSASIRVPFVQSDKARRIEARFPDPTANPYLAFSALLMAGLDGVQNKIHPGEPATKDLYHLPPEEDAAIPTVASSLEQALEALDKDREFLTRGGVFSDDWISAYIDLKMEEVTKLRQTPHPIEFSMYYSV

SEQ ID NO: 12375 - protein, 692 aa, Kluyveromyces lactis NRRL Y-1140
MEPVFSQGVGYGVVIGVGLFFAVVMNIVTYLQNRFFSNKSSQADEFTAASRNVPLGLMVVSIVSSWCWSLTLLQSATESYNYGISGSYFYAVGGLIQVSVFSIVASKVKANANLVTTFPEAGYLRFGNAGHLAFLWCGMVCNTIVSACILLGGAAVINAITGMNTYAALYLLPLVCAIYVYFGGLRATFISDALHTFPLLVFLIIFVFVIYGGGSSIIGSPGKMWDLLTEVANKNPVSDNYHGSFLTFRSKDGGIFLFISIITGFGLVVLDQAYWSRAIAAQPLKTSKAYFIGAVSWFVIPWTMGLCLGLAARATSILPGFPPLSDSEISSGLSAVAGASHLVGHAGTGMILLMIFLSVTSSFSGELIATSTLLSYDVYKKYIKQNATPHEVLLVSKIGVFFWAIFAGSIASIFHRIGISMGWLFNFLGCATASGVFPVALTFTWNRLNRWGAVSGSIGGMILAIIVWLVTCKCYLGEINVDNLANRWVSFAGNATALFMGGILSIGLSLIWPDDFDWNSIRNKTILTEHLDSDSSSSAAPSIVQEENSNEKELYEVKGGEPLNETFTHERDLDLPQEEEIPLAKLKRQFKVFSILSISFALTFAILIPVPQIAAPYVYSKKFFTFVIAVNIIWLFGTFFVCVILPLFESRRFLKKLFLHITGIKKGHFGPEPEPAVVETAVDESYVDVEKR

SEQ ID NO: 12376 - protein, 867 aa, Glycine max; identical to SEQ ID NO: 8958

SEQ ID NO: 12377 - protein, 77 aa, Arabidopsis thaliana
MVDLERTITNTTSKRLADRKIEKFDKNILKRGFVPETTTKKGKDYPVGPILLGFFVFVVIGSSLFQIIRTATSGGMA

SEQ ID NO: 12378 - protein, 204 aa, Oryza sativa
METDRSQPAPIDPRRARFPCCIVWTPLPLISWLIPFIGHIGICREDGVILDFAGPNFVSVDNFAFGAVARYIQVNSDECYKLLEPEGASTWDDALRKGVQEFQHRGYSLFTCNCHSFVVNNLNRLFYSGHDKWNVVSLAAVMFLRGRWVSTASVVKTFFPFALVITIGTLLGGATFLIGLLAFAAVMTGWFLVGTYCIKSLVEL

SEQ ID NO: 12379 - protein, 510 aa, Hordeum vulgare subsp. vulgare
MGSLHVSGSTTTQHSRVQRAYQLLFFHVHPFWPQLLYFVSISFFGFVMLRALPMKTNMPTDLDLIFTSVSATTVSSMQAVEMESFSNPQLLLLTLLMLLGGEVFTSMLGMYFTYVKSKKKEAQAPHDDGAKVKPAPSSLELTAASICMDDGTAQDRMEQGFKDQPRYGRAFLTRLLLFIVVGYHAVVHPAGYSLMLVYLSVVSGARTVLAGKGISMHTFSVFTIVSTFANCGFMPNNEGMASFRSFPGLLLLVMPHVLLGNTLFPVFLRLAIWALQRFTKRPELGELRSIGYDHLLTSRHTRFLAFTVAVFVLAQLSLFCAMEWGSDGLRGLTAAQKLVAALFMSVNSRHAGEMVVDLSTVSSAVVVVYMVMMYLPPYTTFLPVEDSNQQVGTDQKRTSIWHKLLMSPLSCIAIFVVVVCITERRQISDDPLNFNVLSIAVEVISAYGNVGFSTGYSCGRQVTPDGSCRDAWVGFSGKWSREGKLALIAVMFYGRLKKFSMHGGQAWRIV

SEQ ID NO: 12380 - protein, 1129 aa, Avena sativa; identical to SEQ ID NO: 8970

SEQ ID NO: 12381 - protein, 161 aa, Pseudomonas aeruginosa UCBPP-PA14
MSDSLLSIPCTTIKGEQKTLADFGGKALLVVNTASKCGFTPQYQGLEALWEKYRERGLVVLGFPCNQFGKQEPGDEGEISQFCELNYGVSFPLFRKIEVNGAGAHPLFVSLKKRALGLLGSQGIKWNFTKFLIGRDGQVVKRYAPTTKPEELSSAIEALLE

SEQ ID NO: 12382 - protein, 527 aa, Microcoleus chthonoplastes PCC 7420
MSVESAISEAAIEQNLEQFLLVLSVSLSVATVSRIFPLFRKIPYTLLLVIVGLGLAFVDVRLVNLSPELILEIFLPPLLFEAAWNIRWRDLRRDLIPVILFAVVGVIISVLGIAFTITQFTELPLAIALLVGASLAATDPVSVIALFRELGADKRLKTLMEGESLFNDGVAVVAFLLLVGIPLGTQEFSLSTTVAQFFTFVGIGIGVGCLIGFGISFLTQRFDLPFVEQSLTLVSAYGTYLITEELGGSGVIGVVTVGLVLGNFGSRIGMNPRTRLIVSEFWDFLAFFVNSIVFLLIGDQIDFPRLGQNLGLIGVAIGAVLFTRAISIYGLATISNGLVKSDIGWRQQTVLWWGGLRGSVSIALALSVPVTLEGRQDIIVTVFGVVLFTLLVEGLTTQFLLEKLDLIGDQPVRQKYSEATARRVALNRVKDYLESATTNNEMNSEFCQYQIKLVDGQLESIHTELDQLLHHHPQLQNLDMEQLQERMVDIEADTYAEFIRAGRLTENLSPLLQEALIEADEKLIESD

SEQ ID NO: 12383 - protein, 161 aa, Arabidopsis thaliana; identical to SEQ ID NO: 627

SEQ ID NO: 12384 - protein, 461 aa, Nocardioides sp. JS614
MLEMTLGKIAKVVGGTVAGDPDIVVDAPAYVDSRQAVPGGLFVAVVGEHVDGHDYAAGAHAVLGSRPTEAPTIVVRDPIPALGKLAAYVVRRLDATVLAVTGSQGKTGTKDYLARILSAAGSTVATSGSFNNELGLPLTVLRAHPETRYLVLEMGARRIGHIKHLCEIAPPDVAAVLNVGTAHIGEFGSRDSIAFAKGEIVAALQPEGTAVLNAGDPLVAEMTSRTRARVLTWGPDDADVSERGSEVDDLGRPSFEIGYDDEWYPVRLQQSGLHQAQNALAAATMALAVGIPLADIAAGLSAATASSPMRMEVHERADGLIVVNDAYNANPASVVAALESLAVIGRRRHRRTVAVLGEMLELGRESFDGHVRVGRAAARLGTDIVVVVGAAAGGIVEGLEAVAAWRGDGVVAEEVEEALEWVRENVLSGDVVLVKASHGVALWEVADALLDTDPEGDRTEP

SEQ ID NO: 12385 - protein, 159 aa, marine gamma proteobacterium HTCC2080
MTTAYDFQASAANGDNINLDDYRGRVLLIVNTASKCGFTPQYEGLEALQAQYHDKGFDVLAFPCNQFGGQEPGSEEEIVEFCTTRFSSTFPIFAKIEVNGADTHPLYGWLKGQAKGIMGTERIKWNFTKFLINTDGKVAKRYGSQTKPAAIAKDIEQLL

SEQ ID NO: 12386 - protein, 504 aa, Nocardioides sp. JS614
MVSDSNRPAQPPRTPLATVAAWAGAELRGNPAGLEVSGISLSSQRIRPGDLYAALPGSRAHGIEFAQDALAAGAVAVFTDEAGADRGPAGAPHLVVDRPRAVLGRLSARIYGEPAASMRMVGVTGTQGKTTTTRLLEAGLQQAGVPAAVVGTVGTRIAGEEVRSSLTTPEAPDLHALFAVMRERDVRACAMEVSSHALVMGRVDGVVFDVAVFLNLGRDHLDFHRDLEDYYAAKASLFTPERARFALVNVDDAHGRRLAEEATVPVRTFSMGRGDDAQRADWRAVDVRLRATGSEFVVVAPDGRRIPAGCALPGDFNVANTLAAVAAAAEAGLDPAVVAAGIAAAGGVPGRLERVDAGQDFLVVVDYAHKPDAVEAAIRTLRPLTEGRVIVVLGAGGDRDPGKRPIMAGIAARLADLLVVTDDNPRTEDPAAIRAAMLAGVVTGQAIEVGGRRAAIREALRRAGPGDIVLIAGKGHETGQEVDGVVHPFDDREVVREEIVACSR

SEQ ID NO: 12387 - protein, 180 aa, Zea mays
MADAPASPGGGGGSHESGSPRGGGGGGGGSVREQDRFLPIANISRIMKKAIPANGKIAKDAKETVQECVSEFISFITSEASDKCQREKRKTINGDDLLWAMATLGFEDYIEPLKVYLQKYREMEGDSKLTSKSSDGSIKKDALGHVGASSSAVQGMGQQGTYNQGMGYMQPQYHNGDISN

SEQ ID NO: 12388 - protein, 212 aa, Hydrangea macrophylla
MGRGKIEIKRIENTSNRQVTYSKRRNGILKKAKEITVLCDASVSLIVSASSGKMHEYCSPKTTLIDILDKYHTQSGKRLWDAKHENLSNEIDRIKKENDNMQIELRHLKGEDVTSLNHKELMALELALENGLASIRDRKDEVFETIKKNVKIQALEDDNKRLIYELHQQEMNMECNVREMENGYQRVGDYQSHQMPFAFRVQPIQPNLQERM

SEQ ID NO: 12389 - protein, 644 aa, Chlamydia trachomatis D/UW-3/CX
MMRFARFCLLVLTLFPQLAFSAEPLRRQDVRKTVDKLVEHHIDTQQISPYILSRSLEDYVRSFDSHKAYLTQDEVFSHAFSEEATRPLFKQYQEDNFSSFKELDTCIQQSISRAREWRSSWLTDSIRVIQDAMSHTIEKKPSAWASSIEEVKQRQYDLLLSYASIYLEDAAKNRYQGKEHALVKLCIRQIENHENPYIGINDHGYRMSPEEEANSFHVRIIKSIAHSLDAHTAYFSQEEALSMRAQLEKGMCGIGVVLKEDIDGVVVKEVLAGGPADKTGSLRVGDIIYRVNGKNIENTPFPGVLDSLRGSPGSSVTLDIHRQNNDHVIQLRREKILLDSRRVDVSYEPYGNGIIGKITLHSFYEGENQVSSEQDLRKAIRELQEKNLLGLVLDIRENTGGFLSQAIKVSGLFLTNGVVVVSRYADGSVKRYRTISPQKFYDGPLAVLVSKSSASAAEIVAQTLQDYGVALIVGDQQTYGKGTIQHQTITGSNSQEDFFKVTVGRYYSPSGKSTQLEGVKSDIVIPSRYAEDKLGERFLEYALPADQYENVINDNLGDLDINIRPWFQKYYSPHLQKPELVWREMLPQLAHNSQERLEKNKNFEIFVQHLKKTNKQDRSFGSNDLQMEESVNIVKDMILLKSIS

SEQ ID NO: 12390 - protein, 285 aa, Burkholderia cenocepacia J2315
MSTTLLFHPTPDATYGFPNARRLAHVASPHQQIEVWETPQLGRLFTLDGRPMTSVGDEYVYHECMTHPAALAHPSPKKALVLGGGDGGAARQLLKHACIERIVIAELDDEVVGMARRYLDDVHQGALDDPRVEVVIGDAAHFVEATIEHFDLVVFDLTPPDSPAAGLYTRAFYARLKRILTRCGAISMHLGSPVFHAARIAALLDDLRASFAVVDPLSAHVPLYGSQWLMAIASDTLDAAALFAHDVDERLAARRVHGLRYYDARLHASLFALPRALRDTLGVRR

SEQ ID NO: 12391 - protein, 146 aa, Phaseolus vulgaris
MGAFTEKQEALVNSSWEAFKGNIPQYSVVFYTSILEKAPAAKNLFSFLANGVDPTNPKLTAHAESLFGLVRDSAAQLRANGAVVADAALGSIHSQKALNDSQFLVVKEALLKTLKEAVGDKWTDELSTALELAYDEFAAGIKKAYA

SEQ ID NO: 12392 - protein, 539 aa, Physcomitrella patens subsp. patens
MMEPTYRMTLAELLDEARVTPVAVEGNLDIEITGIQHDSRLVIPGDLFVCVKGLKSDGYEFAHQAIEKGAVAIVSSSEVLPAEGLEASVVVEDTNILLSGLAGAFYGHPSKNLAVVGITGTNGKATTSYLIRSIYEAMGLQAGLLGTINYYINGKKKLEATHTTPDAVHLQKHMASMVHHGTDACIMEVSSHAMHLGRCKEVDFDVAVFTNLTHDPEDFHKSEDEYKEASGKLFAKMVNPEKHRKIVNIDDPQSDYFVTQGNQDVPVVTYAMGNKNADVYPLEVQLSLFESELLVRTPRGNLEISSGLLGRHNVYNILAAVAVGIAVDAPLEDIVRGIEEVDAVPGRCELIDEEQAFAVIVDHANTPDGLSRLLDTVRECGPRRIITVLGSQGDRDKAKRPLMAKIATDKSDVCIFTSDNPRSEDPLDVIDDMLAGVGWSMEEYCKWGEDDYYPPLPNGHRLFCYEIRTIAVRAGVAMGEEGDAVVIAGKGHNTYEIIGDNKEYFDDREECREALQHVDDLHAAGVDTSEFPWRVPESN

SEQ ID NO: 12393 - protein, 914 aa, Acinetobacter sp. ADP1
MNIISTSVYVGPNVYASIPLIRLVIDLNPHYITQLASMGSEVLENLEKVIPTLKTEQDAKLQHKLEELRQAPQQQIGELVAILALHLQRLAGQKGGAAFSAYCHEDETEILYSYESEEIGIEAGEVVCDMLVALAKAHEAGDQIDLNRDVKGFLRYADRFALGPSALALVQAAEERNIPWYRLNDASLIQVGQGKYQKRIEAALTSGTSHIAVEIAGDKNVCNQLLQDLGLPVPKQRVVYDIDDAVRAARRVGFPVVLKPLDGNHGRGVSVNLTTDEAVEAAFDIAMSEGSAVIVESMLYGDDHRLLVVNGELVAAARRVPGHIVGDGKHNVEALIEIVNQDPRRGVGHENMLTKIELDEQALKLLAEKGYDKDSIPAKDEVVYLRRTANISTGGTAIDVTDTIHPENKLMAERAIRAVGLDIGAVDFLTTDITKSYRDIGGGICEVNAGPGLRMHISPSEGPSRDVGGKIMDMLFPQGSQSRVPIAAITGTNGKTTCSRMLAHILKMAGHVVGQTSTDAVYIDGNVTVKGDMTGPVSAKMVLRDPSVDIAVLETARGGIVRSGLGYQFCDVGAVLNVSSDHLGLGGVDTLDGLAEVKRVIAEVTKDTVVLNADNAYTLKMAGHSPAKHIMYVTRDAENKLVREHIRLGKRAVVLEKGLNGDQIVIYENGTQIPLIWTHLIPATLEGKAIHNVENAMFAAGMAYALGKNLDQIRIGLRTFDNTFFQSPGRMNVFDKHGFRVILDYGHNEAAVGAMTELVDRLNPRGRRLLGVTCPGDRRDEDVVAIAAKVAGHFDEYYCHRDDDLRGRAPDETPKIMRDALIQLGVPESRIHIVEQEEDSLAAVLTEAQVDDLVLFFCENITRSWKQIVHFTPEFNIENDHETLELKIAEQGFDIPEGYHAVSNDRGVMILPRG

SEQ ID NO: 12394 - protein, 588 aa, Triticum aestivum
MEVSAMEEAAVRVPVPAARRKGGLRTIPFIISNEIFEKVATYGLQANMVVYLTKRYNMTPAASAMVLYLWSALTNFLPIGGGVLSDVFFGRFPVIAVGCVVSLSGMCLLLVTAILPVYKKTLGCDPANPSACTMLPCQLPLLFTSFMLMSLGAGGIRPCALAFGADQLDKRDNSTKNVRRLQTFFNWYYTVLGLSLVVAVLVIVYIQDHMGWVVGFSVPVVLMLAALMLFLAGSPLYLKAEADRSVLVGIVQVLVASYKNRRELLPPDTAEASCFHNKAGSRPRVPTKKMVSMNRACVLRNPSKELNSDGSACDPWRLCTVQQVEDAKAVIRVLPIWSTGIIPGVIVAQVMFPVLQAGTMDRQMGKVEVPAASYSVFGIITLTVWVALYDRVLVRPLSRLTGHARGLSLRQRMGAGLAVFAVAMAVAARTEALRRGAAIAEGFQDQKHAVVHMSAMRLVPQHCLIGLADALNLIGQIEFYYSEFPKTMSSIGVSLLALGVGFGAVLGSAIVGIMNSATGRDGRDSWLSSNLNRGRYDYYYLVLAALSVANLVYFIWCSWAYGEEGQIRIMALAAEEAEEEETKQEQHK

SEQ ID NO: 12395 - protein, 731 aa, Acinetobacter sp. ADP1
MSITQERLSTMNHEPKLAIIGGRLEDNNADIYQMMHQLSKGKILVFPTASAEPEVVGPETVEIFRQWGFDVTLVPLSVENCATVAYDPHILQLLEEYGSVFFTGGNQIFIADALAPQGKATPLLEKLRSLHQQGGLIAGSSAGAAMMSSLMIVGGTSLEATSFGLVTDPDQAGLLLDQGLDFFKQGIVDQHFIKRGRFGRLLIALLNSKTRYGFGIDENTALFVMGDHAWVTGEYGVFIIDTDGIRIDDHQNIRNIQFSYLDDGDSIDLDTGMVHVAQDKVEVAEKDIVYRAPSCSVRNVFGAYTLYDLLSRLVLGDPAFYCFDSARAVEPIHQMMTIVELQRQISSQSLIAVRNNATRITALGFTASLKKEQMVDQKNIDTWQGATLSRNYGLSVGREARMILLGANPVRSSASSLMRTMAEICQGSVGIIACASASPRSDAYEYIRALESYGVNAEYFDITIDNIDQVNRDQDVLDRLQRMQTILITGGNQIRLIEALLMRSEVTPVLQVITAAWAVGKPIIAIGGAASAMSGFMVAGGSSWEALKYGIASDLGRRGLVLQEGLGLFGTAIIDQNLANSRRLGRLVVACAEEGVKYGLGICEDSGLIATNDNKTLEVIGDKGVVLIETNPRLVRSSSDEFISPEMKIHYAQPGDVIDLEKGMIHRKQTINLANNLLRELIIDLIYECRNDERNETWGETYLRGSITIEFTAHEDGSGTLTLASTMDRRG

SEQ ID NO: 12396 - protein, 414 aa, Nostoc punctiforme PCC 73102
MGFMNKQVFRVGFSLLMAFWLAFGTLTQPAVALTGEQKLVSEVWRIVNRTYLDETFNHQNWAAVRQKVLEKPLTDSNASYAAIGKMLKSLDDPFTRFLDPEQYRSLKVNTSGELTGVGLQIVLNPETGKLEVVAPIAGSPADKAGIRPRDRILKIEGVSTKNLTLDEAATKMRGPSGSLVTLLIERDGEPETEIKLTRDRIALNPVVSELRVSAEGTSIGYLRLTQFNANASMELAHAISSLEKKGAAAYILDLRNNPGGLLQSGIEIARQWLDSGTIVYTVNRQGIQGSFEALGPALTNDPLVILVNQGTASASEILAGALQDNGRAQLVGETTFGKGLIQSLFELSDGSGLAVTIAKYETPQHRDINKLGIKPDKVISQDPINREQIGTEADLQYQAAVELLKKDLVVAGKA

SEQ ID NO: 12397 - protein, 146 aa, Arabidopsis thaliana; identical to SEQ ID NO: 10894

SEQ ID NO: 12398 - protein, 1832 aa, Aspergillus nidulans FGSC A4
MQFNSSDPLDWTVDEVVAYLCHNPETPWSRSSSTVPRPPASFEASLRKNLITGEVLLQDVGKEALRDDLGLKALGHRSFIMSAIRYLKRLSPKYQASISEQTAEMFSLSPVHPQPPLHTSAQSPTAQYSTPLPPVGPNTPALAKSVTTFVTSDSSVAGEVRDNVNDVRQNSSRFDMPIPELSQNLLQDSCGRIEHIHNRYNEQIVVDKHGNKRRKLDLCISVEPRTDNSIPKRSGNSEVQSWYMGPDGITVEQIFYDPELGDDDQTFTLISPRLPTAQHTFVNNRLKYFFQQSPIKLNTNGRSSYHAVIPYNLSVAKFSKDRHFTLYTTRQGRVNATKEKLDEWPQLKIRLEVDKDARPRSEFLGPSDSFSYLLQKYPVQESLEHTLPIYGDSGSEAEFDEETWQEIYEEAGESMLPQSKNLGPAKVDSVIRDCVSQLETKWLETYQAKEEYKARKLWLAARKRIGVNQEVKAISKDTALLELRLHKLRNEISRNEYSTEAELRTQCQCLEQTVFEIQKQKWRSSMLKQEKCPDKVSAPPKRRHLPKTKVGDDESLHSESSISEDNSHDEFVVDDTGAPGIIQGQFLENSPASLSPSGTDDAIISVSGKRRSTRGQVPRVFESSSRSLSPSAPHAHQVQEKPEVIDLTEETPEPDDFMIKTPPLNPVAIPKSCNTIKAGMGASMSPPPSFDSAESSVQVKTERGPSLSLPNINDMRGIMSLEWRLIEERKDRRRLLAKLVCSLSDKERNLMAEQVPKYPLLSLKTHTRRALECLIKGSRDVEGMEASMSHLVMRISSFYISWLHCARHDLQGIKKRSVQAALEKLEDNKNGGFETYYSELINRLECWQAWQRDTEADPDRDLVPEDTPHKRRKRAVQESQSAKLHQASAQQRMRWQEKQRKRLEKRLQSMGVSNDSPSRHAVSFKEPIVYLHPHIGQRVKLHQLSGIQFMWRELVEDKSQEGCLLAHTMGLGKTMQVISLLVTITAAANSPDPRIQQQVPEGFRPRNDLPEARTLVICPSSLIENWRDEFVMWTPQDVLLTVRQVSSEDNMDVRLAEVSMWYEKGGVLLISFDIFRNWVLNQATAKKSPPLSDSKHQDLKHWLLEGPSIIIADEAHKMKNPDSATSQAAMQFRSKSRIALTGSPLANNLGDYYTMVNWISYDYLGSFLEFKANYIEPIKEGLYADSTYGEKRKSLMKLQVLKQILEPKINRADITALEGDLPPKVEFVLTVPLTKIQKEAYDMYAAFILQGRMDEVTQTQLWSWLSILGLCCNHPACFQDKLVSQAQGSSKKTNDTRKTSDVDQAISPDRLGDGFIENAGIRNLEELVAEQLRIFANVHDLKAVELSVRAVITKRIIDESIRAGDKVLVFSQSLHTLDYLERLLKVTNRQYSRLDGQTPAATRQAATKKFNQGEKQVYLISTRAGGLGLNITGANRVIIFDFSFSPIWEEQAIGRAYRLGQQKPVFVYRFIAGGTFQEIIHEKATYKTQLAVRVVDKRNPIRSAHKKPGDYIFPARPVAQQDVSEHIGKDKAVLDKILREDEKKGAENKLIRDIKLTQTFLVEDDDKLTEEEKRTVQEAFDDETLRRTDPAAYAKRVAERQLKQMQEEPYRAQPASLIPVPVGPNAYQSQRQNPPNGAPPTASVNHAVQQSLQPAVPQSAHNTGPPALAPDIISAHVAVADSNFGRASPFLANMQVSGLCSPAPDETTLVNGQGKPQTLSQPSHSQSPNGKVQKCQQLIMASTRKPSIKATHQSASSATRTPGLAGAQAVLRTAIHRRQTFSDKVGSEPLRRISPIFNPPKPGAEQGFSPRSQSMPLQPKESTPQAPASEQP

SEQ ID NO: 12399 - protein, 314 aa, Thermus thermophilus HB27
MDYGMYFFEHVTPYETLVRRMERVIASGKTPFQDYFLFESKGFGKVLILDKDVQSTERDEYIYHETLVHPAMLTHPEPKRVLIVGGGEGATLREVLKHPTVEKAVMVDIDGELVEVAKRHMPEWHQGAFDDPRAVLVIDDARAYLERTEERYDVVIIDLTDPVGEDNPARLLYTVEFYRLVKAHLNPGGVMGMQAGMILLTHHRVHPVVHRTVREAFRYVRSYKNHIPGFFLNFGFLLASDAFDPAAFSEGVIEARIRERNLALRHLTAPYLEAMFVLPKDLLEALEKETMVSTDQNPFYVTPEGEARQAPYKG

SEQ ID NO: 12400 - protein, 383 aa, Zea mays
MKVKTEFRILLSGTVFQNNFEEYFNTLSLARPRFVNDVMTTLVTESEKRTRSRTGKHQEALARHVFVERVGHKIESSSKHDRMDGISLLNELTQGFIDSFEGTKLNILPGIRVYTLFMKPTDVQEEVLAKLLMPLSGNARYPLEYELLITIASIHPWLINTTKCASTYFTPAEVASVDKYKRNFAAGCKAKFVIDLLHKSSFRGERVLVFCHNVAPIAFLVTLIEIVFGWRLGQEVLVLQGDQELHVRSDVMDKFNSDRRGKRKVLIASTTACAEGISLTGASRLVMLDSEWNHSKTRQAIARAFRPGQERMVFVYLLVASGTWEEDKYNSNRRKAWIAKMVFFGRHFDDPLQNRVTEIDDEVLKELADEDETNTFHMIVKQD

SEQ ID NO: 12401 - protein, 632 aa, Bordetella parapertussis 12822
MCLDACLTPDLADRDPVGRACDRAYVIDRPVFRSAMGNCRPSHFRGNGTHAAMNGESCAQRGKRTHKMQESEFFQLSGTTAVLLLVAFYGATFLMSLMIGQKKENVDGYMVSNSSVGFGLSAASMIATWIWAASFYASATSGFKYGLSGPIHYGFWGALMILFIYPFGKRFRQLAPKAHTLAEVIHARHGASSQMIMAVSNIVGSCISLMVNFTAAGALVSVLSPLSFIQGVLIAGLGVLSYTLWSGFRASVMTDFAQLVAMILAAVIIIPLIFFNAGGPDMLQANMWRLSSEQADFFSTTAILEQGAPYFVAVLAYAIGNQTIAQRLFAVREDLIKPTFLTATIGYGAVVIGLGMLGLLALFVGLEPVNGNMNNIIPQMASTYLPPVGIALFFILVVGSLSSTADSDLAALSAIVMTDIYAKNLAGGRPDPRRMLWWGRATMIVATMVGVIFASLRLDILVMLVFVGALWGAIVFPVIASFYWDRVSNSAFFWSVISAVVLFTIVRFELVPIEGAVAVFYEICAAIGGGVVIGLMSFAFFGRVTALTLGTLATLFLLPCFVGTLREYIVLLGSLTAYGVSTVVCVALSLRNQERFDFSLLAERVTSFHYEKARMMGAKPAAPAAQPQPARG

SEQ ID NO: 12402 - protein, 469 aa, Escherichia coli O157:H7 EDL933
  misc_feature (222)..(222): Xaa can be any naturally occurring amino acid
MSAEHVLTMLNEHEVKFVDLRFTDTKGKEQHVTIPAHQVNAEFFEEGKMFDGSSIGGWKGINESDMVLMPDASTAVIDPFFADSTLIIRCDILEPGTLQGYDRDPRSIAKRAEDYLRSTGIADTVLFGPEPEFFLFDDIRFGSSISGSHVAIDDIEGAWNSSTQYEGGNKGHRPAVKGGYFPVPPVDSAQDIRSEMCLVMEQMGLVVEAHHHEVATAGQNEXATRFNTMTKKADEIQIYKYVVHNVAHRFGKTATFMPKPMFGDNGSGMHCHMSLSKNGVNLFAGDKYAGLSEQALYYIGGVIKHAKAINALANPTTNSYKRLVPGYEAPVMLAYSARNRSASIRIPVVSSPKARRIEVRFPDPAANPYLCFAALLMAGLDGIKNKIHPGEAMDKNLYDLPPEEAKEIPQVAGSLEEALNELDLDREFLKAGGVFTDEAIDAYIALRREEDDRVRMTPHPVEFELYYSV

SEQ ID NO: 12403 - protein, 465 aa, Mesorhizobium loti MAFF303099
MHLPNAWTGALPARSLATPKELDVAGAQAFLEQADVRYVLAQFVDLYGVAKSKAVPVQHLDCLLTEGAGFAGGAPCGLGLLPHEAEYMVVCELDTLTVTPWAPGYARMLGVGTVKGAPHPVDTRNVLKTQVASLAERDWTLNTGLEPEFLLLRREPDGKLSPFDRTDTLTKPAYDYRGLMRGRNVLERVTECLQAVGIDVYQIDHEDANGQYEINFKYADALKTADQIVFFKMAVSEIAHDLGAICSFMPKPRSSSTGNGMHIHCSIADGDGRNLFHDDADPNGMGLSKLAYHFLGGVLAHAKGLTALLAPTVNSYKRLVVGGTVSGATWAPACIVYGYNNRTAMVRIPYGRLEIRTGDSSMNPYLATAALIAAGLDGIEQKLEPGAPRNVNFYGLTLEAIKEMGVDLLPQTLTEALDALEADQLFAGTLGKPVIEQFLSLKRSEWLEYHCHVSDWEVERYLNFF

SEQ ID NO: 12404 - protein, 622 aa, Mycobacterium sp. MCS
MARAVGIDLGTTNSVVAVLEGGDPVVVANSEGSRTTPSVVAFARNGEVLVGQPAKNQAVTNVDRTIRSVKRHMGTDWNTEIDGKKYTAQEISARTLMKLKRDAESYLGEDITDAVITVPAYFNDAQRQATKEAGQIAGLNVLRIVNEPTAAALAYGLDKGEKEQTILVFDLGGGTFDVSLLEIGEGVVEVRATSGDNHLGGDDWDERVVTWLVDKFKASSGIDLTKDKMAMQRLREAAEKAKIELSSSQSTSINLPYITVDADKNPLFLDEQLTRAEFQRITQDLLDRTRQPFQSVIKDAGISVGDIDHVVLVGGSTRMPAVSELVKEMTGGKEPNKGVNPDEVVAVGAALQAGVLKGEVKDVLLLDVTPLSLGIETKGGVMTKLIERNTTIPTKRSETFTTADDNQPSVQIQVFQGEREIASHNKLLGSFELTGIPPAPRGVPQIEVTFDIDANGIVHVTAKDKGTGKENTIRIQEGSGLSKEEIDRMIKDAEAHADEDRKRREEADVRNQAETLVYQTEKFVKEQREAEGGSKVPEDVLTKVDGAISEAKTALAGTDIGAIKAAMEKLGTESQALGQAIYEATQAEQAAGGGAGGADGSSSSSDDDVVDAEVVDDDRENK

SEQ ID NO: 12405 - protein, 659 aa, Chlamydophila abortus
MSEQKKSSKIIGIDLGTTNSCVSVMEGGQAKVIVSSEGTRTTPSIVAFKGNETLVGIPAKRQAVTNPAKTLASTKRFIGRKYSEVESEIKTVPYQVASGSNGDVVFPIDGKQFTPEEIGAQVLIKMKETAEAYLGEPVTEAVITVPAYFNDSQRASTKDAGRIAGLDVKRIIPEPTAAALAYGIDKAGDKKIAVFDLGGGTFDISILEIGDGVFEVLSTNGDTHLGGDDFDEVIIKWMIEEFQKQEGIDLSKDNMALQRLKDAAEKAKIELSGMSSTEINQPFITMDANGPKHLTLTLTRAHFEKLASNLIERTKAPCQKALADAKLSASDIDDVLLVGGMSRMPAVQEVVKSIFGKEPNKGVNPDEVVAIGAAIQGGVLGGEVKDVLLLDVIPLSLGIETLGGVMTPLVERNTTIPTQKKQIFSTAADNQPAVTIVVLQGERPMAKDNKEIGRFDLTDIPPAPRGHPQIEVTFDIDANGILHVSAKDAASGREQKIRIEASSGLKEDEIQRMINDAEKNKEEDKKRREASDVRNEADSMIFRAEKAISDYKENIPESLTKEIEERIEKVRSALKEDAPTEKIKEASDELSRHMQKIGEAMQSQSASAAANAQDGPNINTEDLKKHSFSTKPPTGNSSSSANNENIEEADVEIVDKPND

SEQ ID NO: 12406 - protein, 154 aa, Oryza sativa Indica Group
MDQVEEKEGNRFQEPASDRCEDNEDKEQDNSEESSSVDQRKEEEEEEKEGCEEATPAAAAAAAAPSFFAHPCSLLQYIARVCACCLGLSDSFCDPKASSVLVPEPEPAAADPSQEGEEDMKSSEATTRVRAARLRPKPPGNPREGSGGNGGHHH

SEQ ID NO: 12407 - protein, 543 aa, Hordeum brevisubulatum
MGWGLGDPPADYGSIMAVGLIVALMCICIIVGHPLEENRWMNESTTALLLGLGAGTVILFASSGKNSRLMVFSEDLFFIYLLPPIIFNAGFQVRKKQFFRNFMTITLFAVVGTLISFSIISLGAMGLISRLNIGALELGDYLALGAIFSATDSVCTLQVLSQDETPFLYSLVFGEGVVNDATSVVLFNAIQTFDLGNFSSLKFLQFIGNFLYLFGASTFLGVASGLLSAYVIKKLYFGRHSTDREVAIMMLMAYLSYMLAELLDLSGILTVFFCGIVMSHYTWHNVTESSRVTTKHAFATLSFISETFLFLYVGMDALDIEKWKIVSETYSPMKSIALSSIILALVLVARAAFVFPLSYLSNLTKKTAGEKISIRQQVIIWWAGLMRGAVSIALAYNKFAKSGHTQLPSNAIMITSTIIIVLFSTIVFGLLTKPLIRLLIPARHLTREVSALSEPSSPKSFLEQLTVNGPETDVENGVSIRRPTSLRMLLASPTRSVHHYWRKFDNAFMRPVFGGRGFVPFVPGSPTESSVPLLAHGSENQNH

SEQ ID NO: 12408 - protein, 322 aa, Thermosynechococcus elongatus BP-1
MLYRIPVSTVGYWHSPWQIHQFLLPIERFIHRNPMLQLDPISKTTHQHSGHKGLVMAIGGAEDKVRGRQILTTFCQRAGGLDAVIGVIPSASREPDAMGRLYHDIFRDIGVREVDILLVGDRADAEQEEMLARLSRCTGIFMSGGDQLRLSALLDETPLLYQLRHQVWEGKSILGGTSAGAAVLGECMIASGGSNEAPNRSLVDLATGLGILPDVLVDQHFHNRNRLARLISAISAHPDKLGVGIDEDTCAMFEADGTLRVLGRGSVTIVDPRDVSYTNYAHVDVNEPLSIYNLRLHILSDGDCYNLRTHQVQHKCILPPLN

SEQ ID NO: 12409 - protein, 896 aa, Thermosynechococcus elongatus BP-1
MKILKLQTLRGPNYWSIRRHKLIVMRLDLEEVANTPSNQISGFVDGLVRVLPSLYNHFCSLGHEGGFLTRLREGTYLGHVVEHVALELQELAGMPVGFGRTRETSTPGVYQVVYEYQVEEAGRYAGRAAVRLCQSIIDTGTYPQQELDQDLADLRELKAKASLGPSTEAIVREAEARNIPWFELSSRSIIQLGYGARSHRMQATLSDRSSILAVELASDKEGAKRLLQDAGIPVPKGTVIRYIEDLPEAIEEIGGYPIVIKPLNGNHGRGITIDINSLEAAEEAFEIASSISKSVIVERYHAGRDFRVLVVNGKVVAVAERVPAHVIGDGHSTIEELIEKTNQDPQRGDGHDNILTRIEVNHDTWTLLEKQGYTLNTVLQPGEICYLRATANLSTGGIAIDRTDEIHPENVWICQRAARIIGLDIAGIDVVSPDISQPLSKVGGVIVEVNAAPGFRMHTNPSQGIARNVAEPVLNMLFPPGTPCRIPIFAITGTNGKTTTTRLIAHICKQTGQTVGYTTTDGIYIGDYLVEKGDTTGPQSAQLILQDPTVEIAVLETARGGILRSGLGFDHCDVGVVLNVQADHLGLGDIDTVEQLADLKAVVVESAWPNGYAVLNADDPLVAAMARQVKAQVAYFSMDPHNPIIRQHIQQGGLAAVYENGYLSILKGDWTLRIEQAENVPITLGARASFMIANALAASLAAFAQGISIEHIRAALTTFRTSVEQTPGRMNLFDLGQFSVLVDYAHNPAGYEAIGEFVQKWPGQRIGVVGGPGDRRDQDLEQLGELSAKIFDWIIIKEDDDTRGRPRGDAAYWIERGVHHHSVQRQYDIIHDEVAAIQFALDRAPKGSLVVIFPAEVSRTIQLIRQHHQRLQGETINGFHSEGRPTSGDLNPSIFH

SEQ ID NO: 12410 - protein, 655 aa, Vitis vinifera
MCSISSLTKYWKTKYKKILNSFLIRENLIELLCLIGKLGTVIGIDLGTTYSCVGVYRNGHVEIIANDQGNRITPSWVSFTNTERLIGEAAKNQAALNPERTIFDVKRLIGRKFDDPEVQRDIKFLPYKVVNKEGKPYIQVTIRDGEIKVFSPEEISAMILGKMKETAEAYLGKKIKDAVVTVPAYFNDAQRQATKDAGIIAGLNVARIINEPTAAAIAYGLDKKAEKNILVYDLGGGTFDVSILAIDNGVFEVLATSGDTHLGGEDFDHRVMDYFIKLIKKKYDKDISKDNKALGKLRRECERAKRALSSQHQVRVEIESLFDGIDFSEPLTRARFEELNMDLFKKTMGPVKKALEDAGLKKTDINEIVLVGGSTRIPKIQQMLKEMFDGKEPCKGVNPDEAVAYGAAVQGGILSGEGGEETGGILLLDVAPLSLGIETVGGVMTKLIPRNTVIPTKKSQIFTTYQDQQPTVSIKVYEGERSLTKDCRELGRFELSGIPPAPRGVPQIEVTFEVDANGILHVRAEDKAAKKSQSITITNDKGRLSQEEIDRMVKEAEEFAEEDRQVKERIDARNKLETYLYSMRATINDRDKLADKIDSEDKEKIEAALKEALDWLDDNQNADKDEYNEKLRGVEAVCNPVIKQVYEEWWGFFQF

SEQ ID NO: 12411 - protein, 235 aa, Debaryomyces hansenii CBS767
MTFEVNTSVLSRVDGSAELSVGTTKVITSVTGPIEPKIRQELPNLASLEIIVRPSLGVSTTREKALEDKLRSILQSIIIRYKYPRQLIQIVVQFLITENNINDNGSNQHNKDFTLTELNAAINCCYFALIDANIALYNSFSSTSICIPLDTKKENYIFNPNMNDLIVSESHHVICFSIKDSKAANLLLLESHGKFSEDQLLLAIRKAGDECESIHNTYQRKCIANKVENDFIWKS

SEQ ID NO: 12412 - protein, 882 aa, Hordeum vulgare subsp. vulgare
MAATAYERRLLAAADLVLSADGKSQLPRLSSADLGVTADLKPHQLDGVHWLIRRYHLGVNVLLGDEMGLGKTLQAISLLSYLKIKSIAPGPFLVLCPLSVTDGWLSEFGKFCPTLKVIQYVGDKAHRRHIRRTMHDDVQKSSHSNELPFDVMLTSYDIALMDQDFLSQIPWLYVVIDEAQRLKNPSSVLYNVLEERFMMPRRLLLTGTPVQNNLSELWALMHFCMPSVFGPLDEFLSTFKEAGNLLSGSEANQANRQFKILKHILRAFMLRRTKALLIESGILELPPLTELTVMVPLAPLQKKIYLSVLRKELQTLLSFTGGSSRHQSLQNIVVQLRKACSHPYLFSGIEPEPYEEGEHLVQASGKLIVLDLVLEKLHRLGHRVVLFAQMTQTLDILQDFLELRNYTYERLDGSVRAEERFAAIRNFSSQPTKGVVRDDNNPSGAFIFMISTRAGGVGLNLIGADTVIFYEQDWNPQADKQALQRTHRIGQLNHVLSINLVSQRTIEEVIMRRAERKLKLSHNIFGDKDATDGKGKDFGNEANDMRSIILGLHQFDPADTAAETINEETLAKLKSMSENVIKMRTHEPSEKDDRAFEINPDLTDGSGAMITRACDSISIDPGVDEAAYLSWVERFKEASHSIEDVPVELERQRPAPEDKLLKREANKKKAEEKRLAKWKDLGYQTLGVKVPDNIPNQNISDSGSVQLVYGDCTDPSKVCAAKPAIIFSCVDNSGTWGHGGMFDALTSLSTYIPDAYHRASEVDDLHMGDLHLIELDEANCSRSLDAPLWVALAVVQSYNPKRKIPRSEISMSDLELCLSKAAFSAAQRSASIHMPRIGQRSGSQRSEWYTIERLLRKYASLHGIDIFVYYFRRPSRQQPDSD

SEQ ID NO: 12413 - protein, 211 aa, Zea mays
MDPMDIVGKSKEDVSLPKSTMTKIIKEMLPPDVRVARDTQDLLVECCVEFINLLSSESNDVCSRDDKKTIAPEHVIRALQDLGFKEYVEEVYAAYEQHKLETLDSPKATKFTGIEMTEEEAVAEQQRMFAEARARMNNGAAKPKEPALEPQNQPQQPPQPQLQLHPTAQQPPQPQSQLHHPQSQQPLHPQLQPYTQAAPQQPLHPQLQPYT

SEQ ID NO: 12414 - protein, 441 aa, Azoarcus sp. EbN1
MVHVNISPFKFWRDIERPMNGLHLIADLYRCGTTAAALTEREALETLCVTQCREAGLTPLGSYFYQFRDESGAAAGVTGTVVLAESHLAIHTWPESGGVTLDVYVCNFSRDNGDRARMVYRAVIDALRPAEIVGHEVVRGRLPEKGVAGPMPLPAVEGVIFEQLNDNAGYFTRGGKLIEKGRSRYQEYEVWETPQFGRLFRLDGCFMTSERDEFHYHENLIQVPCIAHPAPARALILGGGDGGSAEELLKQPAMAKIVIAELDEKVIEIAREHLQAVHRGALDDPRIELRIGDGFRYVMEEAPAAAERFDLIVLDLTDPVGPAEALYSEDFFRGCRALLAPGGAISLHIGSPAFQPERLRTLVARLRDVFAIVRPYFLYVPLYGTLWGFATASDTLDPAALSAAEVDRRLAERRIGALQHYNGAVHCAQFALPNHLRTLLG

SEQ ID NO: 12415 - protein, 497 aa, Mycobacterium sp. MCS
MIELTLARVAEIVGGRLADITPEDAAATRITGTVEFDSRAVTAGGLFLALPGARSDGHDFAAAAVAAGAAAVLAARPVGVPAVVVPPAAGPEGSGVLEHDTDGAGAAVLAALARLAAAVAAELVDGGLRIVGITGSSGKTSTKDLVAAVLAPLGEVIAPPGSFNNELGHPWTVLRADRSTDFLVLEMSARHPGNIAALAAIAPPSIAVVLNVGTAHLGEFGSREAIAATKSELPQAVPESGVVILNADDSAVAAMAEVTAARVVRVSREPGADIWADAVTLDELARPRFTLHAAGGEVPVNLAVHGDHQVSNALCAAAVALECGATLDQVAAALAGAGPVSRHRMQVTTREDGVTVVNDAYNANPDSMRAGLKALAWMSRGGAAKRRSWAVLGEMAELGDDSISEHDSIGRLAVRLDVSRLVVVGTGRSASAMHQGAVMEGSWGAEATRVDDADAALALLSDELQPGDVVLVKASNSAGLGALADSLTAGRDGTATR

SEQ ID NO: 12416 - protein, 650 aa, Listeria innocua Clip11262
MEIFELILLMLSAVFLSNVLSRFLPSIAVPLIQVLLGIILAIPLGDHTMDINPELFLLLFMAPILFNDGARTDKKSLWKNRKAILSLSIGLVFVTVGVLGAFIHYLIPAIPFAAAFALAAALAPTDAVAVGALAEKVRVPHKIMHILEGESLINDASGLVSFQFAVLALVTGTFSFMSAGTSFLLLSLGGIALGVVLSLLKIMLMRGLRQLGIENMTSFMLMEILLPFLIFMVAENIGVNGILAVVSGGMVHSFSYKRINPEMAQLNLLSKNTWSVIIFSLNGLVFVLLGTQLPQIMTAIWEDTGIHKSMLFLYIFGITFLLLALRFLWILFFRNYEENPHADLVSRLKNTFLYTVAGVRGTITLVSALSLPFVLGQGNAFPERDLLIFIAAGVIITTLLLANFTLPLFAAKKDVVVADHTTAIALLRDVVGQLQRYKTDENEVEMNNVLKMYNGRIFSLMEHKEVSATEKELRRLTQEWQLENTRRLVFERKIDTGVGLSLMMRLGKRLYVQTRAQKYRARMRYRQLLSHSIRDFRIVPLSFEERRKERAKLQTENNQFVVQKLNELDKNEFNPEVISLYLMNFERALGSGKHKKETDNEELQTTIDLASQIERETIQHYFEKGTITRKEMKVYRDNLLAIEASFQLEF

SEQ ID NO: 12417 - protein, 231 aa, Brassica napus
MGKKCDLCEGVARMYCESDQASLCWNCDAKVHGANFLVAKHTRCLLCSACQSSTPWKATGLRLGPTFSVCDSCVALKSAGGGGAGVGTDQSQEVNESQLRRRDDDDGDSAESYDDGEDEDEDEEYSDEDEEEDDADDEEAENQVVPGSGAGAAQLPPVMNSSSSNGGGGDLAAKRTRDYSDEEIGCSSSAQESNFSPPLKRPSRDELAFKSTAEINSLVRLEGERVLERRR

SEQ ID NO: 12418 - protein, 508 aa, Mycobacterium sp. MCS
MAMKLRPSHPVGHALGALAEQVQAVPAPGFPVPDIRVTGVTLRGQDALPGDLFAALPGSSAHGARFVADAVAAGAVAVLTDAAGAVMLGADPVVPVLVHPDPRAVLGAVASTVYGHPSQHLRVVGVTGTSGKTTTTYLVEAGLRAAGRVAGLIGTVGIRIDGRDQPSALTTPEAPDLQALLAVMVEQGVDTVVMEVSSHALTLGRVDGVHFAAGGFTNLSRDHLDFHPTMEDYFDAKAGLFDPQSRTRAELAVVCVDDDAGRAMAIRAGRAVTVSASGRPADWRAEDVRAVEAGAQEFVAVDPAGVHHGLRIALPGHYNVANCVLAAALLDAVDVSPEQAAPGLRTATVPGRLEAVDRGQDFLALVDYAHKPGALRAVLETLRGQGKGRIAVVFGAGGNRDAGKREPMGRVAAELADLVVVTDDNPRDEDPATIRAAIMAGARAAGGGADVVEIGDRREAIAHAVRWARPGDVVLVAGKGHETGQTAAGRTHPFDDRVELAELLEKRG

SEQ ID NO: 12419 - protein, 314 aa, Debaryomyces hansenii CBS767
MLIEAPQIDLKSFQHACINVIDNKYWFHETSAEGFPGQAFALEIDQILYHVHSQYQDILIFKSTTFGNVLVLNGIIQCTERDEFAYQELITHLPIMCHASPRRVLVIGGGDCGVVRELIKHLDEGVDEITMVEIDDMVIKLLAKFLPEMAKFHDHPRVKMIIDDGFKYLKSLSAQAHEKYDVIITDSSDPDGPAEDFFQTNYFKLLSNALNPDGIVIMQSSENIWLNINYLSQLMQKANRVFNNVAYSQCYMPSYTSGQLGLIVATNDTSNVLSIPSRKFSPEKELHLFKYYSSSVHQASFVLPTWAHKTLNNN

SEQ ID NO: 12420 - protein, 473 aa, Sulfolobus acidocaldarius
MPGLPKNEHEALEFLKSNNIKWVDLQFTDLLGKLQHITIPSNEFDESSFKVGFGKLDGSSIKGFTSIYESDMVLLPIPQTMTLIPWMQGVARVLTKVFWGGGKGRFERDPRGIAEEAEKYQSEQGYVSYFGPELEFFVFDKVEVDASLPQSGTGYKIHSREAPWSKNGGYVIRYKEGYYPASPVVQLMDIRLEIISTLVDYFGTIEAAHHEVATAGQGDIDFRFSTLADTADKVQVLKYVTKNIASKRGMIATFMPKPFFGDNGSGMHTHFSLWTKDGKNLMYDPNDEYAELSQIGRYIIGPLLEHGRALSAIVVAGTTNSYRRLVPGYEAPVYLVWSKSNRSAAIRIPAYYKGMEKAKRLEYRPPDPSSNPYLVFSAILMAGLDGIRRKLDPGDPVDENIYHMSEEKKRSLKIRELPGSLDEALNELESDNEFLKPVFNSSILQAYLDLKKEEAKMMQLYPHPMEIYQYLDS

SEQ ID NO: 12421 - protein, 660 aa, Hyaloperonospora parasitica
MNLAKICFLAAAALANAAVSGEDTKGPRGPVIGIDLGTTYSCVGIYKDQKVEIIANDQGNRITPSYVAWDSNDERLIGDGAKNQATINPEKTLFDVKRLIGRKYTDKSVQSDKKLLPYELVNKDGKPFIQVQVKGETRQFAPEEVSAMVLTKMKHIAEGYIGREVFDAVVTVPAYFNDAQRQATKDAGTIAGLTVQRIINEPTAAAIAYGIDKKAQGEKNVLVFDLGGGTFDVTLLAIDGGVFEVLATNGDTHLGGEDFDQRIMQYFIKKWKKDKNIDVASDKRALQKLRREAERVKRALSAQAQARLEIESLLEGEDFTESLSPARFEKLNDDLFKKTLGPVEKVMKDAGLKKSEVDEIVLVGGSTRIPKVQQLIKDYFNGKEPSRGVNPDEAVAYGAAVQGGILGGEQDDLTKDVLLIDVVPLSQGIETVGGVMTKLINRNTVIPTKKSQTFSTYQDNQPAVLIQVFEGERAMTKDNRLLGKFELTGLPPAPRGVPQIEVTFEIDANGILQVSAEDKGTGKAETITITAEKGRLSQEEIDRMVQEASEFADEDKRVKDRIDGRNSLEGYLYNLKNNVEGKLDDKIEEDDKDTVLTAVQDAMDWLEDNQEVDKEDYEAKQKEVEKVVNPIMSKVYESGAAQEDTYETGEDDEDDEHDEL

SEQ ID NO: 12422 - protein, 135 aa, Vitis vinifera
MDKLLCNIIGFTEEQEALVVKSWNSMKKNAGGLGLKFFLKIFEIAPSTKKLFSFLKDSKVPLQKNPKLKSHGMTFFFFFYYCCSTSKSRQNSTLKKLGVVHYKSGVLDEHYEVTKFALWETIKETVPEMWSLASK

SEQ ID NO: 12423 - protein, 1099 aa, Prochlorococcus marinus str. MIT 9303
MIGCGTPAWMVAVDRQCTPAPRNPTHTFCVAAMSLLHATWLPAIRTPTSSGRPALLVWADTWRVATPAGPAATPALHPFTLNPDDLRAWLIERDLLPDEIIDATACLTLPSRTVKPRSKAKNVSTESDEDKDHKTSWTGLPLQAGEPIPKQTEWWPWQVQGLAVEPAAATAWLSKLPLSGDHPDLADELRWWSHLQRWALSMIARGRWLPQVELSKGEGYPHRARWTPLLNREDDRRRLEDLAAQLPLVATCALPWREPTGRRSNRMTRLRPEAMRAANPVASCRPRSGRLRVASLLEELLDAQLRTGFEASEQGLDPLLTAWQEALGSDSGVINLPDEEAERLATASNHWREGVAGNVAPARACLELFTPGEGEDLWELRFALQAEADPTIKVPAAAAWAAGPKVLQLGEIRVEHPGEVLLEGMGRALTVFAPIERGLDSATPEAMQLTPAEAFVLVRTAAAQLRDVGVGVELPASLSGGLASRLGLAIKAELSERSRGFTLGETLDWSWELMIGGVTLTLRELERLASKRSPLVNHKGAWIELRPNDLKNAEHFCSVNPGISLDDALRLTATDGDTLMRLPVHRFEAGPRLQAVLEQYHQQKAPDPLPAPEGFCGQLRPYQERGLGWLAFLHRFDQGACLADDMGLGKTIQLLAFLQHLKAEQELKRPVLLIAPTSVLTNWKREALAFTPELNVREHYGPRRPSTPAALKKALKGLDLVLTSYGLLQRDSELLETVDWQGVVIDEAQAIKNPNAKQSQAARDMGRPDKNNRFRIALTGTPVENRVSELWALMDFLNPRVLGEEDFFRQRYRLPIERYGDMSSLRDLKGRVGPFILRRLKTDKAIISDLPEKVELSEWVGLSKEQAALYRNTVDETLEAIARAPSGQRHGKVLGLLTRLKQICNHPALALKEKTVAKGFMDRSAKLLRLEEILEEVIEAGDRALLFTQFAEWGHLLKAYLQQRWRFEVPFLHGSTSKTERQAMVDRFQEDPRGPQLFLLSLKAGGVGLNLTRASHVFHVDRWWNPAVENQATDRAYRIGQTNRVMVHKFITSGSVEEKIDRMIREKSRLAEDIIGSGEDWLGGLGVSQLRELVALEDS

SEQ ID NO: 12424 - protein, 660 aa, Hyaloperonospora parasitica
MNLAKICFLAAAALANAAVSGEDTKGPRGPVIGIDLGTTYSCVGIYKDQKVEIIANDQGNRITPSYVAWDSNDERLIGDGAKNQATINPEKTLFDVKRLIGRKYTDKSVQSDKKLLPYELVNKDGKPFIQVQVKGETRQFAPEEVSAMVLTKMKHIAEGYIGREVFDAVVTVPAYFNDAQRQATKDAGTIAGLTVQRIINEPTAAAIAYGIDKKAQGEKNVLVFDLGGGTFDVTLLAIDGGVFEVLATNGDTHLGGEDFDQRIMQYFIKKWKKDKNIDVASDKRALQKLRREAERVKRALSAQAQARLEIESLLEGEDFTESLSRARFEKLNDDLFKKTLGPVEKVMKDAGLKKSEVDEIVLVGGSTRIPKVQQLIKDYFNGKEPSRGVNPDEAVAYGAAVQGGILGGEQDDLTKDVLLIDVVPLSQGIETVGGVMTKLINRNTVIPTKKSQTFSTYQDNQPAVLIQVFEGERAMTKDNRLLGKFELTGLPPAPRGVPQIEVTFEIDANGILQVSAEDKGTGKAETITITAEKGRLSQEEIDRMVQEASEFADEDKRVKDRIDGRNSLEGYLYNLKNNVEGKLDDKIEEDDKDTVLTAVQDAMDWLEDNQEVDKEDYEAKQKEVEKVVNPIMSKVYESGAAQEDTYETGEDDEDDEHDEL

SEQ ID NO: 12425 - protein, 275 aa, Clostridium thermocellum ATCC 27405
MELWFTEYQTPTLGITCKTKKTLHSEKTEYQELAVIETEQFGRMLLLDGIIQTTVADEFVYHEMIAHVPLFTHKNPKKALVVGGGDGGSIREIVKHPSIEKAVLCEIDRRVIEVSKEYLPEISCALDNEKVEVVVGDGIKYVKEHKNEFDVIIIDSTDPIGPAEGLFAIDFYRAVYDCLKEDGIFVAQTESPFIDKELITRIIRDVKSLFPITRLYTCAIPTYPTGYWCFTMGSKKYDPLETDIDSIPDIDTKYYCPQIHRAAFILPKFAKELIK

SEQ ID NO: 12426 - protein, 1011 aa, Coccidioides immitis RS
MVNHWEIDDSDASTQSSEDDGLTDPIPREGPSNININDAVGNGDNPIIDMSDTPSAENDNNDDNDFFSDGETTYLQFKNRKKRKRSAALKRNSKRAQNSSIVGRREERKDNDNEGHIREKPRQMKSYGEASSEGEAMEDALPDYLQRRRSQFDKRRERLLEAGLRLPPDYESVEFSDDERLQDLREKPSFTNINPCRKYEDIQLPYSLGFVPAPIAQWLRDYQVEGASFLHELFVYQKGGILGDDMGLGKTVQVIAFLTAAYGKTGDERDAKRMRKIRRKGDSIWYPRSLIICPGTLIQNWRSELSRWGWWSVEVYHGDTKEEALQSAISGRVEILITTYTTYRMNKDSLNMVEWDCVVADECHLMKDRRSETAKSMHELNALCRIGLTGTAIQNKYEELWTLLNWTNPGKFGPASTWKTTISDPLKIGQSHDATVYQLSKARKTAKKLVKNLLPAFFLRRMKTLIADQLPRKSDRVVFCPLTETQADAYENLLDSAMIECVKMSSDPCPCGSKKKAGWCCYKRIPGGGPWQNYVFPAISNLQKLCNHLATLIPQSTDPEEKQEKDLAMLEVAVPDQWRELYRTRGSILNYSNPEFCGKWKVLKKLLKWWHANGDKVLVFSHSVRLLRMLQMLFNHTSYNVSYLDGTMSYEDRAKVVDDFNADPRQFVFLISTKAGGVGLNITSANKVVVVDPNWNPSHDLQAQDRAYRIGQRRDVEVFRLVSAGTIEEIVYARQIYKQQQANIGYNASTERRYFKGVQEKKDQKGEIFGLRNLFEYKDNNIVLRDIVNKTNVAESKAGVDVVDFEIDERGDDENKTLESTDAYTEDAAMSQLAALVQDGSDAIKKWGEKDRSVTPARHDPIQAILVSAGVEYTHENSEVIGSSKIEEQLSRRAEMADDGGDIGKEQVFQASQGDASSSSLSALTRDGKLVRFKYHPPEDVMRRQFCSMAKESGYENATEFALVVEGMTQADRRAWLEKWYKTRRELLLGERPRTKSPRTGMKINEELGQT

SEQ ID NO: 12427 - protein, 1522 aa, Arabidopsis thaliana
  misc_feature (1164)..(1164): Xaa can be any naturally occurring amino acid
MDPSRRPPKDSPYANLFDLEPLMKFRIPKPEDEVDYYGSSSQDESRSTQGGVVANYSNGSKSRMNASSKKRKRWTEAEDAEDDDDLYNQHVTEEHYRSMLGEHVQKFKNRSKETQGNPPHLMGFPVLKSNVGSYRGRKPGNDYHGRFYDMDNSPNFAADVTPHRRGSYHDRDITPKIAYEPSYLDIGDGVIYKIPPSYDKLVASLNLPSFSDIHVEEFYLKGTLDLRSLAELMASDKRSGVRSRNGMGEPRPQYESLQARMKALSPSNSTPNFSLKVSEAAMNSAIPEGSAGSTARTILSEGGVLQVHYVKILEKGDTYEIVKRSLPKKLKAKNDPAVIEKTERDKIRKAWINIVRRDIAKHHRIFTTFHRKLSIDAKRFADGCQREVRMKVGRSYKIPRTAPIRTRKISRDMLLFWKRYDKQMAEERKKQEKEAAEAFKREQEQRESKRQQQRLNFLIKQTELYSHFMQNKTDSNPSEALPIGDENPIDEVLPETSAAEPSEVEDPEEAELKEKVLRAAQDAVSKQKQITDAFDTEYMKLRQTSEMEGPLNDISVSGSSNIDLHNPSTMPVTSTVQTPELFKGTLKEYQMKGLQWLVNCYEQNGSVLRLLFAILQGLNGILADEMGLGKTIQAMAFLAHLAEEKNIWGPFLVVAPASVLNNWADEISRFCPDLKTLPYWGGLQERTILRKNINPKRMYRRDAGFHILITSYQLLVTDEKYFRRVKWQYMVLDEAQAIKSSSSIRWKTLLSFNCRNRLLLTGTPIQNNMAELWALLHFIMPMLFDNHDQFNEWFSKGIENHAEHGGTLNEHQLNRLHAILKPFMLRRVKKDVVSELTTKTEVTVHCKLSSRQQAFYQAIKNKISLAELFDSNRGQFTDKKVLNLMNIVIQLRKVCNHPELFERNEGSSYLYFGVTSNSLLPHPFGELEDVHYSGGQNPIIYKIPKLLHQEVLQNSETFCSSVGRGISRESFLKHFNIYSPEYILKSIFPSDSGVDQVVSGSGAFGFSRLMDLSPSEVGYLALCSVAERLLFSILRWERQFLDELVNSLMESKDGDLSDNNIERVKTKAVTRMLLMPSKVETNFQKRRLSTGPTRPSFEALVISHQDRFLSSIKLLHSAYTYIPKARAPPVSIHCSDRNSAYRVTEELHQPWLKRLLIGFARTRXSEANGPRKPNSFPHPLIQEIDSELPVVQPALQLTHRIFGSCPPMQSFDPAKLLTDSGKLQTLDILLKRLRAGNHRVLLFAQMTKMLNILEDYMNYRKYKYLRLDGSSTIMDRRDMVRDFQHRSDIFVFLLSTRAGGLGINLTAADTVIFYESDWNPTLDLQAMDRAHRLGQTKDVTVYRLICKETVEEKILHRASQKNTVQQLVMTGGHVQGDDFLGAADVVSLLMDDAEAAQLEQKFRELPLQVKDRQKKKTKRIRIDAEGDATLEELEDVDRQDNGQEPLEEPEKPKSSNKKRRAASNPKARAPQKAKEEANGEDTPQRTKRVKRQTKSINESLEPVFSASVTESNKGFDPSSSAN

SEQ ID NO: 12428 - protein, 189 aa, Alcanivorax sp. DG881
MPSPLRHALTTLALLATPLASADSACAPALDASVRKLHASSELDLCALTAGKLTLVVNTASQCGYTPQFKGLEALYQKYREQGMIVIGFPSDDFRQELDDEADTASICYVNYGVSFPMAATSQVKGDATNPVFKALNQAAGEPAWNFNKYLVPASGDGIIHFPSAEKPLGGKLEAAIRQALPGSQGQAD

SEQ ID NO: 12429 - protein, 1164 aa, Oryza sativa; identical to SEQ ID NO: 9006
  misc_feature (1125)..(1125): Xaa can be any naturally occurring amino acid

SEQ ID NO: 12430 - protein, 544 aa, Robiginitalea biformata HTCC2501
MKNDLKKSYYIGPAVVAFALALGIFVGGKLHFNDTPEKLFTTNSKKDKLNRLIDYIDYEYVDEVDTDSIVDVTVNNILDKLDPHSVYIPKSEMKRVSENMKGDFVGIGINFYTFRDTITVTRTIPGGPSQRAGLQPGDKILLADGDTLYGRRIPDGQIVSRLKGQEGSSVKLQVYRKTEDRLFSVNLRRDRIPIRSIDASYMLTSDMGYIRMNRFAETTFDEFDAALRKLQQLGAKKLTLDLRDNPGGYLNVAERIADAFLPEGKLILFTRNKKGQTDSIYATSRGRFENKPVYVLINERSASASEIIAGALQDNDVGTIVGRRSFGKGLVQREMDLGDGSAVRLTVSRYYTPTGRSIQRDYQNGSQDYYDRFTERYHNGELTSVDSIRVADSLKFTTPGGKVVYGGGGIVPDVFVAIGSNEEEALAALDSRGYFSRFVFDHLEEDRNRYADYDEMRFYREFRTDDILFEHMVDFLSAFNLRIDYYEHEDLLKTYIKAGIAEQLFSPDMKARILAPTDAMLLKVRDLDRPRLNPEEGPESRPDS

SEQ ID NO: 12431 - protein, 504 aa, Burkholderia sp. 383
MLHRRALVLSILVLASCGLGYELISSALSSYLLGDSILQFSSVIGCYLFAMGIGSWLAKFVEDDDVLDRFVDIELLVGLLGGVSAALLFAVFAWLAAPFRAALYALVLALGMLIGMEIPLVMRAFQQRRQAFRHTVSEVLTFDYLGSLAVSLIFPLVLAPRLGLLRTSFLFGLLNAFVALWTTHLFRDEIRNVRGKLMRASLVIGLLVAGFALSDRITHWAEHGVYGDETIYSETTPYQRIVLTQWHDDMRLYLNGNLQFSSRDEHRYHEALIHPTIDALPWAKRVLVLGGGDGLAVRELLKHRNLEQITLVDLDPAMTKLFSTSAPLVKLNQGSLKDPRVHVINDDAVRWLESNADVYDAIVVDFPDPTNFGLGRLYSVPVFRLLARHLSENGYAVIQSTSPYFAPHAYWTIIATLHEAGLNTWPYHCYVPSFGDWGFVIAGKRRDFTVPTHYSVPTRWLDAQTAAEMFHFPADMPALPMSPNELNDQPLVRRFDDDWKHVLR

SEQ ID NO: 12432 - protein, 1008 aa, Gloeobacter violaceus PCC 7421
MAILHGIWVHQPPRAGLFLWGETWRQVAKRRKRSEAPAPHPYVQQPAELSPRLAAQFPQIPLSLLVPETLALQLPATVENVVYSASIAPEGKLLELEPWLVEGFWLDGHQAFELLLGVPLGGGDASIGDDLRFWSQCARWVLDLLVRAKYLPDLESGDGQEIPTARWVPLLDSAVDQARLKEFAARLPGACRAATPELSPHQILKSFLSAMLDARVRTLLACEPPDPRTLPAGAVRPWLLALAHAQPQLKSPDPETPALAEALATWRAPLSYQVRSRTCFRLQPPEESQGEWKLHFLLQTGDDPDSLMAAQQVWSSAGELQEVFLAGLGLASRIFVPVERGLLVPQPTCCTMSTVEAFQFLKAATWRLRDSGFGVLLPESLADAGSLRNRLGLKLEANAPGRNGSGLGMQSLLAFKWELSLAGKTLSRAEFDRLAASSEPLVKVNDNWVELRPQDVRAAHSFLQSRKDQVGLSLEDVLRLNFGDTPKIDGLPIVNFDSSGPIQQLLETLTDQRKLTPIDEPPGFKGTLRPYQKIGVGWLAFLQKWGLGACLADDMGLGKTVELIAFLLFLKSKNELDGPILLICPTSVMGNWEREIKKFSPSLSVHVHHGARRPKGRNFVETAQKKQIIVSSYALVQRDSKDLKRVEWLGLVLDEAQNIKNPDAKQTQSIRELTARFRIALTGTPVENRLAELWSILDFLNPGYLGARNFFQRRFAVPIEKYGDRSSANALKALVQPFILRRLKSDPQIIQDLPEKQETNVFCPLTPEQAALYERVVNESLAKIEQSTGIQRRGTVLATLVKLKQICNHPSHYLGDDGPLANRSGKLSRLGEMLEEVLADEERALIFTQFAEWGHLLQAHLSRQLGSEVFFLYGGTSKNQREAMIERFQSDPQGPRIFILSLKAGGVGLNLTRANHVFHFDRWWNPAVENQATDRVFRIGQTKNVQVYKYVCTGTLEERINALIESKKALAEQVVSAGENWLSDLNTDQLRQLLVLDRSEIIDTEDTA

SEQ ID NO: 12433 - protein, 448 aa, Streptococcus pyogenes MGAS8232
MAITVADIRREVKEKNVTFLRLMFTDIMGVMKNVEIPATKEQLDKVLSNKVMFDGSSIEGFVRINESDMYLYPDLDTWIVFPWGDENGAVAGLICDIYTAEGKPFAGDPRGNLKRALKHMNEIGYKSFNLGPEPEFFLFKMDDKGNPTLEVNDNGGYFDLAPIDLADNTRREIVNILTKMGFEVEASHHEVAVGQHEIDFKYADVLKACDNIQIFKLVVKTIAREHGLYATFMAKPKFGIAGSGMHCNMSLFDNQGNNAFYDETDKRGMQLSEDAYYFLGGLMKHAYNYTAITNPTVNSYKRLVPGYEAPVYVAWAGSNRSPLIRVPASRGMGTRLELRSVDPTANPYLALAVLLEAGLDGIINKIEAPEPIEANIYTMTMEERNEAGIIDLPSTLHNALKALQKDDVVQKALGYHIYTNFLEAKRIEWSSYATFISQWEIDHYIHNY

SEQ ID NO: 12434 - protein, 536 aa, Triticum aestivum
MSLELSMALAAPPGGGLLAPPPPAPPGKEQQVAGVGILLQISMLVLSFVLGHVLRRHRFYYLPEASASLLIGLVVGGLANISNTETNTRTWTWFNFHEEFFFLFLLPPIICQSGFSLSPKPFFANFGAIVTFAILGTFIASIVTGMLVYLGGLTFLMYKLPLVECLMFGALISATDPVTVLSIFQELGSDVNLYALVFGESVLNDAMAISLYRTMSSVRSNAAGGENIFMMILQFLEIFVGSMSSGVGVGFISSLLFKYAGLDIDNLQNLECCLFVLFPYFSYMLAEGLGLSGIVSILFTGMVMKHYTYSNLSDNSQRFVSAFFHLLSSLAETFVFIYMGFDIAMEEHSWSHVGFIIFSIIFIIVARAANVFSCAYLVNISRPEHRRIPLNHQKALCFSGLRGAMAFALALQSVHELPEGHGKTILTATTAIVVLTVLLIGGSTGTMLEALDVIGDENTSIETYEDNNGYIPPTYEEGTSSGGGLRMKLKEFHKSTTSFTALDKNYLTPFFTSQTDEDADDFGDQPQNQRRGFYDQ

SEQ ID NO: 12435 - protein, 165 aa, Leptospira interrogans serovar Copenhageni str. Fiocruz L1-130
MRFDMNDTLYDLTATLNNGKEQKLENYKGKVLLIVNTASECAFTPQYAGLQNLYSKYKTEGLEILGFPCDQFKHQEPGSDETIKNFCQKNYGVEFPIFKKIEVNGDNAHPVFRFLRNKASGFFGNSIKWNFTKFLVDKQGNVIKRYSPITTPENIEKEIQNLLKR

SEQ ID NO: 12436 - protein, 645 aa, Glycine max
PSIAKEEATKLGTVIGIDLGTTYSCVGVYKNGHVEIIANDQGNRITPSWVAFTDSERLIGEAAKNLAAVNPERVIFDVKRLIGRKFEDKEVQRDMKLVPYKIVNKDGKPYIQVKIKDGETKVFSPEEISAMILTKMKETAEAFLGKKINDAVVTVPAYFNDAQRQATKDAGVIAGLNVARIINEPTAAAIAYGLDKKGGEKNILVFDLGGGTFDVSILTIDNGVFEVLATNGDTHLGGEDFDQRIMEYFIKLIKKKHGKDISKDSRALGKLRREAERAKRALSSQHQVRVEIESLFDGVDFSEPLTRARFEELNNDLFRKTMGPVKKAMEDAGLQKSQIDEIVLVGGSTRIPKVQQLLKDYFDGKEPNKGVNPDEAVAYGAAVQGSILSGEGGEETKDILLLDVAPLTLGIETVGGVMTKLIPRNTVIPTKKSQVFTTYQDQQTTVSIQVFEGERSLTKDCRLLGKFELSGIPPAPRGTPQIEVTFEVDANGILNVKAEDKGTGKSEKITITNEKGRLSQEEIERMVREAEEFAEEDKKVKERIDARNSLETYVYNMKNQISVKDKLADKLESDEKEKIETAVKEALEWLDDNQSMEKEDYEEKLKEVEAVCNPIISAVYQRSGGAPGGGGASGEEDEDDSHDEL

SEQ ID NO: 12437 - protein, 993 aa, Cryptococcus neoformans var. neoformans JEC21
MTIGTIKPRRSLGAIIDSIPSQQEYVPDSCSENSGSDSERDAPIPTLKPIPLTPLPPRSARLISELGADPIKIGKKNEREEARAVPGDGKIDTKVHGAVDTLLAPVLYFAVQWRKPQFKKHKTWDGDANIKVEGNRIVMLDEDGNQMAATNVGDKVIKPEAEFKIGGYEIMVDHVLQQDQFKASTSILNRPKVIPTIKSTGYRPASFTKPFRPPIQKANLTPAKPSTMEIVNNEQHQSPISSSSKRSIPTPAAAQRAVAASSFYTRQSPKPFNERIVLGEKSNKERLQWGGALFNPHAEGAVVMPRPGEKLAKLKGTTIVDVVLDPVLGNLLRDHQKEGVKFMYSCVMGMTGAEGEGCILADEMGLGKTLQTIALIYTMLKQSPFANQTSIIGKAIIVCPVTLVDNWRKEFKKWVDRRVNVLVADVLSGTPVQNDLGEYWAMVNFACPGVLGKYSAFAKHYEKPILKSRTPNCSAKDVELGRERANDLAKLSKEFVLRRTAAVLENYLPPKYEYVIFIAPSLLQLSVLSNLLDPNIVGSFIRGYGAQSLALIDLMRKISNSPMLLKRRDDELARANDDLGSATSAAISAIPSDANINDVTTSGKMLMLDKMLHSIYQCTEEKVVVVSNWTSTLDLIQGLCKLKRYNYLRLDGSTPPKQRQELVDRFNKDKGRQESFVFLLSAKAGGVGLNLIGGSRLILFDSDWNPSTDLQAMARIHRDGQKRPVYIYRFLTTNAIDEKIYQRQITKTGLSDQMMDQTRTEKQTSKDSFSAAELRDIFTLNVRTDGCQTHDLLGCQCTRKPVGETRDIAEGEHNSKDLPDNASEESDNDENDHPTFVSANKYDPEPTPKMRRKAIQEQKNKLAALKHWAHFDPFEPASFRGIQDSLLYNVLFDSWETDSAPLSQNIKTYGSLAFESPHERHEDDLDSDEEVLVPKKRKSGIVRSGVMLKKARAADEENTGFSQRRHNLRSIAESGGTGRVTFVFEKISKSTIA

SEQ ID NO: 12438 - protein, 159 aa, Synechococcus sp. RS9916
MAPSVNGVTVRSADGSDKSLGDFAGNVLLIVNVASRCGFTKQYAGLEAINQSYGAKGLKVLGFPCNDFGAQEPGTLEEIKTFCSTTYGASFELFDKVHATGTTTEPYTTLNQMEPAGDVAWNFEKFLVGKDGTVIARFKSGVDPESAELKSAIEAALAA

SEQ ID NO: 12439 - protein, 1471 aa, Arabidopsis thaliana
MEANEESLKGKIEKLEGKEVIVESKEDEMDIIIEENREAEQEVMEVKARDGRGEQNDVLMEENNNQGEQKDEEMQDASSRSESSDFNSDEDEQILSRRDDELDLEKPLSEEEIDELISDLLAVESKAAEAQEALEKESLSKVESEVREELAQALRGDELDEAVAAEMMTFKDEWEATLDELETESATLLEQLDGAGIELPKLYEMIESQAPNGCYTEAWKQRAHWVGTQVTKETVESLANAERFLHTHRPVRKRHGKLLEEGASGFLEKKLADGAVKESLAGTSELDWSSLNKVFSEKRDESVSFGSKQWASVYLASTPHQAAAMGLEFPGVNEVEEIEEIDASLADPFLADAIDNERELALTEEQKTNYIRVKEEDDITCDRVLQLRLKRKRRKKRSKQVIRCAAENMDDDSVYLDGNNTTPNFAKDQVKSPETSTQVHNSEVNIEENGNFSNSDVDKMTPSTHINVDAKRDDSQNPANNFRCTACNKVAVEVHSHPLLEVIVCMDCKRSIEDRVSKVDDSLERHCEWCGHIADLIDCRTCEKLFCASCIKRNIGEEYMSEAQSSGWDCCCCSPIPLQRLTLELEKAMRDKKSIELSSDSSSDSSSDNNSVDTDADVNVTISSKKKSKKKIRRIIDDAELGKDTRTKIAIEKARQERLRSLQFSARYKTISSMGDVKSIPEGAEVEVLGDAHSGYIVNVVREIGEEAVRVPRSISAKLKVHQVTGIRFMWENIIQSISRVKSGDKGLGCILAHTMGLGKTFQVIAFLYTAMRCVDLGLKTALIVTPVNVLHNWRSEFEKWMPSEVKPLRIFMLGDVSRERRFDLLTKWRKKGGVFLMGYTNFRNLSLGRGVKDLNAARGICNALRDGPDILVCDEAHIIKNTKADTTQALKQVKCQRRIALTGSPLQNNLMEYYCMVDFVREGFLGSSPDFQNPIENGQHMNSTAEDVKIMNQRSHILYEQLKGFVQRMDMNVVKKDLPPKTVFVISVKLSPLQRILYQRFLELYGFSDGRTDERMRKNFFAAYQVLAQILNHPGIPQLRSEDSKNGRRGSIVDIPDDCSSDENIDYNMVTGEKQRTMNDLQDKVDGYLQKDWWVDLLQKNNYKVSDFSGKMILLLDILSMSADVGDKALVFSQSIPTLDLIELYLSRVPRHGKQGKFWKKGKDWYRIDGKTESSERQKLVDRFNEPDNKRVKCTLISTRAGSLGINLYAANRVIIVDGSWNPTYDLQAIFRAWRYGQKKPVFAYRLMARGTIEEKIYKRQVTKEGLAARVVDRQQVHRTISKEEMLHLFEFDDDDEKSEAVTEISKQNEAGHSNLVEQAILWTKKATLSRVGGDKLMENLLQRHGPNFHEHETLLQENEEERLTKEEKDMAWEVYRRALEWEEVQRVPFSESPVVPKPSPSTQTEPLPQPKGFNRSRFVNRNCTRIAHQLTLISQGLKVGSSTVCGECGRVIRWEDVIPASKLSAVIVN

SEQ ID NO: 12440 - protein, 159 aa, Frankia sp. FE59
ITKEQYSRDPRNIAKKAEAYLRGTGIADTAYFGPEAEFYIFDDVRYDYNPYGSMHAVDSVEAAWNTARKEEGGNLGYKPRFKGGYFPVPPTDHFTDLRSEMTRVLFEVGITVEMQHHEVGTAGQAEIDIRYDTLLKTADNLMLYKYVIRNVARSRGKTV

SEQ ID NO: 12441 - protein, 1035 aa, Lentisphaera araneosa HTCC2155
MASDTPANDDLPWAKDWPGIQGFSSSFPRSFPSMIRRLGPAALKITLFKAEAKLISLTIAGRYVCRWSWIDEQWKQSCTCQPGKSFCLHSYILVNQVDKLLGKKFQVPDFRKKVSASPRPAQNRYQATLPQSNAERPSSPTPVKFEKWKLTVEIERNYSDSQAAIRFYQDFDNDRKLCVMQNLYNFSAQCYNKRGIASELETLDARFLGWLFDQVKPYRIYRSQEKLLKITRKKLDEWLNTWKEFPGRFIDRLTGDAVLTHCEFRAFIEPEINDKKVRLHCLIGPNREQAKTFHHYVGKFKDRETLALGGGNIPFRCHVPMKVLLHCFKSSKVPTIPLDQACKFLPELLQGHTEVLSGEFVSQQGQEEAPLKARLEQQRIIITQEISSTKLQLKNGKFIVKGKLPNSHFPELKNKLKGENINADEFSILLNQNKLEQFLDAWPLSAQLDRSLQKLREPQSIQKQFSIIDNSDGSQRLEVHWNISGQSISSRDLEHAAQSSGSFFRSSNGDWFNLDKEHLNSHTQLLEEYGISPAGSPRIHPLNIAQLPLDDLPVSPNSKDALQSIIQRYQSSEAPPAKVNCELRKYQVEGYQFLSSLAQNQCGALLADDMGLGKTVQTLASMSHSQAANLIVCPSSLLDNWQKEAQKFTPHLETHIIRGNLDKRGEVYENFEQKKGLFIISYSLVRNDLNTLKKLKFEHIVLDEAQQIKNSESQVSRAVRQLKSKRRIALSGTPIENSADDLWSIMEFLNPGLNGSKEDFRLLCQGDSASLVIKRLKPFMLRRTKKMAAPELPPKTFIPLDIPMSEVQIDLYQREMRQARQSLKAGNAMNVLASLTRLRQLSCHSAFGCPEEYRPDPDLPLAQRSPKAAAFIEKAKDLMAEGHSCLFFSQFTGILKEIEKELHNEHIKTHMITGETPSQKRSKIVDEFSESPDASVFLLSLKAAGTGLNLTRASYVFIFDPWWNPAAENQAIDRSHRIGQDNPVIIYRMISADSVEEKVAALQAEKQKLFDEIIEQDEFKASSKLQMSDLASLLN

SEQ ID NO: 12442 - protein, 159 aa, Prochlorococcus marinus str. MIT 9215
MQVDVQNTSVISADGSSIKLGEYSGEVILVVNVASYCGNTAQYEDLQKLHDLYSSKGLRILAFPCNDFGKQEPDSLSEIKDFCTTKFGVKFEIFEKVHAKGNTTEPYTTLNKAEPEGDVEWNFEKFLIGKDSKVIARFKPGIKPFDENLIAAIEVALDS

SEQ ID NO: 12443 - protein, 162 aa, Glycine max
  misc_feature (138)..(139): Xaa can be any naturally occurring amino acid
  misc_feature (142)..(142): Xaa can be any naturally occurring amino acid
  misc_feature (151)..(151): Xaa can be any naturally occurring amino acid
  misc_feature (157)..(157): Xaa can be any naturally occurring amino acid
MSAAEGAVVFSEEKEALVLKSWAIMKKDSANLGLRFFLKIFEIAPSARQMFPFLRDSDVPLETNPKLKTHAVSVFVMTCEAAAQLRKAGKITVRETTLKRLGGTHLKYGVADGHFEVTRFALLETIKEALPADMWGPXXRNXWGEAYDQLXAAIKQXMKPFE

SEQ ID NO: 12444 - protein, 491 aa, Listeria monocytogenes str. 4b H7858
MKLNELMQAIPVFTGEASETIEISHIAQDSRKVKPGTLFICIDGELVDGHQFASRAVELGAVAIIAEKQLDVSIPVIYVRDSKRAMAMLADYFYGSPTQALKLVGITGTNGKTTVSHLVEQIVRENGEQTGLIGTMYRKIGDQILETKNTTPDSLTLQETFRDMLLSGVSTAVMEVSSHALVQGRVYGSDYDVAVFMNLSQDHLDYHHTMEEYANAKSLLFAQLGNSYHTSNPKIAVLNADDEESVRMQKATAAHVITFGIKQQADFKASNIRITSHGSTFDLRTPIGNFTLKIKMIGNFSVYNVLAAIATSFALHIPMEKAIKTVESIPGVKGRFELVHAGQEFPVIVDYAHTPDGLLNVLETIAEFAEKRVFVVVGCGGDRDKGKRPQMAKIAVDYATNPIFTSDNPRSENPRAIIEDMIQGVPYSDSYVVHENRRDAIRFAVNEAEAGDVILIAGKGHEDYQVIGDEVIDFDDRVEARIAIEKKLGLA

SEQ ID NO: 12445 - protein, 186 aa, Brassica napus
  misc_feature (103)..(103): Xaa can be any naturally occurring amino acid
  misc_feature (110)..(110): Xaa can be any naturally occurring amino acid
  misc_feature (131)..(131): Xaa can be any naturally occurring amino acid
MAYSMLSSAAVVTSPAQATMVAPFTGLKSSSAFPVTRKANNDITSIVSNGGRVSCMKVWPPVGKKKFETLSYLPDLTEVELGKEVDYLLRNKWIPLCWNFELXEHGFVYXREHGKHPPDTTDGRYWTMWEXLPCSGCTDSAQVLKEVQECKTEYPNAFIRIIGFDNNRQVQCISFIAYKPPSFTGA

SEQ ID NO: 12446 - protein, 401 aa, Shewanella sp. MR-7
MKQLIRNIVCLGLGLSLGLSISLSSQENAKSYQSDFDYPLLQDVLETVETYYVKTVSKDELVQAAIKGIFEHLDPYSSFLNHQELLDLKDSNRGEYFGFGFEVASDKDHISIIAPFANSPAEQAGIQAGDIIIKLNDTPTTETNLADILNQIKQHSLSNQSIRLTLKHRNDAVEFEVSLKPSTITIQSVASKLLDGNIGYVRLSSFQENSTEDMVRSLSQWQNAHLTGLILDLRNNPGGLLDQAIKIADLFLAKGRIVSTSGRFFDANSDYYASPQTMLTNVPMLVLINKGSASASEVLAAALQENGRAKLLGETSFGKGTVQSLIPILNDGNAIKLTIAQYNTPRGENIHDIGIVPDIKVAAETGSNQKNMAIIDTISARTDVSQDSLVTSAIAWMQHHD

SEQ ID NO: 12447 - protein, 469 aa, Enterobacter gergoviae
MSAEHVLTMLNEHEVKFVDLRFTDTKGKEQHVTIPSHQVNAEFFEEGKMFDGSSIGGWKGINESDMVLMPDASTAVIDPFYEEPTLIIRCDILEPGTLQGYDRDPRSIAKRAEEYLRATGIADTVLFGPETEFFLFDDIRFGASISGSHVAIDDIEGAWNSSTKYEGGNKGHRPGVKGGYFPVPPVDSSQDIRSTMCMIMEEMGLVVEAHHHEVATAGQNEVATRFNTMTKKADEIQIYKYVVHNVAHRFGKTATFMPKPMFGDNGSGMHCHMSLAKNGTNLFSGDKYAGLSEQALFYIGGVIKHAKAINALANPTTNSYKRLVPGYEAPVMLAYSARNRSASIRIPVVTSPKARRIEVRFPDPAANPYLCFAALLMAGLDGIKNKIHPGEAMDKNLYDLPPEEAKEIPQVAGSLEEALQALDADREFLTAGGVFTNDAIDAYIALRLEENDRVRMTPHPVEFELYYSV

SEQ ID NO: 12448 - protein, 712 aa, Debaryomyces hansenii CBS767
MPVNQKKTSIIAKRQRSIFEFTQTGNDIDVQNSFNPCEVIDLTDDAESFGVKLEQEEINTGGEIEAMGERELDVDAVNCPMCNRSLVDFSMDNRILHIEECLSLVTLKEDVPTITSESSDLKKEEINGTNKSDVDTGRNKRKNRHVLPSDKEKEKYLNKKAKIEHSKPKVIKPPASISASRSKAQIPDVKVLTFPASVNSNYQIAVDAFNYSPHELINKYFLTHFHSDHYGGITKKWCYERVFKDGDDFEDESKYKKIIFCSTITAKLLSLRFRIDPKFIMPLETNRRYLIQSFDTDVETEDGFIQTDDLMLPGLFVTPITANHCPGSVIFLFESLSNNGQRLRVLHCGDFRVNREILDHPRLLTFNIANQGDLCLDKVYLDTTYMSPSYNFPKQELVCNTVSDMFYDLIYSQGETETTDSLFTTWFGVLKQSRITDFITKRDNQYKKKKFLVLIGTYVIGKERLAISILQRLNNCPIYVLTINSRNDKVDLVKSFDDNYLNQVLTTDDLGGSDSECMVHLVPMKIVSSLEELSNYFNHNRYFERFERCVGLRPTGWSFLNKYASTYKDEQDSNMQHSSDLNRLSSSCQDLVKIMKTEPTFSFIENILPQSPLLSLISKSKKVNHDESLYRIYTLPYSEHSSFRELSFFAIFLKIKVIIPTVNISDESSIIKMDSIIKSWELIREYKMNPGSTQELESNVARGIQDLCIEDF

SEQ ID NO: 12449 - protein, 454 aa, Desulfitobacterium hafniense Y51
MNLHEKKVLVVGAGRSGLAAVKRLKALGARIVLTDQKELAQLSGISELGLPDGQLVLGHIPQWHEVASEVIVLSPGVSPKLPFIQEGIAQGALIWSEVELALRDHPAFKIGVTGTNGKTTTTTLIGELAKRTGRPTLVAGNIGVALSDQVEDLDGEGIIVAELSSFQLEWVDSLRMNVGILLNVTPDHLDRHGTLDNYLAAKARIFEKQSPSDCAILNWDDARVRALAPHLKARVVFFSPTSLLAEGYGVRGDEVVLAEGGKITPIIARGELQLRGSHNLENIMAAIAAVRELGLSWEEITQGLRDFKGVEHRQEVVGTYEGILFINDSKGTNPDASEKALYAFEEPIVLIAGGKNKGLDFHDFMKTIKKQVKSLVLVGTAAAEMEQAAKDTGIQNYLRAGTFAEAVELAIAEAEPGDVVLLSPACTSWDMFKSYEERGEFFKELVRRHYREPI

SEQ ID NO: 12450 - protein, 496 aa, Desulfitobacterium hafniense Y51
MMRVKSVRKRLSEIASGIEIVNHVGDQDTLIQGMVMDSRQVQPGDLYACVPGMNVDGHDFAAQAIAQGAAALLVERILPLDIPQLQVKKVREVMGNLAANLYDHPAAKLEVVGVTGTNGKTTITYLVESIAAGEGKKVGLIGTLGARIAGRELPGNRTTPEAIDLQKLLKEMVDEGVQLAVMEVSSHALVFGRVTGCEFDAGIFSNLTQDHLDYHKTMEEYLQAKAQLFSGLTGVKEPKVGVVNGDDPAAETLIRLSAAPVVTYGVNADLLDYRAEDILLTADGVKFTVRFKGGESQVEYSTPGMFSVYNALAAFAWGVESGRSPGQVREALAAVQGVPGRFESVRMGQPFQIIVDYAHTPDGLENVCRTAQEFTQGRLITVFGCGGDRDKGKRPQMGAIAEELSDHVIVTSDNPRTEDPRQIIRDILEGIEGIDYTANVNRREAIECACLLAKEGDTVLIAGKGHEDYQIIGKDVFPFDDREVAREALRRLGYVG

SEQ ID NO: 12451 - protein, 209 aa, Arabidopsis thaliana
AVVNDATSVVLFNAVQKIQFESLTGWTALQVFGNFLYLFSTSTLLGIGVGLITSFVLKTLYFGRHSTTRELAIMVLMAYLSYMLAELFSLSGILTVFFCGVLMSHYASYNVTESSRITSRQCIRQLHVFAMLSFIAETFIFLYVGTDALDFTKWKTSSLSFGGTLGVSGVITALVLLGRAAFVFPLSVLTNFMNRHTERNESITFKHQV

SEQ ID NO: 12452 - protein, 1050 aa, Debaryomyces hansenii CBS767
MNRVSKLWHSYKRHRVHGDTGLKIRNAIHRTTEKVYPYVKVVIPNFRAAHYTYILFMTFLGSVIFYPIRNIRYIDALFFTGCASTQAGLNTVNLNRLALYQQILIYIITTLTTPIFIHGSLLFIRLYWFERHFDNIKESSKLNNKMRRNATLAARTQSLDPTRLNTEVNRGLGLNNPQSSGPEPVIDEVAFSNSSSTLPASKHSSPPQNPSINSNNVNHISEPSDTDISSGVAPDSRNPINLSRPESPPRSLDGIRFGNLPQPSKIRQKEIEPSDMYMSIAMLQDNHKSERKDNGDEDDVLIIKSPNEIEKDSQNPIFTKKSQIHFNVNDKPIRKWKKKRRFSRGRQPWSKLKKTFSNSGVSPRKHVRSLSFTLLSNDDDDQSIDSETNNRTTDTDADDDNAIIDDDDDDDEDDGDDDDEDDGDDEDEDDDDEDDEDDDQDDEEDEYNRQNRHDDNLDDIERAQSNLVIPSSDATGGKKFTKRSNTLDVTPGENHELSHSPTFEKMIKSKMKKKKKPKQTKKQKLKYMKSPTVGLNSSLFSPNYNNGSDYDDSDDSDEDDDDEEEDGKSLLKVMSTNYLSWVPTVGRNSTFVHLSEEQKEELGGVEYRAIKLLIKIIVIYYIGFHILAFTCLLPYILYQPVYKADVINVGITPTWWAFFTAQSAFNDLGHTLTPNSMQSFDKSVYVMVIVAFFIVIGNTGFPVMLRFIIWVLFKLSKPMSLFNESLGFLLDHPRRCFTLLFPSVPTWWLFIILVVLNAVDLILFIVLDLNNKYLESTPIGLRVMDGLFQAFSTRTAGFAVVDLSELHPAVQVSYMLMMYISVLPLAISIRRTNVYEEQSLGVYLKDNNDDNDDAPDDKTPRNFIGAHLRNQLSFDLWFIFLGLFIICIAEGPKLNKNNYRFSIFTILFEIISAYGTVGLSLGYPGVDVSLSGEFTVLSKLVMIAMVIRGRHRGLPYALDRAIMLPDDNMQKRDNLQENHAIRRHQTMETSNSLDDGNAFRRAFTRRASSFGFDNTNILGRRKSSVRSSKPKPETPHYIVTTESHEMDDLA

SEQ ID NO: 12453 - protein, 285 aa, Xanthomonas campestris pv. campestris str. ATCC 33913
MSTNDNWYIEHFQPTGSAIGYRISGKLDEVQSPFQKIEIYQTTDWGKLMIIDGAVMLTSRDNFFYHEMISHPALFTHAAPKRVVIIGGGDCGTLREVLKHPGVESATQCDIDEQVTRMSEKYFPELCDSNDDARAELLFDDGVAYMANCPAGSVDIVIVDSTDPVGPAEGLFNKSFYESCFKALKDDGILVQQSESPLALLDLIKEMRTEMGKAGFQSFKTLPFPQPCYPTGWWSVTMASKQANADFAFRQADAQAKGFDTLYYTAHLHTGVLVAPPFVAKALGE

SEQ ID NO: 12454 - protein, 1468 aa, Saccharomyces cerevisiae YJM789
MAAKDISTEVLQNPELYGLRRSHRAAAHQQNYFNDSDDEDDEDNIKQSRRKRMTTIEDDEDEFEDEEGEEDSGEDEDEEDFEEDDDYYGSPIKQNRSKPKSRTKSKSKSKPKSQSEKQSTVKIPTRFSNRQNKTVNYNIDYSDDDLLESEDDYGSEEALSEENVHEASANPQPEDFHGIDIVINHRLKTSLEEGKVLEKTVPDLNNCKENYEFLIKWTDESHLHNTWETYESIGQVRGLKRLDNYCKQFIIEDQQVRLDPYVTAEDIEIMDMERERRLDEFEEFHVPERIIDSQRASLEDGTSQLQYLVKWRRLNYDEATWENATDIVKLAPEQVKHFQNRENSKILPQYSSNYTSQRPRFEKLSVQPPFIKGGELRDFQLTGINWMAFLWSKGDNGILADEMGLGKTVQTVAFISWLIFARRQNGPHIIVVPLSTMPAWLDTFEKWAPDLNCICYMGNQKSRDTIREYEFYTNPRAKGKKTMKFNVLLTTYEYILKDRAELGSIKWQFMAVDEAHRLKNAESSLYESLNSFKVANRMLITGTPLQNNIKELAALVNFLMPGRFTIDQEIDFENQDEEQEEYIHDLHRRIQPFILRRLKKDVEKSLPSKTERILRVELSDVQTEYYKNILTKNYSALTAGAKGGHFSLLNIMNELKKASNHPYLFDNAEERVLQKFGDGKMTRENVLRGLIMSSGKMVLLDQLLTRLKKDGHRVLIFSQMVRMLDILGDYLSIKGINFQRLDGTVPSAQRRISIDHFNSPDSNDFVFLLSTRAGGLGINLMTADTVVIFDSDWNPQADLQAMARAHRIGQKNHVMVYRLVSKDTVEEEVLERARKKMILEYAIISLGVTDGNKYTKKNEPNAGELSAILKFGAGNMFTATDNQKKLEDLNLDDVLNHAEDHVTTPDLGESHLGGEEFLKQFEVTDYKADVDWDDIIPEEELKKLQDEEQKRKDEEYVKEQLEMMNRRDNALKKIKNSVNGDGTAANSDSDDDSTSRSSRRRARANDMDSIGESEVRALYKAILKFGNLKEILDELIADGTLPVKSFEKYGETYDEMMEAAKDCVHEEEKNRKEILEKLEKDATAYRAKLKSGEIKAENQPKDNPLTRLSLKKREKKAVLFNFKGVKSLNAESLLSRVEDLKYLKNLINSNYKDDPLKFSLGNNTPKPVQNWSSDWTKEEDEKLLIGVFKYGYGSWTQIRDDPFLGITDKIFLNEVHNPVAKKSVSSSDTTPTPSKKGKGITGSSKKVPGAIHLGRRVDYLLSFLREGLNTKSPSADIGSKKLPTGPSKKRQRKPANHSKSMTPEITSSEPANGPPSKRMKALPKGPAALINNTRLSPNSPTPPLKSKVSRDNGTRQSSNPSSGSAHEKEYDSMDEEDCRHTMSAIRTSLKRLRRGGKGLDRKEWAKILKTELTTIGNHIESQKGSSRKASPEKYRKHLWSYSANFWPADVKSTKLMAMYDKITESQKK

SEQ ID NO: 12455 - protein, 81 aa, Physcomitrella patens subsp. patens
GEDESVDTKKPVTGRGSTAKRSRAAEVHNQSERRRRDRINEKMRALQELIPNSNKTDKASMLDEAIEYLKMLQLQLQVCAV

SEQ ID NO: 12456 - protein, 552 aa, Arabidopsis thaliana; identical to SEQ ID NO: 11668

SEQ ID NO: 12457 - protein, 642 aa, Neisseria meningitidis FAM18
MAKVIGIDLGTTNSCLAISENGQTKVIENAEGARTTPSVIAYLDGGEILVGAPAKRQAVTNAKNTIYAAKRLIGHKFEDKEVQRDIESMPFEIIKANNGDAWVKAQGKELSPPQISAEVLRKMKEAAEAYLGEKVTEAVITVPAYFNDSQRQATKDAGRIAGLDVKRIINEPTAAALAFGMDKGDNKDRKVAVYDLGGGTFDISIIEIANLDGDKQFEVLATNGDTFLGGEDFDQRLIDHIIAEFKKEQGIDLKQDVMALQRLKEAAEKAKIELSSGQQTEINLPYITMDATGPKHLAMKITRAKFESLVEDLIARSIEPCRTALKDAGLSTSDIDDVILVGGQSRMPKVQEAVRDFFGKEPRKDVNPDEAVAVGAAIQGEVLSGGRSDVLLLDVTPLSLGIETMGGVMTKLIQKNTTIPTKASQVFSTAEDNQSAVTIHVLQGERERASANKSLGQFNLGDIAPAPRGMPQIEVTFDIDANGILHVSAKDKGTGKAANITIQGSSGLSEEEIERMVKDAEANAEEDKKLTELVASRNQAEALIHSVKKSLADYGDKLDAAEKEKIEAALKEAEEAVKGDDKAAIDAKTEALGAASQKLGEMVYAQAQAEAQAGESEQANASAKKDDDVVDADFEEVKDDKK

SEQ ID NO: 12458 - protein, 482 aa, Clostridium acetobutylicum ATCC 824
MKLKKIIGDVKYELICGDLNVEIDNLNYDSRKVNEKGLFFCIEGYTSDGHDFIDKAVEKGADVIVCTKVPKKLPNCTVVKVEDGRKAMAVMGANFYDNPSHKLKLIGITGTNGKTTSTYMMKSMLESSGYKVGLIGTIANYIGDKKIESHRTTPESLELQKLFSDMVHDKIDYCVMEVSSHSLYLDRVYGIVFEEGIFTNLTQDHLDFHKTFENYYKAKMILFKNSKRSIINIDDKYGERVFKDAGNDKITYGLTEKADLKAENLKMTSRGTEFDLCYRGLREHVKINIPGKYNVYNALGSVAACLNEGISIEKVKDGLNKLSSVPGRCEIVTHNTNLDFDVVLDYAHTPDGLEKVLKASREFTKGRLISVFGCGGDRDKTKRPIMGEIGSKLSDIAVITSDNPRSENPEEIIKDIVQGIKTDNYVIVENRKEAIKKAMLMAKKDDVIVLAGKGHENYQILGDKTIHFDEKEIVSEFIKELF

SEQ ID NO: 12459 - protein, 546 aa, Glycine max
MGFEISTVVSKLQTLSTSDHASVVSMNLFVALLCGCIVLGHLLEENRWMNESITALLIGVCTGIVILLFSGGKSSHILVFSEDLFFIYLLPPIIFNAGFQVKKKQFFVNFMTIMLFGAIGTLISCTIITLGATQIFKRLDVGPLELGDFLAIGAIFAATDSVCTLQVLNQDETPLLYSLVFGEGVVNDATSVVLFNAIQSFDLNQIDPSIAGHFLGNFLYLFIASTMLGVLTGLLSAYIIKKLYIGRHSTDREVALMMLMAYLSYMLAELSYLSGILTVFFCGIVMSHYTWHNVTESSRITTKHSFATLSFVAEIFIFLYVGMDALDIEKWKFVSDSPGTSVATSSVLLGLILLGRAAFVFPLSFLSNLAKKSPNEKISFRQQVIIWWAGLMRGAVSIALAYNQFTMSGHTSLRSNAIMITSTITVVLFSTVVFGLLTKPLIRLLLPHTPHHKESSITIITDPSTPSPKSVTIPLLGSAQESEVDIDGHDIHRPSSIRALLTTPTHTVHRLWRKFDDAFMRPVFGGRGFVPVEPGSPTERNGHQWR

SEQ ID NO: 12460 - protein, 159 aa, Frankia sp. FE56
ITKEQYSRDPRNIAKKAEAYLRGTGIADTAYFGPEAEFYIFDDVRYDYNPYGSMHAVDSVEAAWNTARKEEGGNLGYKPRFKGGYFPVPTTDHFTDLRSEMTRVLFEVGITVEMQHHEVGTAGQAEIDIRYDTLLKTADNLMLYKYVIRNVARSRGKTV

SEQ ID NO: 12461 - protein, 192 aa, Arabidopsis thaliana
MPTLYKKAGCQFQLTTMAESQTGGGGGGSHESGGDQSPRSLNVREQDRFLPIANISRIMKRGLPLNGKIAKDAKETMQECVSEFISFVTSEASDKCQREKRKTINGDDLLWAMATLGFEDYIDPLKVYLMRYREMEGDTKGSGKGGESSAKRDGQPSQVSQFSQVPQQGSFSQGPYGNSQGSNMMVQMPGTE

SEQ ID NO: 12462 - protein, 165 aa, Candida glabrata CBS 138
MDSQSSFYDLSPHDKDNNEFPFSNLKGQVVLIVNVASKCNFTPQYNDLQYLHEKYSYRGLKIIGFPCNQFGQQEPENDEVIQKFCLSNYGVSFKILKKIKVNGPNADPVYTYLKNEMPSQIGLKVIRWNFEKFLVDKHGRVRHRYSSLTSPKSLQRTIDQLLDDK

SEQ ID NO: 12463 - protein, 159 aa, Frankia sp. FE41
ITKEQYSRDPRNIAKKAEAYLRGTGIADTAYFGPEAEFYIFVDVRYDYNPYGSMHAVDSVEAAWNTARKEEGGNLGYKPRFKGGYFPVPPTDHFTDLRSEMTRVLFEVGITVEMQHHEVGTAGQAEIDIRYDTLLKTADNLMLYKYVIRNVARIRGKTV

SEQ ID NO: 12464 - protein, 910 aa, Arabidopsis thaliana
MEEEDEEILSSSDCDDSSDSYKDDSQDSEGENDNPECEDLAVVSLSSDADRKSKNVKDLLRGNLVVQRQPLLPRVLSVSDGAAVCRKPFKPPCSHGYDSTGQLSRRLSARKRFVPWGSSTPVVVALPTKLEASTNIERDEEEEVVCLPPDIEPLVLWQSEEDGMSNVTTIMVHSVLVKFLRPHQREGVQFMFDCVSGLHGSANINGCILADDMGLGKTLQSITLLYTLLCQGFDGTPMVKKAIIVTPTSLVSNWEAEIKKWVGDRIQLIALCESTRDDVLSGIDSFTRPRSALQVLIISYETFRMHSSKFCQSESCDLLICDEAHRLKNDQTLTNRALASLTCKRRVLLSGTPMQNDLEEFFAMVNFTNPGSLGDAAHFRHYYEAPIICGREPTATEEEKNLAADRSAELSSKVNQFILRRTNALLSNHLPPKIIEVVCCKMTTLQSTLYNHFISSKNLKRALADNAKQTKVLAYITALKKLCNHPKLIYDTIKSGNPGTVGFENCLEFFPAEMFSGRSGAWTGGDGAWVELSGKMHVLSRLLANLRRKTDDRIVLVSNYTQTLDLFAQLCRERRYPFLRLDGSTTISKRQKLVNRLNDPTKDEFAFLLSSKAGGCGLNLIGANRLVLFDPDWNPANDKQAAARVWRDGQKKRVYVYRFLSTGTIEEKVYQRQMSKEGLQKVIQHEQTDNSTRQGNLLSTEDLRDLFSFHGDVRSEIHEKMSCSRCQNDASGTENIEEGNENNVDDNACQIDQEDIGGFAKDAGCFNLLKNSERQVGTPLEEDLGSWGHHFTSKSVPDAILQASAGDEVTFVFTNQVDGKLVPIESNVSPKTVESEEHNRNQPVNKRAFNKPQQRPREPLQPLSLNETTKRVKLSTYKRLHGNSNIDDAQIKMSLQRPNLVSVNHDDDFV

SEQ ID NO: 12465 - protein, 658 aa, Oryza sativa Japonica Group
MQLGLLLAALLLFTSSLAGSVAAAAPPPPAGAKGWWCQERRRRRHRDRDRPRHDVLGNRITPSWVAFTDGGERLIGEAAKNQAAANPERTIYDAKRLIGRQFSDAEVQRDMKLLPFAVVDRNGKPHVRVEVKDGDVRVFSPEEVSAMVLTRMKETAEAYLGEKVTRAVVTVPAYFNDAQRQATKDAGVIAGLTVDRIINEPTAAAIAYGIDKKGAEKNVLVFDLGGGTFDVSILAIDNGVFEVLATNGDTHLGGEDFDQRLMDHFVKVIRRKHGRDIAGDARALGKLRRECERAKRALSNQHQVRVEIESLFDGVDFSEPLSRARFEELNGDLFKKTMVPVRKAMADAGLGKGDIDEIVLVGGSTRIPKVQQLLKDYFGGKEPNRGVNPDEAVAYGAAVQASIISGHVDENTESMILLDVAPLTLGLETAGGVMTKLIPRNTVVPTKKTQVFTTYKDRQTTVTIQVFEGERSMTRDNRLLGKFDLTGIAPAPRGAPQIAVTFEVDANGILSVLAADKATGRSEKITISGDDRKISQEEIDRMVREAEEFADEDRRHREQVDARNSLEAYVYNVKSTLGGKMADAMEGEEKEKVEEAVREAHEWLDGNPDAGKEEYEEKLRELEDVCNPVMSAVYQRSGGGGGAPEDGNVDDEDDHDEL

SEQ ID NO: 12466 - protein, 161 aa, Candida glabrata CBS 138
MSPFHQLRPVDGQGNIYPFEMLKGKVVLIVNTASNCGFTPQYIELENMYQKYKNEGFEILGFPCNQFGHQEPGSDAEIQKFCSSKYKVTFPIMKKIDVNGPYEDPVFKYIKEQKPGMLGLKGIKWNFEKFLIDRQGNVVLRASSLTKPSTLNETIEKLLKN

SEQ ID NO: 12467 - protein, 159 aa, Frankia sp. FE1
ITKEQYSRDPRNIAKKAEAYLRGTGIADTAYFGPEAEFYIFDDVRYDYTPYGSMHAVDSVEAAWNTARKEEGGNLGYKPRFKGGYFPVPPTDHFTDLRSEMTRVLFEVGITVEMQHHEVGTAGQAEIDIRYDTLLKTADNLMLYKYVIRNVARSRGKTV

SEQ ID NO: 12468 - protein, 461 aa, Klebsiella pneumoniae subsp. pneumoniae MGH 78578
MLNEHEVKFVDLRFTDTKGKEQHVTIPSHQVNAEFFEEGKMFDGSSIGGWKGINESDMVLMPDASTAVIDPFYEEPTLIIRCDILEPGTLQGYDRDPRSIAKRAEEYLRATGIADTVLFGPEPEFFLFDDIRFGASISGSHVAIDDIEGAWNSSTKYEGGNKGHRPGVKGGYFPVPPVDSSQDIRSTMCMIMEEMGLVVEAHHHEVATAGQNEVATRFNTMTKKADEIQIYKYVVHNVAHRFGKTATFMPKPMFGDNGSGMHCHMSLAKNGTNLFSGDKYAGLSEQALFYIGGVIKHAKAINALANPTTNSYKRLVPGYEAPVMLAYSARNRSASIRIPVVTSPKARRIEVRFPDPAANPYLCFAALLMAGLDGIKNKIHPGEAMDKNLYDLPPEEAKEIPQVAGSLEEALQALDADREFLTAGGVFTNDAIDAYIALRMEENDRVRMTPHPVEFELYYSV

SEQ ID NO: 12469 - protein, 452 aa, Bacillus clausii KSM-K16
MTTQAPTRESLIETIRETIEKKNVELLHMQFVDLEGMLKHVTITAEQLDQAVNGKTMFDGSSITGFTPINQSDLYLSPDLTTFAVLPWTEEEGYSEARFLCSVKNPDGSDFEGDPRNILKKTVKRAADKGYSISVGPELEFFLFDTDEHGEPTMRTQDAGGYFEPSPKDDGEKVRLAIYKALRMMGFTIEASHHEVAVGQHEINFKYSDALGSADAATTYKWVVKTVAKQFGLHATFMPKPLGGANGNGMHVNMSLFDIEKQENSFYNEDDKNALSKTAYHFIAGLLDNVKDFVAITNPLVNSYKRLVPGYEAPCYIAWSASNRSALVRIPATRGPGTRVEIRCPDPSANPYLAFAVIASAGLDGVENEIECPASVDADIFSMSSAEIKERAIENLPTSLEDAINRFETGAIGRKTLGDHAFEEYIELKRSEWDDFRTSVHPWEVASYQSKF

SEQ ID NO: 12470 - protein, 386 aa, Aristolochia tomentosa; identical to SEQ ID NO: 9072

SEQ ID NO: 12471 - protein, 458 aa, Myxococcus xanthus DK 1622
MTGSSQPWRAALTAFFLLSAPWAHAAEPLRKDAGTAGRAEQAERDDATYRQLEVFARVLSYVENNYVESPDRQRLMYGAIQGMLETLDPHTVFLPPDVYREMKIDTSGEWGGLGIEIARKGERIVVVAPIDDTPAARAGIKAGDELVGIDGERTEGMDVGRALQKMRGPAGGRVLLTIMREGFSAPREIAIIRDHIRIVSVEGALHGGIGHVKVKNFQDRTDLYLRKELDRLRALNGGKELRGLVLDLRNNPGGLLDQAVAVSDRFLPGNLPIVSTRGRDGRSATVERSKDRDTEKDYPVVVLVNAGSASASEIVAGALQDHGRATILGAPTFGKGSVQTVIELEDGSGLKLTIARYYTPKGRSIQERGITPDFLVPDEPGGKVPRDVVREKDLRRHFRAEPTAATEPAAPEPRGLPENLKPWDVTAKLEDYPLRVALDYLHGMASAPARTPSRAAGR

SEQ ID NO: 12472 - protein, 157 aa, Frankia sp. FE39
ITKEQYSRDPRNIAKKAEEYLRGTGIADTAYFGPEAEFYIFDDVRYDYSPSGSMHAVDSVEAAWNTARKEEGGNLGYKPRFKGGYFPVPPTDHFTDLRSEMTRVLFDVGITVEMQHHEVGTAGQAEIDIRYDTLLKTADNLMLYKYVIRNVARSRGK

SEQ ID NO: 12473 - protein, 608 aa, Streptococcus pyogenes MGAS315
MSKIIGIDLGTTNSAVAVLEGTESKIIANPEGNRTTPSVVSFKNGEIIVGDAAKRQAVTNPDTVISIKSKMGTSEKVSANGKEYTPQEISAMILQYLKGYAEDYLGEKVEKAVITVPAYFNDAQRQATKDAGKIAGLEVERIVNEPTAAALAYGMDKTDKDEKILVFDLGGGTFDVSILELGDGVFDVLATAGDNKLGGDDFDQKIIDFLVAEFKKENGIDLSQDKMALQRLKDAAEKAKKDLSGVTQTQISLPFITAGSAGPLHLEMSLSRAKFDDLTRDLVERTKTPVRQALSDAGLSLSEIDEVILVGGSTRIPAVVEAVKAETGKEPNKSVNPDEVVAMGAAIQGGVITGDVKDVVLLDVTPLSLGIETMGGVFTKLIDRNTTIPTSKSQVFSTAADNQPAVDIHVLQGERPMAADNKTLGRFQLTDIPAAPRGIPQIEVTFDIDKNGIVSVKAKDLGTQKEQHIVIKSNDGLSEEEIDRMMKDAEANAEADAKRKEEVDLKNEVDQAIFATEKTIKETEGKGFDTERDAAQSALDELKAAQESGNLDDMKAKLEALNEKAQALAVKMYEQAAAAQQAAQGTEGAQANDSANNDDVVDGEFTEK

SEQ ID NO: 12474 - protein, 386 aa, Aristolochia manshuriensis; identical to SEQ ID NO: 9077

SEQ ID NO: 12475 - protein, 293 aa, Thermotoga sp. RQ2
MKEFERDLQPRQHLWYFEYYTGNNVGLFMKINRMIYSGQSDIQRIDIFENPDLGVVFSLDGITMTTEKDEFMYHEMLAHVPMFLHPNPKKVLIIGGGDGGTLREVLKHDSMEKAVLCEVDGLVIEAARKYLKQTSCGFDDPRTEIVIANGAEYVRKFKNEFDVIIIDSTDPTAGQGGHLFTEEFYQACYDALKEDGVFSAETEDPFYDIGWFKLAYKRISKVFPITKVYLGFMTTYPSGMWSYTFASKGIDPIKDFNPEKVKNFNKELKYYNEEVHVASFALPNFVKKELGLM

SEQ ID NO: 12476 - protein, 517 aa, Nostoc sp. PCC 7120
MNITELIKISIILLLVATGVALLSRRLRVPYVTGLVLAGLPITELLSRPIGLDPALVLNLFLPILIFEAGINTDISRLRSTFKPIALLAGPGAILSSAIIAILLKFGLGLNWIPAFLVGVILANTDTVSMIAVFKEIPVPSRLSTIVEGETLFNDAAALVSFNLILQVYSTGSLTLIEGIQQLLFISVGGCLVGLVLGYLSIPVFNRLDDPLSSLLLTVAVALGTFQVGQFLGVSGAVAVVVAGLIFGNFGLSGNTSASSRITLLSFWEYASFTANTFIFLLIGVEINLVTLWQTLPAILLAVLAYQVGRVLTIYPLLAGVRWFDRPIPLRWQHLLFLGNIKGSLSMALALSLPTTLPGRESLIAIVFGCVLVSLVGQGLSLPFLVKRLKLSKFSHSQQQVEELQAQLITAKAAQDELDALLKTGVLPKAVYEEMRSAYQVQVAGAEKALREFYNRRPDEFDHKSGAFSKLDAIRRRLLLAEKGALTEAMRKRILSQDIGQNRIQTINEKLLQLDDD

SEQ ID NO: 12477 - protein, 424 aa, Pseudomonas aeruginosa PAO1
MLDLVAAFIALTTLLTYVNYRFIRLPPTIGVMATALVFSLIVQGLSELGYPILEVEMQEIIRRIDFSEVLMTWFLPALLFAGALHVDLSDLRSYKWPIGLLATAGVLIATFVIGGLAYYTFPLFGWQVDFIYCLLFGALISPTDPIAVLGILKSAGAPKPLATTIVGESLFNDGTAVVVFAIILGILQLGEAPTVSATAILFVQEAIGGVVFGAVLGYGVFVMMRGIDQYQVEVMLTLALVIGGAALAARLHVSAPIAMVVAGLIIGNHGRHYAMSDETRRYVDKFWELIDEILNALLFALIGLELLLLPFSWLHVAAAFALGGAVLVSRLLTVGPAILVLRRFRGANRQVPAGTIRILVWGGLRGGVSVALALSLPLGPERDLILSLTYIVVLVSILLQGLSIGPLVRRIYAGQPLEKSEGAH

SEQ ID NO: 12478 - protein, 1284 aa, Vibrio salmonicida LFI1238
MYIHLYLRALMPLTVINPNTPNHIALYAALLCSQNTLNKVKKAMMQILAEPESPQSELNFTQALSDLCQQKMMYQEGNKLCFTPQGLTRALLAFGEVNNTQLEDLVESNIDNPKAPYVGLFAVASDYDWLMDLLHELNNPSDIGLAFDILCSDPISWQLNDRVWVNLFAQVMMVNWYKLLNDRPNKMEFTTAIEVMDEWRINQFGVNFQFDKWCFAPRIKSDYLLSASHFDSTYLRHRDAFRPINSDKISFTQLCDLALVSVLDPSLTSATKAKMSMAFYSMPELSTQYWRASINLITASDSVLAHYFEDPELWLDSLVDSRGQVAWGRMLIESIIAYRLRDNTNVWIGLMTLARTSEMRSLLDHPDNFALAQVAKNALTRLLDQDNPLIHVASPWQQWLTRIDGTLNPIAVKQERLIWQLDPLASKVEAKIQAKSKRGWSQGRKVPLEKFGYKHKEILSTSDTTILSAASYEGMIWGGGSKITKPVAHALCDADNLYDHQGEQVSFYRETPLLVWRTEGAELAFEAYPYYSERTCTQSWLHQSNDSVFRFIDAPEQISEFLEELRVRDPHFPATQTAELIAVLGEHVHWFDIDEQRGTVTRGECVAEPQLWLAWNGISLDVAIEYGSLDNKVSWSPGKGNEWESGFDGIWYQRDLANEKHHAKLLVKELGLEKNSTFTWQIEGESALELITKIDGELSANLHWKADSQQVKVIGVDDFSMSINQKQNWFEVNGRVQIDSDLEMDLRQLLAHHRTGFVSSDNSSLTLLISDQLRRQLSLLDSLVDDDQLVDLRMAYPLQKLVESMAANSDDAWDKLVEEWRVKPELDAELLAPLRDYQKESVEWAAHLSQHGFGACLADDMGLGKTLQGLTLLSHYRAQGPSMVVCPKSVLTNWQQEAERFTPQLVMIDLEACDDRLTAIKAAGPNDVVVLSYGLVTRLAEALNEVEWNCAVLDEAQQIKNPQAKRSKVVFGLEAAHRFALSGTPVENHLVELWSLFSFLNPGLLGDLKSFRSKYSQAAKQQQDMLRLKALVSPFIMRRTKTEVLTELPAKTEVVHHVELSNKERTAYEAVRKESLANLKSASSRGVVEVFAALTKLRQICCDVSLVFDSMQGEASTKLSEAQSLIEEALDGDHKVLVFSQFVGVLKRFSAQLTESNISFSYLDGKLSTKQRQAAIDSFKDGTNSVFLISLKAGGTGLNLTEADTVIHIDPWWNPAVEDQASDRAYRMGQQKPVTVYRLVTKDTIEEKIIALHHDKRDLADQVLSATSSSRTLDPQQLLGLLEG

SEQ ID NO: 12479 - protein, 879 aa, Thermoanaerobacter tengcongensis MB4
MKIKEIRVYRGRNVYSHRPVIKMTVDIEGEEIPTKDIPGFNETLLNLLPGLKKHTCSYGYEGGFAKRLEEGTYLPHVTEHIILELQNVLGYDVKFGRARNVEGSLYNVIFEYSLEECGIRAAKLAVDLVNKLIRGEKIDLEEKLEKISNIIAEVELGPSTMAIKMEALKRGIPVTRVGNGSILRLGYGKYQKIIEGTISQNTSCIAVDIASDKILTKKILKDHGLPVPEGDVAYNEEEAISIAEELGYPVVIKPYNGNQGKGVHLNISNREEVVIAYRNAKNYSDLVMVEKQIRGRHYRVLVVGEKVVAVAERIPAHVIGDGVHTVKELIEIENKNPLRGNGHEKPLTKITVDAVSKMVLQKQGLTLDDVPRKGRKVFLRESANLSTGGIAIDRTDEIHPHNIEIAVRAAKAIGLDIAGIDITMEDIRKPLSATNGAIIEINASPGIRMHHYPSKGKPRNVAKAIVDMLFPKGSKATIPIVSITGTNGKTTVTRMVAHILKTYGYTVGMTTTDGIYIDDKCIYKGDNTGPKSARTCLADKNIDAAVLETARGGILREGLGYDLADVGVITNISEDHLGIDGINTLEDLAFVKALVVEAVKDDGYSVLNADDPMTPYLAKKAKGKIIYFSMYDNNLTVKRHIENGGIAVYVKEGVIVIANGQIVPVVRIEEIPATLGGKVLHNIENSLAAIAASYGVKVPINIIAKGIKTFYPDTTHNPGRFNLFNIGSFRVLVDYGHNVEGIKKVIEAARKLDANRLIGVIGVPGDRMDSSIFKVGEVCGGGFDFIYIKEDEDLRGRKQGEVAKILEEGAIKGGMDKKNIKIILKETEALKAAMHSAEAGDLIVVFYEKYEPLVKVIEEFVKNRQIKNMEDENKVRAYP

SEQ ID NO: 12480 - protein, 1319 aa, Oryza sativa Japonica Group
MDENRKLSDDMSKKMEPIHSNGEAGEDKTIIIEPESDANKLEVETDARHGICEAHKAHEYGTMENDLHEEASTTDDDSENDSYEYLLRESDNEQTSESDAGEGDNEAPLTDEEVETLITEFLDAESKAAQAQESLEKESLEKIESEVRLELSESLQGNELESAVSTEMKQYKKEWESELDDLETHIAVLLEQLDAAGVELPSLYKSIESQVPNVCETEAWKNRAHWAGYQVPEEANKSIRKADEYLQSCRPVRRKHGRLLEEGASGFLAGKIPVGDDGSAQCHEKSWNAFNELTKSKEYAESSFGSSNWASVYLASTPQEAAALGLQFPGVDEVEEIAEVEGAVSDIKGVDEIELSEVQRRKYRKVPEEDDAKMTKRLQRHLKERRTRHLHKENIGLASSSNGCCELPPKKLKTYENGVSVELAKRTREDDVEFDNKRSKTVIIESDDDMQTDSKPDSAPSENADEIIDLDIFPSQSPKLGDKVRPKPFKCTICTEMLNVPEVHRHPVLDVIICGSCRFLVIEKNRLEDPVSGGYCTWCVKSEQLQSCSSCKLLFCRNCLSKNFGEEGLSEARVAGWQCCCCLPSQLEHLISDCDKALGGVESSDPENDFAELSVLESNGPFSKHKMKKRIRRIMDDEELGEETKLKIAMEKARQEHLKSMQEQSASKLKSNNIGISLEAPSEVSEYVGDGHIVNLAREEDEAPVRIPSSISAKLKPHQVSGIRFMWENVIQSVKKVKSGDKGFGCILAHNMGLGKTFQVITFLYTVMRCIQLGLRTALIVTPVNVLHNWKKEFIKWCPAESKPLRVYMLEDVPRANIQYLLKKWRIKGGVLLIGYSSFRNLSLGRSARDKTVANEITNALQCGPDILVCDEAHIIKNRRADTTQALKQVRTQRRIALTGSPLQNNLMEYYCMVDFVREGYLGSSHEFRNRFQNPIENGQHTNSTSDDVKIMNQRSHILYEQLKGFVQRMDMNVVKNDLPEKKVFVVTVKLSQLQRKLYRRFLDVNGFSSSAASEKSFQRSGFFAKYQTLALIWNHPGLLQMAKQKGNLRQEDVESFLMDESSSDDNIENYLPNGEKLRSRNDQLSKKSSDVVNEESNWWENLLDENAYKEADYSGKMVLLLDILSSCSELGDKALVFSQSLSTLDLVEFYLSKLQVNGKEGKYWKQGKDWYRIDGSTPSSERQNLVERFNDPENIRVKCTLISTRAGYIGINLHSANRVILLDGSWNPTHDLQAIYRVWRYGQTKPVYAYRLMAHATMEEKIYKRQVTKEGLAARVVDRQQVSRTISKEEMLHLFEFGDEELLEQSGSTMNGHSKVGT

SEQ ID NO: 12481 - protein, 277 aa, Thermoanaerobacter tengcongensis MB4
MEEEKVKEGVGKLVIIGGAEDKEDRCEILREVVSLAGGEKSKIVVMTTATEKAEEVGEMYETIFKRLGAKEVRIVNINSRQKEEIENAKGLLRNCDCVFFTGGDQLRITSILGGSGIDDMLRDMHEKGVLIVGTSAGASVMSQTMIVEGNDDDSPRKCTIKMAPGLGLLKNVIIDQHFAQRGRIGRLLAAIAQNPSNLGIGIDEDTAIVVEENRFKVIGNNAVTVVDGRWLTHSNVSESKPDEILALTNVLIHILPSGYQFDLKRWRPEPAIEEDKI

SEQ ID NO: 12482 - protein, 300 aa, Kluyveromyces lactis NRRL Y-1140; identical to SEQ ID NO: 745

SEQ ID NO: 12483 - protein, 141 aa, Euryale ferox
FSEEQEALVVKSWGVMKKDAGQLGVKFFAKIFEIAPSAKRMFSFLRDSDLPLEQNPKLKPHALSVFAMTCESAVQLRKAGKVTVRESSLKDLGATHFKYGVVDEHFDVRFAFSRSVFSSIRDLFQPEMKIAWGEAYDKLAA

SEQ ID NO: 12484 - protein, 147 aa, Euryale ferox
MGSIGFSEEQEALVKEAWELMKPNVQELGLKMFFLSWADVAGGAGMFYFLKDQNEIPRNNPQLRSHVVKVFTMTCESAAQLHKNGKVEAVGSTLKKMGAIHLKKGVQESHFEVIKVAFLKVVKEAVEEKWSEEMGAAWAEAYDKLAA

SEQ ID NO: 12485 - protein, 463 aa, Magnetospirillum magnetotacticum MS-1
MLKAIKDNDVKYVDFRFTDPRGKWQHVTFDVSLVDEEIFQDGTMFDGSSIAGWKAINESDMLLMPDPSTACMDPFFSASTMSIVCDVLEPSTGEPYARDPRSTAKLAEAYLRSTGIGDEIFVGPEAEFFVFDDVKFGADPYHTGFQLDSTELPTNGFTDYEGGNLGHRIQTKGGYFPVPPQDSAQDMRGEMLAAMQSMGVKVEKHHHEVASAQHELGMKFDKLTTLADHMQIYKYCIHNVAQSYGKSATFMPKPVYGDNGSGMHVHQSIWKDGKPLFAGDKYADLSQECLWYIGGIIKHAKALNAFTNPSTNSYKRLVPGYEAPVLLAYSARNRSASCRIPWTTNPKAKRVEVRFPDPMANPYLAFSALLMAGLDGIINKIDPGPAMDKDLYDLPPRELKKIPTVCGSLREALQNLDKDRAFLKAGGVFSDDQIDSFIELKMTEVLRYEMTPHPIEFVNYYSL

SEQ ID NO: 12486 - protein, 549 aa, Mesembryanthemum crystallinum
MSILGFDTSRLAPSSLHDASPTETSVVVSISVFFSLICLCIVIGHLLEKNRWANESIASLLLGLVSGAIVLVLSKGQSSRILVFNEELFFIYLLPPIIFNAGFQVKKKQFFKNFSFILMFGVLGTIISFCLISSGAVLLLKKIGLTQLNLNDYLALGAIFSATDSVCTLQVLNQDETPLLYSIVFGEGVVNDATSIVLFNAVQSLDLSNLSSMTALALLGTFLYLFFTSTILGILVGLLSAYVIKKLYMGRHSTDREIALMMLMAYLSYMIAELMNLSGILTVFFCGIVMSHYTWHNVTESSRITAQHAFATMSFISETFIFLYVGMDTLDIDKWKGSNSSAGTFLAVSSTLMLLVLIGRAAFVFPLANILNFIKKKEEHKIGFRKQFIIWWAGLMRGAVTVALSYNAFSSSGETSNERSLMITCTIIVVRFSTVLFGSVTKHLIGALVGVQNRMHSDLSDVNIESLENLNIPFLEVPGYGNDNDDDDADSSQRRPWLLRLLMRYPHPTVHYIWRKFDDKFMRPVFGGRGFVTYEPATPTGAADPIIEQ

SEQ ID NO: 12487 - protein, 132 aa, Vitis vinifera
MVDEQDHLLPIANVGRIMKQILPPRAKISKEGKETMQECASEFISFVTGEASDKCHKENRKTVNGDDICWALSALGFDDYAEAILRYLHKYREFERERANQNKVGGSEDKDEASNCKYIQAGKQTNNLTENK

SEQ ID NO: 12488 - protein, 621 aa, Meiothermus ruber
MAKAVGIDLGTTNSVIAIMEGGSPVVLENAEGERTTPSVVAYKGSDQLVGRVARRQAVLNPEGTVFEIKRFIGRRWEEVQDEVKRVPYKVVKGPDGGVRVDIAGKLYTPEEISAMILRKLVDDASKKLGEKITKAVITVPAYFNNAQREATANAGRIAGLEVLRIVNEPTAAALAYGLDKKGHETVLVFDLGGGTFDVTVLEIGDGVFEVKATAGDTHLGGSDFDHAIVNWLAEEFKKESGGVDLKADRQALQRLIEAAEKAKIELSAVTETTISLPFIGLDPISKTPLHLERKLTRAKFEELIQPLLKKIRGPVEQALRDAGLSASQIDEVLLVGGSTRVPAVQQIVKEMLGKEPNRSVNPDEVVALGAAVQAGVLTGQVEDVVLLDVTPLSLGVETKGGVFTVLIPRNTTVPTRKSEIFTTAEHNQPSVEIHVLQGERPMAADNKSLGRFRLECIPPMPAGVPQIEVTFDIDANGILHATAKEKSTGKEASITIQNTTTLSEQEIERMIKEAEANAEADRKRKEHADLKNNLDAARIQAERVMGEKESTAEAKSRLEAAISRAKTLVDTDGSDADLRQATEELLAALQAYEQGAAAGSQAQSSTPKSDDVIDADYKPAD

SEQ ID NO: 12489 - protein, 468 aa, Silicibacter sp. TM1040
MSKDAVLKLIKDEEAEYVDIRFTDPRGKLQHVTLMSDQVDEDFLDEGFMFDGSSIAGWKSIEASDMKLIPDTESAYVDPFYAEKTICIHCSVVEPDTGEAYERDPRGTAEKAEAYLKASGIGDVAYMGPEAEFFLFDDVRFSNSINKVSYEVDATDASWNTDAEYETGNMGHRPGVKGGYFPVNPVDESQDLRSEMLSTMKRLGMKVDKHHHEVASCQHELGLIFDSLTKQADELQKYKYVIHNVAHAYGKSATFMPKPIAGDNGTGMHVNMSIWKDGKPLFAGDKYADLSQEALYFIGGILKHAKTLNAFTNPSTNSYKRLIPGFEAPVLRAYSARNRSGCVRIPWTESPKAKRVEARFPDPAANPYLAFAALLMAGLDGIKNKIDPGEAMDKNLYDLPAEELADIPTVCGSLREALESLAADHDFLLQGDVFTKDQIEGYIALKMEEVETYEHTPHPVEYQMYYSC

SEQ ID NO: 12490 - protein, 143 aa, Brassica napus
MADTPSSPAGDGGESGGGSVREQDRYLPIANISRIMKKALPPNGKIGKDAKDTVQECVSEFISFITSEASDKCQKEKRKTVNGEDLLWAMATLGFEDYLEPLKVYLARYRELEGDNKGSGKSGDGSNRDAAAGGVSNEDMPSW

SEQ ID NO: 12491 - protein, 811 aa, Cryptococcus neoformans var. neoformans B-3501A
MAPATPTFRKPRLQPERGTLLSFFKKETTSVRTGFDVSHTQVESGVVSVEHTVGSSKDSQARNTSSKQNSIHKGKGKEKQKDHNGSVHDPVVISDDDEDDVLPAAPPTRSKRRKFSASSNRNQAPQLPSQSPCRPSEAPPMFASYSEFKPPPTWPQVVNTADVEENGNDQIMMVSDEDDTRTQDPWEGKIEEDDSGVELDDRDRPHSPERQDTQSGNGLTVGGMEWEEPDEGMGMEDEVDDADDAQSAISSSIKPSTSKRGRRISPFSFSIPIPEPPSQSTIKGPNAFSLLMSGHKEHEQWKDAEDDLRRDGKRYAGRRRAPFYKVLTGMPVAVDAFRYGAIPGVTAYLLTHAHSDHYTNLSKSWNNGPIYCSQTTANLIIHMLEVDPKWVHGLPNDMPFEMPNTGGVTVTPIEANHCPGSSIFLFEGRQTVNAGDSGFASPYVGSKRVFRYLHCGDFRANPKMVLHPAIARAPINTCYLDTTYLNPKYCFPPQPLVINACATLARRNVVGESDDAPSLEAVQQGSVIGVSGVGSMTYGGGRKVTLKTEDGGEREIEVEIKEEKGEREKQMMQGWLVKKEERVKEEVKEELGGVGKRAKSRTLVVVGTYSIGKERIVKAVAKAIGSKIYCDQRKKGILLCQTDPELHSMLTSDPIEAQVHLLPLGNIQLDRLQSYLTLLHPHFDRVLGFRPTGWSYSPPAGTDMLPDVNTIIRRDQARRFGEGDLKTMRGSSRNFMMYGVPYSEHSSFFELTCFALSLPGADLKMIATVNVGNEKSRAKMKKWFEKWLAEKAKRKEKGLPSTVEYRDETYW

SEQ ID NO: 12492 - protein, 383 aa, Haemophilus somnus 129PT
MNALHFGAGNIGRGFIGKVLADSGVQVTFADVNEAVIDLLKRHQSYNVKIVGDSINAMESVRHVTGVDSKDTNALIELFKTVDLVTTAVGPTVLKIISGTIAKGIEARLAAGNFKPLNIIACENMVRGTTFLKEQVFTHLTEELQADAEKYVGFVDSAVDRIVPPVQEDISDPLLVTVEEFCEWIVDNTQFKGDIPNIQGMELTDNLMAFVERKLFTLNTGHAVTAYFGKRKGYQFVKESIEDPDIKEFVAAVMQESGAVLIQRYGFEPQAHAAYIEKILKRFANPYLVDNVERVGRQPLRKLSYNDRLIKPLRGTIEYNLANQHLIRAIAYALTFRCEDDPQAVELAQSLAEIGVTETLKKYTELQDVVIIEQIAQAYNEVK

SEQ ID NO: 12493 - protein, 185 aa, Dechloromonas aromatica RCB
MFSSLKRCFGIAALITVGVVPVAAAAECPPLLNHSFASLQDGKPMPLCQYAGKVILVVNTASYCGFTSQYDGLEKLYARLKDKGLVVLGFPSNDFGEQEPGSEKEIADFCRLTYGVEFPMVSKTVVKGKGAHPFYLKLAEITGSKPKWNFHKYLINRDATQVVAYTSFTKPDDKDLLKKIDEFLK

SEQ ID NO: 12494 - protein, 440 aa, Sinorhizobium meliloti 1021
MIRRASLVLVGALMGATAMGVVYSATMPAVAANSSTYRELAIFGDVFERVRAQYVTPPQDDKLIENAINGMLTSLDPHSSYMNSTDAEDMRTQTRGEFGGLGIEVTMEEDLVKVTSPIDDTPAARAGVLAGDFISKIDGQDVRGLKLEEAVDKMRGAVGTPIKLTILRKGAEKPIELTIVRDVIAVRAVKVRVEGDVGYLRVISFTEKTFEDLKKGIEKIQAEVPADKLKGYVLDLRLNPGGLLDQAINVSDAFLERGEVVSTRGRNPDETRRFNATPGDLAGGKPVVVLVNGGSASASEIVAGALQDLKRATVLGTRSFGKGSVQTIIPLGDAGALRLTTALYYTPSGKSIQGTGITPDIKVEQPLPPELLGKVEAQGESDLRGHIPGQEETEEGSGSVAYVPPETKDDIQLNYAFDLLRGKKTDPSFPANPEQAQLKE

SEQ ID NO: 12495 - protein, 223 aa, Fusobacterium nucleatum subsp. vincentii ATCC 49256
MMESLDDPHSVYFTKEEMRSFQEDIKGKYVGVGMVIQKKVGEPLTVVSPVEDGPAYKAGIKPKDKIIEIDGESTYNLTSEEASKRLKGKANTTVKVKVFREVNKMTKIFELKRETIELKYVKSKMLDGGIGYLRLTQFGDNVYPDMKKALEDLQAKGMKGLIFDLRSNPGGELGQSIKIASMFIEKGKIVSTDKKGRRKYIYKRRPLLWEILLWYSKTGVVMP

SEQ ID NO: 12496 - protein, 1476 aa, Oryza sativa Japonica Group
MDENRKLSDDMSKKMEPIHSNGEAGEDKTIIIEPESDANKLEVETDARHGICEAHKAHEYGTMENDLHEEASTTDDDSENDSYEYLLRESDNEQTSESDAGEGDNEAPLTDEEVETLITEFLDAESKAAQAQESLEKESLEKIESEVRLELSESLQGNELESAVSTEMKQYKKEWESELDDLETHIAVLLEQLDAAGVELPSLYKSIESQVPNVCETEAWKNRAHWAGYQVPEEANKSIRKADEYLQSCRPVRRKHGRLLEEGASGFLAGKIPVGDDGSAQCHEKSWNAFNELTKSKEYAESSFGSSNWASVYLASTPQEAAALGLQFPGVDEVEEIAEVEGAVSDIKGVDEIELSEVQRRKYRKVPEEDDAKMTKRLQRHLKERRTRHLHKENIGLASSSNGCCELPPKKLKTYENGVSVELAKRTREDDVEFDNKRSKTVIIESDDDMQTDSKPDSAPSENADEIIDLDIFPSQSPKLGDKVRPKPFKCTICTEMLNVPEVHRHPVLDVIICGSCRFLVIEKNRLEDPVSGGYCTWCVKSEQLQSCSSCKLLFCRNCLSKNFGEEGLSEARVAGWQCCCCLPSQLEHLISDCDKALGGVESSDPENDFAELSVLESNGPFSKHKMKKRIRRIMDDEELGEETKLKIAMEKARQEHLKSMQEQSASKLKSNNIGISLEAPSEVSEYVGDGHIVNLAREEDEAPVRIPSSISAKLKPHQVSGIRFMWENVIQSVKKVKSGDKGFGCILAHNMGLGKTFQVITFLYTVMRCIQLGLRTALIVTPVNVLHNWKKEFIKWCPAESKPLRVYMLEDVPRANIQYLLKKWRIKGGVLLIGYSSFRNLSLGRSARDKTVANEITNALQCGPDILVCDEAHIIKNRRADTTQALKQVRTQRRIALTGSPLQNNLMEYYCMVDFVREGYLGSSHEFRNRFQNPIENGQHTNSTSDDVKIMNQRSHILYEQLKGFVQRMDMNVVKNDLPEKKVFVVTVKLSQLQRKLYRRFLDVNGFSSSAASEKSFQRSGFFAKYQTLALIWNHPGLLQMAKQKGNLRQEDVESFLMDESSSDDNIENYLPNGEKLRSRNDQLSKKSSDVVNEESNWWENLLDENAYKEADYSGKMVLLLDILSSCSELGDKALVFSQSLSTLDLVEFYLSKLQVNGKEGKYWKQGKDWYRIDGSTPSSERQNLVERFNDPENIRVKCTLISTRAGYIGINLHSANRVILLDGSWNPTHDLQAIYRVWRYGQTKPVYAYRLMAHATMEEKIYKRQVTKEGLAARVVDRQQVSRTISKEEMLHLFEFGDEELLEQSGSTMNGHSKVGTEKPPTPNSSETTEHLPLDRLMVNLLHDHSRWIASYHEHETLLQENEEERLTKEEQDMAWLSYNKLLEVAPRKATHDAERKPSTVPTESSLIQPPKATSRSRQPQQPKITSNNQKKCNNLSHLLTLRSQGTKPGCSTSCKECGQDISWETLNRDGRSR

SEQ ID NO: 12497 - protein, 444 aa, Mannheimia succiniciproducens MBEL55E
MSVYAYICFLFSISIFLAFFTRKISARIQSTIAITASAMIGSLVLILFGYFGWFKVEDIAIHIMERVDFKNFLLNGMLGFLLFAGSLGIKLPLMKEQRREIAVFALFSTLASTFFIGILIYYAAMLVGLRIDFVYCLVFGSLISPTDPIAVLAIIKNLKAPKRLSMQVEGESLFNDGVGLVIFTTLFAVAFNGQEPTFSGVFGLFLKEAVGGILFGFVMGFAIHLLITFTKEVSLEILLTLTIPTAGFMLANLLHISGALAMVTSGIIIGNWTRRQGFSERNRYFLDHFWEMIDHSLNSLLFFLIGLALLLVEFTFESSMLMLLAIPVCLIGRYVSLWIPYQIMSRFRRYNPYTLRILTWGGLRGGLALAMALSIPSNVVNISGNGMNLDLRDVIILMTYAVVMFSILVQGTTIEKMIETSKVIDPKRDAYVKLGGSRDYPPHI

SEQ ID NO: 12498 - protein, 324 aa, Ralstonia metallidurans CH34
MREPDGGKTAILAEAGGIPGTDPALRRGTQAWTEWLIPGVGTTLGEITLLAAACSPYQQIEIGESAHFGRIFRLDGRVMSTEADAWIQHELMVAPMAATHGAPRSALVVGGGDGGSAFELLRIPTMREVVVAELDGEVVRLAREWLRGIHQGALDEPGDPRLSLAIGEGLGLMEAFARAGRQFDLIVYDLTEADDGSPAAALFSPHGLHTARRCLAPGGAMSLHLGPPLHRPETARRLLARLRHVFRHVAPLTTFVPAYGALWGIALASDALDIAAQPADKIATRLQQWQLEHKLRAYHAYLHPALFVHPRHVQAIFDSGSRPA

SEQ ID NO: 12499 - protein, 877 aa, Microcystis aeruginosa PCC 7806
MKILRTQTLRGPNYWSIRRDKLIVMRLDLEDLAEKPSNEIPGFYEGLIDVLPSLVEHYCSPGYRGGFFERVRTGTYMGHIIEHIALELQELAGTPVGFGRTRSTSTPGVYNVVFEYVDEQAGRYAGRAAVRLCQSIVDTGTYPKQELAQDLADLRDLCNNASLGPSTETIVKEAQARNIPWLLLSARAMVQLGYGVHQKRIQATLSSFSGILAVELACDKEGTKTILKDGGIPVPRGTVIQYLDELSAAIEEVGGFPIVIKPLDGNHGRGISIDVKTQQEAEEAYDLASAASKTRSVIVERYYKGSDHRILVINGKVAAVAERIPAHVVGDGRSTVEELIEITNQDPNRGDGHANVLTKITIDKTSLNVLEKQGHELTSILAHGEIAYLRATANLSTGGIAVDRTDEIHPENVWIAQRVAKLIGLDIAGIDVVTEDIRKPLREVDGVIVEVNAAPGFRMHVAPSRGLPRNIAAPVIDMLFPPGTPSRVPILAITGTNGKTTTSRLISHICRQTGKVVGFTTTDGVYIDDYLVEKGDNTGPYSASMILKDPTVEIAVLETARGGILRSGLAFNQCDVGVVLNVAADHLGIGDIDTIEQMAKVKSVVAEVVSAEGYAVLNADDPLTASMAEKVKGRVAYFSMSPDNPIIHDHIRRGGMAAIYENGYLSILEGEWTLRIEEAVNIPVTMQGMAPFMIANALAACLATFVQGIDIELIRQGVRTFKPSVAQTPGRMNLFDLGHHHALIDYAHNPAGYEAVGGFVGNWSGEKVGVVGGPGDRRDDDLILLGKLSAQMFDRIIVKEDNDTRGRRRGEVADLILRGISQENASLRPEVILDETEALEKALSTVSEGGLVVIFPESVTQAIDLIEKHRPLTDNQG

SEQ ID NO: 12500 - protein, 284 aa, Microcystis aeruginosa PCC 7806
MIIELETQHHQNPTPVSLKTAILVIGGAEDKVHGKEILHTFWNRAGGSEAVIAIVPSASREPVLIGDRYQKIFEEMGAKYVKVIDIRDRVQGEDPQFQAYIEECTGVFMTGGDQLRLCGLLSDTPLMERIRQRVQQGELTLAGTSAGAAVMGHHMIAGGSSGEAPNRALVDMAMGLGLIPEVIVDQHFHNRNRMARLMSAISGYPERLGIGIDEDTCAMFERDGTMTVIGCGTVTVIDAREMSHTNHHHVTANEPLSLHNLRVHILAYGDGYHLKKQQVIPKLG

SEQ ID NO: 12501 - protein, 368 aa, Thottea siliquosa; identical to SEQ ID NO: 9108
  misc_feature (269)..(269): Xaa can be any naturally occurring amino acid
  misc_feature (363)..(363): Xaa can be any naturally occurring amino acid

SEQ ID NO: 12502 - protein, 386 aa, Asarum europaeum; identical to SEQ ID NO: 9113

SEQ ID NO: 12503 - protein, 377 aa, Dehalococcoides sp. VS
MTLRIKVLLGTILAMVGLLSSFVLGYLSGGTAVLNSDENLSSIVTAWQIITTEYVEPDIIDQAALAEAAIKGMMDELNDPHSVYLNAEDYQASMEYDDGRYVGIGATVQIEDGVIILIPYEGSPAALAGIQAGDILREVDGQSVAGFSLADLSPLVRGEKGTTITLLVERSSSGQPLLFEVTRDEILIPSVTSEMIDDIAYIRINRFSERTDEELEQVLKNLGSAAGIVLDLRGNPGGLVSSVINVASRFVNSGVVLTTVDNEENSSEYSVVPKTVTTSLPMVVLVDQYSASGSEALSGALQDYGRATIAGKTTYGKGSVNRTFNVTPDTGIYLTIGRWYTPNGRMIEGQGITPDIELELTGDEAISWALGFLHGEA

SEQ ID NO: 12504 - protein, 386 aa, Asarum speciosum; identical to SEQ ID NO: 9114

SEQ ID NO: 12505 - protein, 447 aa, Prochlorococcus marinus subsp. marinus str. CCMP1375
MFNLTFKNCPNNSNKNLRNLILSFFIIISPALSAPQKIHSLIEDSPKEVMDQVWQIIYRDYMDSTGKYDQKEWFKVRRKMLSNKYDNYSQAYESIRVMLSSLEDPYTRFLEPKEFNEMRIDTSGELTGIGIQISIDEKNNDVLVISPIEGTPAFQAGIKAKDKIISIDGTLTKGMSIENVVKLIRGKKGTEVKLGISRDNQFFKLTLVRARIEIRTVVSRINKSSSGNHFGYIRLKQFSANAAKEMRKALISLERNDPDAYIIDVRGNPGGLLEASIDISRQLLDKGVIVSTKTKDGITDVRRARGNALTHKPIAILVNEGSASASEILSGAIQDNKRGILIGKKTFGKGLVQSVRPLVDGSGLTVTVAKYLTPRGTDIHKYGIVPDIEVELKSIKGNRFSSIDLGTEKDSQYSVAESALIRLLKKFQDKKAYLPNSSNFEVAISSK

SEQ ID NO: 12506 - protein, 161 aa, Pseudomonas syringae pv. tomato str. DC3000
MSENLLNIPVTTIKGEQKTLADFAGKAVLVVNTASKCGFTPQYKGLEKLWQDYKDQGLVVLGFPCNQFGKQEPGDEGAISGFCELNYGVSFPLFKKVDVNGDQAHPLFVQLKEQAPGLLGTERIKWNFTKFLIGQDGKLVKRFAPLTKPEELTDEIEALLR

SEQ ID NO: 12507 - protein, 1184 aa, Aspergillus nidulans FGSC A4
MSSTGQTIEDLEDELDLQRAILQSLDESHSSRTDAAEQRLETLEAIKDLESKLARLRGHHAGGTPVYSLPVGQSLTSAQLDGLNFSAPSIPSSPPQFDRSAFSIPSRPRDSRLANSSEMLTVRKRRLSEDDTEDGVSVRSSKRTTGNIASPASTQAASSTPFSRNSPSDGLDSEFDVDDDILGILGLDGQDMRALQEEQRRAEQWLKERKEQERRDAEFARHLMSASPSAQTLSYISRAEPPTPTRENLPSIPQFSSSNSLFLGTRPAGLSAAPSLNANHAFSGPQSGSSKIHPDSDDSDLAEISPQDFQSRITSNPRITSRPSQYVPNRGNADLGISNTAKSVQNPYAYHYPGPAAANGSNGFGNSAMSRWPQSMPSAMAIYKGARDMLSGTTNISPSRMPLGNIITSGFLDDNYPTALAGRDIRDFYEDGGDPKQINQEIKQLLETIRPDADLSAKDREGTPAALKYPLLDHQKLGLAWMRSKEECDQKGGILADDMGLGKTIQAIALMVSRPSSDPERKTTLIIAPVALMQQWKREIEKMLSPGHRLQVYILHGDKGRTSFSDLKKYDVVLTTFGMLASELKRVIKYEQLLKDGAEEPTLTRQYLKTLPCLGPTSKWYRVIIDEAQCIKNRATQSAIACCRLNTTYRWCMSGTPMMNNVEELHSLLKFLRIRPYANLDRFKRDFSAPLKTNNKHLQEKAMTQLRILLKAVLLRRTKHSKIDGKPIFDIPPRFSEKVHAVFSEDELELYKALEAKTQLQFNRYLEAGTVGRNYSNILVLLLRLRQACCHPHLITDFSVKLNEASEGVDFIANAEQFSNEVVARLRDNENLECPVCIDAVDNPIIFFPCGHGTCSECFSRISDPSLSLQQGIDGAAQVKCPNCRGVVDPKKITDHVSFRKVHFPDESEDSAGLGGLGIAIKEDGDRDDTDDSDEGATLSDFISNDSDCDLTPPKRPKVRSKGKGKGKPRKTLAELKKEASKNQESKRKYLRRLEKTWITSAKIEKTMEIIRDIERRDNNEKIIIFSQFTSLLDLLEIPIAREGHRYRRYDGSMKPADRNSAVLDFTDDPSCKVMLVSLKAGNSGLNLVAANHVIIFDPFWNPYVEEQAVDRAHRIGQLREVHVHRILVPETVEDRIIELQDKKRAIIDGALDEKESKNIARLSTRELGYLFVRLPASHSPTSN

SEQ ID NO: 12508 - protein, 208 aa, Polaromonas sp. JS666
MHNLWTPLSRPLPRIALLTGLALSTIAANSAAPAPSASVAGSVAADASACPGLLQHNFLRLQDEKPQSLCQYQGKVVVAVNTASFCGFTSQYQGLEELYAKYKDRGLVVLGFPSNDFSQETGSNKEIADFCENTFGVKFPMFAKTSVSGKDANPLFRQLAAKTGTTPRWNFYKYVIARDGTSVASFNSLTAPGSRQFVKEIEKQLARP

SEQ ID NO: 12509 - protein, 386 aa, Piper magnificum; identical to SEQ ID NO: 9116
  misc_feature (381)..(381): Xaa can be any naturally occurring amino acid

SEQ ID NO: 12510 - protein, 446 aa, Mycobacterium abscessus
MDRQKEFVLRTLEERDIRFVRLWFTDVLGYLKSVSIAPAELEGAFEEGIGFDGSSIEGFARVSESDTVAHPDPSTFQVLPWTTSAGKHHSARMFCDIKLPDGSPSWSDPRHVLRRQLAKASDLGFSCYVHPEIEFFLLKNLPDDGTAPIPADDAGYFDQAVHEAAPNFRRHAIDALESMGISVEFSHHEGAPGQQEIDLRYADALSMADNVMTFRNVVKEVAIIDGVHATFMPKPFSDHPGSAMHTHMSLFEGDTNAFHNPDDPLQLSDVGKSFIAGILEHANEISAVTNQWVNSYKRLVQGGEAPTAASWGAANRSALVRVPMYTPNKSSSRRIEVRSPDSACNPYLTYAVLLAAGLRGVEQGYTLGPEAEDDVWGLTRAERQAMGYKELPSTLENALIAMEGSELVAEALGEHVFDFFLRNKRAEWARYRSNVTPFELRAYLGL

SEQ ID NO: 12511 - protein, 165 aa, Mesorhizobium temperatum
MFADGVMFDGSSIAGWKAINESDMVLMPDTETVHMDPFFAQSTMVILCDILDPISGESYNRDPRGTAKKAEAYMKAEGIGDQIFVGPEAEFFVFDDVKYKADPYNTGFKLDSTELPSNDDTDYETGNLGHRPRIKGGYFPVPPIDSAQDMRSEMLTVLAEMGVRV

SEQ ID NO: 12512 - protein, 454 aa, Streptomyces avermitilis MA-4680
MADRTPPLGVEELHALVAGGEIDTVVLAFPDMQGRLQGKRFAARFFLDEVLEHGTEGCNYLLAVDTDMNTVDGYDMSSWDRGYGDFAMHPDLSTLRQVPWNAGTALLIADLAWNDGSPVVAAPRQILRRQLDRLAALGYTAQVGTELEFIVFKDTYEQAWDAGYKGLTPANQYNIDYSVLGTGRIEPLLRRIRNEMQAAGLTVESAKGECNPGQHEIVFRYDEALVTCDQHAVYKTGAKEIAAQEGVSITFMAKYNEREGNSCHIHLSLADADGTNAMAGDGPGGMSDVMRHFLAGQLAALRDFSLLYAPNINSYKRFQPGSFAPTAVAWGYDNRTCALRVVGHGRSMRFENRLPGGDVNPHLAVAGLVAAGLYGIEHKLELPEACAGNAYAAEYEHVPTTLREAAELWENSPIAKAAFGDDVVAHYRNMARVELKAFDAAVTDWELRRSFERL

SEQ ID NO: 12513 - protein, 549 aa, Yersinia pestis CO92
MEIFFTILILILVVSLSGVVTRMLPFQVPLPLMQIVCGALLAWPNFGLHVNFDPELFLVLFIPPLLFADGWKTPTREFIHHGREILGLALALVLVTIVGIGYLIYWMVPGIPLVAAFALAAVLSPTDAVALSGIVGKGRIPKSIMGVLEGEALMNDASGLVALKFAIAVAMGTMIFTVSGATLEFLKVAIGGLLAGVAITWLYSKSLRIMSRWSGDDPATQIVLLLLLPFASYLVAEHLGVSGILAAVAAGMTISQSGIIRNAPLAMRLRADSVWSMLEFVFNGMVFILLGLQLPGILETSITQAELDPTIQTWNLFADVAIIYGALLLLRFGWLWSMKKISKRVLTKRPLQFSDYTTRELWVASFAGVRGAITLAGVLSIPLFLSDGSAFPSRYQLVFIATGVILLSVIIGVIALPPLLRGVVVADKSASREEIRLARAAMAEVAIVSLNKMEERLMTSSEENIDSELLKEVSSRVIGTLRRRTGSKDEVENTLLIENLERRFRLTALRAERGELYHLRATQKISNETLQKLLHDLDLLEALLIEKEG

SEQ ID NO: 12514 - protein, 874 aa, Candida albicans SC5314
MLYRVSGFYKRHTRNFTNIDYGYYIRNFIHHIASKIYPYAKVVLPNFRAAHYFYILTLVILGSILVYPVKTCAYIDVLFFTAGASTQAGLNTVNVNDLSLYQQIVLYLLATLATPIFIHGSLLFVRLYYFERHFDNIKERSLMDYRMRKSATLARLGSAPTMSSTRLNTFNNQVLGFQEREAEKGSSLSPQSSSSQTSQPVSTAYNDQGGNDIEHHSEPSDSDDDESGNGPVTFQEKIHFEEPQRPRSQRRHSRTDSGIKFSALPHPRRRKSIDPEDMYRSINMLQEHKKNQEAKSKGIQFLNIGSPVRRKSRSSNIEAFPEEDTNPSRDDEITPATNSVGTGNNDEDEDDILIIKPPIEIENSDGANPIFTKKKKLASQIQFKETPGKAKKWITTKTRKHYNPWTSKLKKTLSNSSKKGSLSVVPTDTEDDSEDEEYASIDSETSDISDNEHAADNAEGSDVDSVGSYEEDEDEDEHNSDDDDDGEGERRLGNGASLTKAQSHLVLPSKDETGGKKYTKRSNTLDTPQQNTSDGRKIRKKAPKRKTPRTQRNASFNQHSNVSIGDGSIENVDTNDSYQRLSRTMSGNYLSWTPTVGRNSTFIKLTDEQKEELGGIEYRAVKLLIKIIVVYYVGFNIIPGVMLSIWIYCMPHYKNLMISSSISPAWWAFFTSQSSFNDLGLTLTSNSMMSFNQNAFVQILCSFLIVIGNTGFPILLRFIIWVMFKTARPLSLYKESLGFLLDHPRRCFTLLFPSVPTWWLFFILVVLNGFDLVIFCILDLHDDTFKGVDMGYRVLNGLFQAFCTRTVGFSVMDLSQLHAATQVSYLIMMYISFCPIAISVRRTNVYEEQSWGYMPRRMQRVLMRVRHQTMLGRI

SEQ ID NO: 12515 - protein, 165 aa, Rhizobium sp. SX211a
MFADGVMFDGSSIGGWKAINESDMVLMPDPATVHMDPFFAQSTMVIVCDILDPVSGEAYNRDPRGIAKKAEAYLKASGIGDTIFVGPEPEFFVFDDVKYKADPYNTGFKLDSSELPSNDDTDYETGNLGHRPRVKGGYFPVPPIDSCQDMRSEMLTVLTEMGVTV

SEQ ID NO: 12516 - protein, 165 aa, Rhizobium sp. SDW058
MFADGVMFDGSSIGGWKAINESDMVLMPDPATVHMDPFFAQSTMVIVCDILDPVSGEAYNRDPRGIAKKAEAYLKASGIGDTVFVGPEPEFFVFDDVKYKADPYNTGFKLDSSELPSNDDTDYETGNLGHRPRVKGGYFPVPPVDSCQDMRSEMLTVLTEMGVTV

SEQ ID NO: 12517 - protein, 110 aa, Xylella fastidiosa Dixon
MSFAVLGFPSNDFKGQEPGDEQQIQKFCTLTYGVKFPMFQKVHVKGDEVTPLYQRLTQTTGVAPGWNFHKYLIARDGHVVAQFDSRTRPDDPILLEAIKRELAKPVQVVH

SEQ ID NO: 12518 - protein, 389 aa, Zea mays; identical to SEQ ID NO: 11226

SEQ ID NO: 12519 - protein, 518 aa, Magnetospirillum magnetotacticum MS-1
MGAGFVLAVSLLAHPASAGWVAGEAERTIAFGFDAIVERHLQPVTAQTIALDGLRGLAEIDPQLGVTLDQGRLRLSTTERVVADFPAAPPDDTVGWARITVNAALEASQVSERLRDADAERLYQAVFEGALGKADLFSRYAGAKEAREHRSNRSGFGGIGIKFDLIDGEVRIVEVVDDGPAAKLGLRSGDVITAIDGEAVKGLDRADISNRLRGAVATELVLSLRRGSQMLQFTLRRSLIVPQTVSSSVAGGIAHFKITSFNQRTAYSLENQLKEIRDRLGAGLQGVVLDLRGNPGGLLDKAVAVVDLFVTEGTIISTKGRHPAAANAFEAKPGDIGEDLALVVLVDGRSASAAEIVASALQDAGRAVVVGTNSYGKGTVQTVVRLPNDGEITLTWSRFHAPSGYALHGLGVLPVLCTGGTGQTAAQMVEAAGRGLFPGKPTETLAVWRGTGIEDTELRHRLRDTCPPVRLGDSKLEMELADRLLSNRAAYARALAASAPSRGLEALQTRPSPETGSH

SEQ ID NO: 12520 - protein, 165 aa, Mesorhizobium sp. SDW017
MFADGVMFDGSSIAGWKAINESDMVLMPDPDTVHMDPFFAQSTMVILCDILDPVSGESYNRDPRGTAKKAEAYMKAEGIGDTIYVGPEAEFFVFDDVKYKADPYNTGFKLDSTELPSNDDTDYETGNLGHRPRVKGGYFPVPPIDSAQDMRSEMLTVLAEMGVRV

SEQ ID NO: 12521 - protein, 490 aa, Agrobacterium tumefaciens str. C58
MTNRLSSLALSHLPQDVLLPTYDREAVTPGIVHLGVGAFHRAHQAVFIDDCLARGETGWGIVAASLRSPDTRDAIAPQDNLYTFCLRDGENETLRIVGSILETIVAPEDPERLLRAMTDPRVRIVTLTVTEKGYLADLSAGTLLRDHPDVVHDLAHPQKPRSALGFLLEATRRRRVAGAVPLTLLSCDNLPSNGRILRRLLVEMAGLTDKDLAEFITENLSCPCVMVDRIVPATTATDRERVTVRLGCEDAWPVIAEPYFRWVIEDRFPHGRPGIELSGAEIVDDVEPYEHMKLRMLNGAHTAMAAIGQCSGLETIADIYADPRVRGYIDRYWREVGSTLSPAVSGPDYVTGLRQRFANPALRHRAAQIASDASQKVPQRILAPLAELRAAGAPDAAALFAVALWIRSCATLNERGEAIVMADPAFAEWAVPTGNGEEPDAVIDRFLTFRRVFGPEWLADEAFVTALRAAYRDIVQYGALGAIERHFSEE

SEQ ID NO: 12522 - protein, 196 aa, Myxococcus xanthus DK 1622
MKTLPLLTLASALAFTPALAAAPKPPPPAKSEPTSEKKPMSFHHLSANRLDGKPETLSGYQGKVVLVVNTASECGYTPQYAGLEKLHQEYKDKGLVVVGFPSNDFGGQEPGSSEEIKKFCELRYKVTFPMFEKVKTKGDGQSPVYAFLSQHHPAPKWNFHKYVVGKDGQVKAGFPSAVTPDSAELKAAIDSALAQP

SEQ ID NO: 12523 - protein, 446 aa, Pediococcus pentosaceus ATCC 25745
MAKKNYSQADIRQMAKDENVRFLRLMFTDLFGIIKNVEVPISQLDKLLDNKLMFDGSSIDGFVRIEESDMYLYPDLSTWMVFPWGSEHGKVARIICEVYSNDRKPFVGDPRNNLIRVLQEMKDAGFTDFNIGPEPEFFLLKLDENGKPTTNLNDKGSYFDLAPVDLGENCRRDIVLELENMGFDVEASHHEVAPGQHEIDFKYADALTAADNIQTFKLVVKTVARKYNLHATFMPKPMDGINGSGMHLNMSLFNKEGNAFYDEKGDLQLSQNAYWFLGGLLKHARSYTAVCNPIVNSYKRLVPGYEAPVYVAWSGSNRSPLIRVPSSKGLSTRFEVRSVDPAANPYLAIASVLEAGLDGIRNKIEPEDSVDRNIYRMNIQERNEEHITDLPSTLHNALKEFQNDDVMRKALGDHIFQSFLEAKKLEWASYRQEVTQWERDQYLEMF

SEQ ID NO: 12524 - protein, 170 aa, Populus trichocarpa
MGSSPSVPEKSIHEFTVKDNRGQDVNLGIYKGKVLLVVNVASKCGFTDSNYTQLTDLYKNYKDKGLEILAFPCNQFLNQEPGTSEDAQNFACTRYKADYPIFHKVRVNGPNAAPVYKFLKASKPGFLGNRIKWNFTKFLVDKDGHVLGRYSTITAPMAIEADIKKALGEM

SEQ ID NO: 12525 - protein, 385 aa, Clostridium difficile 630
MYLVISKKKAIFLGVILVIITAMVTSAFQLTLGNKVVISKELYEDYKKYDKLLGLESIIKQDFYKKVSDTDLVNGAAKGLFLGTNDKYSGYYTKDEMENLINDSEGSYVGVGMYIGASKDGGLVVVPMKDSPAEKAGVKSGDKLVKVNGKSVSYKNSDEAVRMMKGKKGKTVELTILREDKQLNFKVKTDQIIEKSIESKVIDNDLGYIEITQFISSTYTDFDKALKELKAKNIKGLVIDLRNNPGGMLDICKEVADELIGEGTIVYTKDNKGNTEYLKSDKEKLGLPIVVLTNGESASAAEILTAAIVDNKEGISVGTTTFGKGLVQSVVRLKDGTGYKLTTAQYFTPNGDYINEKGIKPTIEEKDENKQLDVATKWLREQIDK

SEQ ID NO: 12526 - protein, 532 aa, Glycine max
MGRDAPLTPSLFLQTLFPSLFLSLNPTFSLSKTLHHSPLPSDPSPVSLQFPPNTAGPHLLPFSRLLMSSAAGAPDRRASPPRVAAGAPTRPPLKRHLAFITKPPFAPPDEYHSFSSIGSRRAADEAVVVRSPYIMKRKSGMNDSEGESLAQKWSNSPGYTNVSNVTNNSPFKTPVSAKGGRTQKAKASKGRSCPPTPISNAGSPSPLTPASSCRYDSSLGLLTKKFINLVKHAEGGILDLNKAAETLEVQKRRIYDITNVLEGIGLIEKKLKNRIHWKGIESATSGDVDGDISLLKAEVEKLSLEEQGIDDQIREMQERLRNLSENENNQKCLFVTEEDIKDLPCFQNETLIAIKAPHGTTLEVPDPEEAVDYPQRRYRIILRSTMGPIDVYLISQFEEKFEEVNGAELPMIPLASSSGSNEQLMTEIVTAECSGKELEPQTQLSSHAFSDASQEFAGGMMKIVPSDVDNDADYWLLSDADISITDMWRTDSSVDWNGVDMLHPDFGVISRPQTPSSGFAEVPSTAANSIQK

SEQ ID NO: 12527 - protein, 514 aa, Prochlorococcus marinus str. MIT 9215
MRSIKLHKLLDLVGIIPSLDLIDYEINNISFNSKEVQKGTLFLGMPGLNVDGGKFCIEAIENGAEAAIIGSAAKERIGSIDRERILVIEDNLDYIFGQIVAEFWNRPSRKLKLIGVTGTNGKTTITFLLEYLLKKLGKKTALFGTLFNRWPGFSEVASHTTDFADKLQKKLNAAVEAESEFAILEVSSHSIAQKRISGCEFEAAIFTNLTQDHLDYHSDMESYFQTKRKLFFPPYLREKDGISVLNHDDHWISKLSSDLEKRSSLVSTKITESEFENDDFFFVTDKKFTESGSTCIFHTPREKIQLFVPLVGEFNLMNAIQAITILYKLNFSLKDLSKLIQSFPGAPGRMEKIQIDDSDVSRSLPTVIVDYAHTPDGLKKVLQSIKKLCEGKLITVFGCGGDRDRSKRPLMGSIAEELSDQLFITSDNPRSEEPQKIVNDILMGIKKREKITIEIDRFKAINESIKFANKKDIILIAGKGHEDYQILNDKVINFDDRKIAYKLLKEKINLNKIS

SEQ ID NO: 12528 - protein, 146 aa, Vicia faba
MGFTQQQEALVNSSWESFKQNPSYSVLFYTIILEKAPAAKGMFSFLKDSAGVVDSPKLQAHAEQVFGMVRDSAIQLQATGEVVLKNGSLGAIHIQKGVVDPHFVVVKEALLKTIKEASGDKWSEELSIAWEVAYDGLATAIKKAMS

SEQ ID NO: 12529 - protein, 377 aa, Candida albicans SC5314
MCGPLHVSDIFIFNQTDAGNITLRIGKLPRGPNLQFKINNYSLCKDVRKILKHPKSISKDNSIFQSPPLLVLNGFGKISEMSQHEKLMVTIFQNMFPPIQPQQTKVSSIKRVLLISKNKVTNEIELRHYAINTKLVDENRNVKKLIQSHHNLKKKLPKLTNNQDVSDLLLNPYSIGGLTSDSEFEDDAVVEIQQETFVKKEPTKAITTTITATTEKEVESQSQPQPQPQPQQGKSKRAIKLTELGPRLNMSLIKIEEGLIGSSKTIYHSSIQKTEDEIKSLEKKHLLKQQLKLERRSKQQAAVKAKLDKKEAKKARRKAREEGREKDNDDNNNEEEEEEEDSADEEQVDDDDSDSDAVDINPEDYENDSDLYSDVDV

SEQ ID NO: 12530 - protein, 471 aa, Burkholderia sp. 383
MSKTVADVMQLVKDEDVKFVDFRFTDTRGKEQHVSVPVSAFDEDKFESGHAFDGSSIAGWKGIEASDMLLMPDPNAAFVDPFYEESTLVLTCDVVEPADGKGYERDPRSLAKRAEAYLKSTGIGDTAYFGPEPEFFIFDSVQWSTDMSGCFVKINSEEAPWSSAKEFEGGNTGHRPGTKGGYFPVAPVDTFQDMRSEMCLLLEQLGIPVEVHHHEVAGQGQNEIGTKFSTLVERADWTQWSKYIIHNVAHSYGKTATFMPKPIVGDNGSGMHVHQSIWKDGQNLFAGNGYAGLSEMALFYIGGIIKHARALNAITNPTTNSYKRLVPHFEAPVKLAYSARNRSASIRIPHVSNPKGRRIETRFPDPMANPYLLFSALMMAGLDGIQNKIHPGEAADKNLYDLPPEEDAKIPTVCAGLDQALEALDKDREFLTRGGVFTDGMLDAYLALKEQELAKFRMTTHPIEFEMYYSL

SEQ ID NO: 12531 - protein, 187 aa, Zea mays
ALGAIFSSTDTVCTLQVINQDETPRLYSLVFGEGVVNDATAVVLFNAIKDLDISRLKGGVVLKVIFDFLYLFATSTVLGISIGLVTAYVLKALYFGRHSTDREVALMALMAYLSYMLAELLELSGILTVFFCGIVMSHYAWHNVTESSRITTKHIFATLSFIAETFIFLYVGMDALDIDKWRTSKER

SEQ ID NO: 12532 - protein, 342 aa, Zea mays
  misc_feature (200)..(200): Xaa can be any naturally occurring amino acid
  misc_feature (226)..(226): Xaa can be any naturally occurring amino acid
MAGGAGNGSNEAVQAKGSGGDGSAAKPLPPCCVKARSAAPESEAKCHATVVSGWFTEPRSHCGKATKVQYYNNPMWPGEAHSLKVENILYQGKSPYQEVLVFESSTYGKVLVLDGIVQLTDKDECAYQEMITHLPLCSIPSPKKVLVIGGGDGGVLREISRHSSVESIDICEIDQLVIDICKEFFPHLSVGFEDPRVKSXLGTPVEFLRNAPEGTYDAIIGDSSDXSIGREPFKGSVRYAWTSVPTYPSGVIGFLLCAKEGPLVNFLTPINPIEKLEGATKAGREIRFYNSEMHRAAFVLPTFARRELEAYYVSTETEQAEETAAAPLKLTLASRSEIFATS

SEQ ID NO: 12533 - protein, 471 aa, Sulfolobus solfataricus P2
MPSTAEDVLKFLKENNIKWVDLQFTDVPGRLHHITIPADEFDLESLKTGFGKLDGSSIRGFTSIYESDMVLLPVPETMTLIPWSPGVARVLCKVFWGGGKGRFERDPRFIAEEAEKYQTEQGYTSYYGPELEFFMFDKVKLDVSAPQSGTGYKIYAREAPWSDSGTFVIRFKEGYYPAPPVDQLMDVRVEIVDTLVKYFGYTIEATHHEVATAGQGEIDFRFSTLVDTADKVQTLKYVAKNIAAKHGLVVTFMPKPIYGDNGTGMHTHLSLWTKDGKKNLMYDPNDEYAEISQFGRYVIGGLLTHARALSAIVSPTVNSYRRLIPGFEAPVYIAWSKGNRSAVIRVPAYYRGMEKAKRIEYRPPDPSTNPYLAFAALLMAALDGVNKKIDPGDPVDENIYHLTPEKRRQLGIKELPRSLNEALDELESDKEFLKPVFNSSILDTYIDLKRDEARSLQGYPHPMELYYYLDS

SEQ ID NO: 12534 - protein, 160 aa, Casuarina glauca
MSTLEGRGFTEEQEALVVKSWSAMKPNAGELGLKFFLKIFEIAPSAQKLFSFLKDSNVPLERNPKLKSHAMSVFLMTCESAVQLRKAGKVTVRESSLKKLGASHFKHGVADEHFEVTKFALLETIKEAVPETWSPEMKNAWGEAYDKLVAAIKLEMKPSS

SEQ ID NO: 12535 - protein, 80 aa, Sclerotinia sclerotiorum
MWPGQAMSLKVEKVLHVEKSKYQDVLVFKSTDYGNVLVLDDCIQCTERDEFSYQEMIAHLALNSHPNPKKALVIGGGDGG

SEQ ID NO: 12536 - protein, 473 aa, Leptospira interrogans serovar Lai str. 56601
MSRTPSEVIAYAKANNVLFYDFRFTDIKGAWHHVSYHAGSINEDSFKGLPFDGSSIPAWQPIDRSDMQLIPDTSAIFLDPFTADSTLVVFCDVFDIYKGTLYEKCPRSIAKKALKYLESSGLADTAYFGPENEFFIFDNIKVRDAINVQYYEIDSSEGIWNSHTDFPGSTNTGHRPGTKGGYFPVAPVDSQVDLRADIVKTLHQIGMETFVVHHEVAQGQGEIGVKFGTLIEAADNVQKLKYVVKMVAHKYGKTATFMPKPLYGDNGNGMHCHQSIWKNGVNLFAGKGYQNLSDTAMHYIGGVLSHAKSCAAFTNASTNSYKRLLPGFEAPSILAYSAQNRSASCRIPFVNGDKARRVEFRFPDSSANPYLAFAAMLMAGIDGVQKKIDPGPPREEDLFELSLDEIREKGIQQMPHTLRESVEHMLLDKEFLKKGDVFTEEFIQTYKAYKFETEIWPWEGRPHPFEFLTTYSC

SEQ ID NO: 12537 - protein, 466 aa, Mycobacterium sp. MCS
MIDARTAPTASEVLARLHAEDIATVILGGTDTHGVMRGKRVPISQLPRMLEHGMPMCDVFWVMHVDESDLVARPDGYRGYFPTERQGYPDILAVPDLTTLRIVPWHNDTALLLCDWELPADHRPVPIAPRSVLRRVVERADAMGYQPLSALELEFYLLREKAGTTHRKRADELVPLQEAPSTYGVVMGSLQEDIGALIRRHMLDYGLPVEACNPETGPGQFEITLRYGNSLKSADDAFLFKSAVKEVAAQNDLLATFMAKPVTDWAGNSCHVHLSLRDIAGGGVFFDQDAPDQLSTALRHFAGGILHTMREFTALMAPTPNSYRRFVPYSWAGTTATWGVDNRSVGLRVIREGDHGTRVEHRQPGGDANPYLATAAALAGGLHGLLNEIEPRELSTTDIYSQPSEDLPVLPATLAEAVDLLADSAAAREWFGDDFVDHYVLMKRAEIAAQSVAVTDWEVARYLEAM

SEQ ID NO: 12538 - protein, 1576 aa, Schizosaccharomyces pombe
MDAAKRLELCKEIQENEIEALKAIFMDDFEELKVRNAWNVTNGHVYCIHLCSRSANSKSIAKLDLCIELGRSYPYVKPVIKLQNGENVLNSQIRFLLDKLDTKAKDLLGEEMIFELASIVQDYLNDWQSDLSSQFASLEEERAVQLKHDRERAEVDLQLRLKREKDALFEEEQTLQNKIQDELQRRSYETPQSSSKKKTNSKETTSLETLPTSIYFDCSISVRDCHDSLVTFNRVLPLYTISHSNLSTLTLVKPESKEISLQDCVFLLRTVRISTPYWSTEDGKREIQELEYELESLKVIRHDLLASIYEYQLERETRGYGWRLYVLQEYSPKFTLFSLLQTVLTLDVETVRAFSNNILEGLAELHRLGISHKSLHLDNVVLFHSGHRTFAKLMDFGFTRTLRDMNASHPFNINSQSITNILPEGLYPPEVSESSFAAASRKTDIWCFGLLVLQMLCGAHVLNKFSSLKLIMTHVIPLLPGSYQDLVRRCLMRDSRKRPSAIDLLSSHVIRLGTAVLPPVEQGTFSKSARPSYGGQQDGIIDLLYRKSVSRYETDFEELEFLGRGGFGEVVKVKNRIDGRFYAVKKLVLLSDDKENSRILREVMTLSRLHHEHVVRYYTAWVETEANDTVTEIISSDSESLSQSLNMAVDFRQSSSLPADKLSSLDIHFEDDYNSSADEEDPEASDISFQYSNTSDKEGSSDKDSSIEEASSVKTQENGLNATLYIQMEYCEKLSLQDIIRDKIPVDEMWRLFRQILEALAYIHSRGMMHRDLKPGNIFLDENRNVKLGDFGLATENENYQDNNDKWKNRQSADEDLTTGVGTALYVAPELLSRRNGVRYDAKVDMYSLGIILFEMCMTFSTSMERIRIIDTIRSPSISFPSTFPFSRASHEFKVIHCLLQHDPTKRPSSQELLESEAIPPKVGEEFIQEGLRLLSNPNTPYYLKLLKVLFGQVPDRHKDFTYDFNLSEESGVLSKVSDRGWDSLLACLVRDHVVKVFRRHGAKERESHILFPKSSQYDKDQASVSLLDKNGTLLQLPYDTVLPYARNVARNAVEEEKTYLISDVFREAKGGGRPKAIKEISFDITTNSDNLDWYDAETIKALDEVLTEIPSLTESCILINHADILSSILDYLQVSKDKRRMATHILGQINQRLTLSQVRNQLRIESLVPSTTLDDLSLFDFRENYEEGASKLRKIFGKEMPQKMRTALNYMERVVKLLRALKISHQLYFMPLCVYNFEFYDGGLMFQAINLAEKSELICAGGRYDKLVRFFDPPLMRTARKKHVVGICFALEKLVFSMLRYIRFHNSKQSSKHSPSPTLKSVGPWAPRRVDVLVTSIGKDSILEKCSLLQELWALNIQADIVLRGASSLEEIVTHYRSEGINWVLVVRQKNTQMEHSVKARNILKNEDDEIRFDEVGMWLLGEINERKRNESMLQSKRILDSAQQDVAKFVDTSQSNLDVQLISLKDVNDRKYKWKHKQNAMNKVYDLVQSAIRESSEDAIALAVDCDSEAMEKLRSTTTLDEESWKRLIESCPASQREYMQRLQKKLVTLAEQDKKRVWICSFRTNEIYLYGLK

SEQ ID NO: 12539 - protein, 165 aa, Agrobacterium sp. SDW053
MFADGVMFDGSSIAGWKAINESDMVLMPDPATAHIDPFFAQSTLVVLCDILDPVSGEAYNRDPRGTAKKAEAYLKASGIGDTVFVGPEPEFFVFDDVKYKADPYNTGFKLDSSELPSNDDTDYETGNLGHRPRVKGGYFPVPPIDSLQDMRSEMLTVLAEMGVVV

SEQ ID NO: 12540 - protein, 161 aa, Trema tomentosa
MSSSEVDKVFTEEQEALVVKSWAVMKKNSAELGLKFFLKIFEIAPSAKNLFSYLKDSPIPLEQNPKLKPHAMTVFVMTCESAVQLRKAGKVTVRESNLKRLGAIHFKNGVVNEHFETRFALLETIKEAVPEMWSPEMKNAWGEAYDQLVAAIKSEMKPSST

SEQ ID NO: 12541 - protein, 165 aa, Rhizobium sp. NM349
MFADGVMFDGSSIAGWKAINESDMVLMPDPATAHVDPFFAQSTLVVLCDILDPVSGEAYNRDPRGTAKKAEAYLKASGIGDTVFVGPEPEFFVFDDVKYKADPYNTGFKLDSSELPSNDDTDYETGNLGHRPRVKGGYFPVPPIDSLQDMRSEMLTVLAEMGVVV

SEQ ID NO: 12542 - protein, 465 aa, Azoarcus sp. BH72
MKPDLTSQLVQSPPGDLVAPPRFTSVEQAQEYLRARGVSYVLAQFVDIHGVAKAKSVPVSHLPSVVSSGAGFAGFAIWGVGIEPHGPDFMAVGDLSTLSVVPWQPGLARIVCEGHVDGKAWDYDSRVTLRKQVARLAERGWTLFTGLEPEFSLLRRGEDGSLLPADPSDTLDKPCYDYKSLSRTREFLERLSNDMRASGIDVYQIDHEDANGQFELNFTYADCLTSADHFVFFKMAASEIANELGYICSFMPKPFANRPGNGMHMHVSIGDGQRNLFEDKSDPRGLNLSQLAYHFLGGLLAHAPALTALCAPSVNSYKRLVVGRSLTGATWAPAYVSYGDNNRSSMIRVPKGRLELRLPDGSANPYLATAAVIAAGLDGIERRLDPGDPHNVNLYEWSPQQLADAGIGLLPQSLILALDSLEADSVICDALGPVAKEFLKLKRMEWVEYQRHVSEWEIKQYLEFY

SEQ ID NO: 12543 - protein, 170 aa, Helicobacter pylori
GSGMHTHVSIWKNNENLFSGETYKGLSELALHFLGGVLRHARGLAAFTNASTNSYKRLIPGYEAPSILTYSANNRSASVRIPYGISKNSARFEFRFPDSSSNPYLAFGAILMAGMDGVKNKMDPGEAMDINLFKLTLDEIREKGIKQMPHTLRRSLEEMLADKQYLKEGQ

SEQ ID NO: 12544 - protein, 1087 aa, Glycine max
MEASVLLGNSYGVVARVAVAGLRGGVMGSAISRSLGTELRTLRKEVKVVGINEIAILQKLERNTCQHKYYRWESSEDCSKVPHTKLLGKFISDLSWLVVASAIRKVSFCARSVENNIVYQILGSDATTSSLYMDSEISVVNFKVNEDGMQMPVIHLVDLFETDTNTSGDKHDSHYDEVPSSYGFEGLRRSKRRNIQPERYSDCGNVSEIKVGNVRTWPYKLNKRKDDDGGGEESLPLAQENSDNSQKVNELSSCREIIVYHGRNETLELKSGEANQTQLASVPLLQEGDSLALEHHHLNDNVTRRSDAYYSTPKLKRKRLVDLEADVDFDPGREGINSNKGVSEKRHGSSWYSRSRSHAAEHSYKDRSLNATAYKEMIDSYLKDVNRTPTTEEPPVMDQRKEIGNFGQKKEAEIPEREDEEQISEIDMLWREMEMALASSYLEETEIEMQRSVRHQEEKQCNGKDTKEKASKDDDFHLLSTHAPTDEHNSMEHDNVWKLIPQFREKLHDHQKKAFEFLWQNIGGSMEPKLMDAESKRRGGCVISHAPGAGKTFLIIAFLVSYLKLFPGKKPLILAPKGTLYTWCKEFNKWEISMPVYLIHGRGGTQKDTEQNSIVLPGFPNPNKYVKHVLDCLQKIKLWQEKPSVLVMSYTAFLALMREGSEFAHRKYMAKALREGPGILILDEGHNPRSTKSRLRKGLMKLKTDLRILLSGTLFQNNFCEYFNTLCLARPKFISEVLDTLDPITRRKSKTVEKAGHLLESRARKLFLDKIAKKIDSGIGNERMQGLNMLRETTNGFVDVYESENFDSAPGLQIYTLLMNTTDKQREILPKLHTRVDECNGYPLELELLVTLGSIHPWLVKTTSCANKFFTADQLKQLDKYKYDMKAGSKVKFVLSLVFRVMQREKVLIFCHNLAPVKLLIELFEMFFKWKKDREILLLSGELDLFERGKVIDKFEEHGGASKVLLASITACAEGISLTAASRVIFLDSEWNPSKTKQAIARAFRPGQEKMVYVYQLLVTGTLEEDKYKRTTWKEWVSSMIFSEAFEENLSHSRAVNIEDDILREMVEEDKSKTIHMILKNEKASTN

SEQ ID NO: 12545 - protein, 1055 aa, Candida albicans SC5314
MSELDQLDVKLVDQDELETSITNKANKVLLSKDAELDEKRLSKAIKELESTQRQIANLSARLAHPRTKISEKKRLKDEIHWYEENELIPRQQDVDDIRNRLKENKIQLKKDAPQSTQSTSRLPEETERDYLIRTGKITAFGNENAFQSEQTHEQQSHVFLREPGLDNKVNDEDYAYQSDSEVDDNDNSIDKNAVRDLGETNQESESVLHNIDDGDESLYQQRLQTWVRKRASLRTQHQQEGIEEWFLPHPNIADAKLNEKFKLPGDIYPSLFDYQKTCVQWLWELYTQKTGGIIGDEMGLGKTIQIISFLAGLHYSGLLDKPVLVVVPATVLNQWVNEFHRWWPPLRCIILHSIGSGMNGSVSESKLEEYLESTDPDATQSSLHGIKSQINAQEIVDRVMEKGHVLVTTYVGLRIYSKHILPREWGYVVLDEGHKIRNPDSDISLTCKKIKTVNRIILSGTPIQNNLIELWSLFDFVFPGRLGTLPVFQQEFSIPINIGGYANSNNLQVKTAYKCAVVLRDLISPYMLRRLKSDVAQDLPKKNEMVLFVKLTKIQQELYESFLQSEDLESILKGKRNVLMGVDILRKICNHPDLVYRDTLMKRKNYGDPAKSGKMQVLKNLLRLWQSENHKTLLFCQTRQMLDILEKFVANLSLINGGDFNYLRMDGSTPISKRQMLVDAFNQDPDMHVFLLTTKVGGLGVNLTGADRVIIYDPDWNPSTDIQARERAWRLGQKRDITIYRLMTTGSIEEKIYHRQIFKTFLTNKILKDPKQRRFFKANDLHDLFTLGDQDEEGTETAQLFEGGEQSQQKYSGTKPRQSRGLFKKKYKDDDDFSQVARISGVSKLDKFEDGDHNDGDGDSTYSANEDNRIMSSIFAQSGVHSTLQHDDIISGSKEKESSLVEKEADKLATAAAEALKKSRMQTRKNTIGTPTWTGKFGSAGKFGLKRRKLLNSSSTILQNLRQKNELTESKKPDDVKVEPDRKQIMENLVEYLGDQMDNFSTSNDIIKNVKLSMSTENEMIMIRSMLREIANWDSSRKGWKLKDEFLQQHQQQPE

SEQ ID NO: 12546 - protein, 336 aa, Vitis vinifera
MGEAVEFYHSNGVSGINHNESGKKIDENHMCCWYEEVIDDNLKWSFALNSVLHKGTSQYQDIVLLDTKHFGKALVIDGKMQSAEVDEFIYHECLIHPALLCHPNPKTIFIMGGGEGSAAREALRHNSIEKVVMCDIDQEVVDFCRRYLTVNQEAFRNKKLNLVINDAKAELERRNEKFDIIVGDLADPVEGGPCYQLYTKSFYERILKPKLNVNGIFVTQAGPAGIFTHKEVFSSIYNTIKQVFKYVVAYAAHVPSFADTWGWVMASDQPFCINAEEIDKKIDKRIDGELLYLNGASFISSTTMNKSVSLSLLHETHIYTEEDARFIHGHGVAYRD

SEQ ID NO: 12547 - protein, 584 aa, Xanthomonas axonopodis pv. citri str. 306
MRWFSSPGATRYGPVGALLLCVAICDAARAAAFFHSGFFMHSIDVVLAMLLAVAASGYLIRILPFSLPLPLVQIALGAVVSGVFDAGHELEPELFFLLFLPPLLFLDGWRIPKQGLFRDKAAILELALGLVIFTVIGAGFFIHWLIPAMPLAVAFALAAIISPTDPVAVSSIASKVPIPKRLMHILEGESLLNDASGLVCFQFAVAAVLTGTFSVAAASLTFLWVALAGLALGVATTFGLSRIQAWIWRHFGEEPGSAILVNLLTPFAAYLLAEAFHASGILAAVAAGVTMSYVEMAGNAPGNMRLQRSAVWDTVQFTFNGIIFVLLGEQLPGILDGAVRSVQEAGHLNPWWLAVYVATISASLMALRFVWVFLSLRWNIFKAQRRGEAHVSPPWRIVVAVSLAGVRGAITLAGVLTLPLMLEDGSPFPARQLAIFLAASVILVSLLVASVALPRLLRGLELPEEEDEQLKEDLAVKAASQAALEAVEKLRQRLVDGSKHAERYNAAANQVSQRYQRKLGAVDMAETDPEEAVAYEKALRQFRHAALVAERNELFKLARRREISDDLSRRLVRNLDLIESRKRA

SEQ ID NO: 12548 - protein, 200 aa, Vitis vinifera
  misc_feature (31)..(31): Xaa can be any naturally occurring amino acid
MEDDESHANAPTTTNPESPCLKSSSGSGSNXINKEQDRFLPIANVGRIMKKVIPGNGKISKDAKETVQECVSEFISFVTGEASDKCQREKRKTINGEDIIWAITTLGFEDYVSPLKQYLSKYREIEGEKLNIPKQHRSEQRLQQQEQEQNLPYASVYSSTTLISQPPFVAADQPFPLPFSADSIQKQLHQQEHFDSGGRW

SEQ ID NO: 12549 - protein, 485 aa, Arabidopsis thaliana
MSGVVRSSPGSSQPPPPPPHHPPSSPVPVTSTPVIPPIRRHLAFASTKPPFHPSDDYHRFNPSSLSNNNDRSFVHGCGVVDREEDAVVVRSPSRKRKATMDMVVAPSNNGFTSSGFTNIPSSPCQTPRKGGRVNIKSKAKGNKSTPQTPISTNAGSPITLTPSGSCRYDSSLGLLTKKFVNLIKQAKDGMLDLNKAAETLEVQKRRIYDITNVLEGIDLIEKPFKNRILWKGVDACPGDEDADVSVLQLQAEIENLALEEQALDNQIRQTEERLRDLSENEKNQKWLFVTEEDIKSLPGFQNQTLIAVKAPHGTTLEVPDPDEAADHPQRRYRIILRSTMGPIDVYLVSEFEGKFEDTNGSGAAPPACLPIASSSGSTGHHDIEALTVDNPETAIVSHDHPHPQPGDTSDLNYLQEQVGGMLKITPSDVENDESDYWLLSNAEISMTDIWKTDSGIDWDYGIADVSTPPPGMGEIAPTAVDSTPR

SEQ ID NO: 12550 - protein, 170 aa, Helicobacter pylori
GSGMHTHVSIWKNNENLFGGETYKGLSELALHFLGGVLRHARGLAAFTNASTNSYKRLIPGYEAPSILTYSANNRSASVRIPYGISKNSARFEFRFPDSSSNPYLAFAAILMAGMDGVKNKMDPGEAMDINLFKLTLDEIREKGIKQMPHTLRRSLEEMLADKQYLKEGQ

SEQ ID NO: 12551 - protein, 140 aa, Zea mays
  misc_feature (85)..(85): Xaa can be any naturally occurring amino acid
VMKKDAPTRGFRFFLKVLEIAPWGKQMFWFLRDSDGPLEKNPKPKTPPMSVLVMPWGGGGQLPKAGKVPVGGPPLKGRGAPPLGXGVAEGPFGGTGFALLETIKGALPAAMGTLEMKKAGAGASTQRGGALKRGRKPDPW

SEQ ID NO: 12552 - protein, 170 aa, Helicobacter pylori
GSGMHTHVSVWKNNENLFGGETYKGLSELALHFLGGVLRHARGLAAFTNASTNSYKRLIPGYEAPSILTYSANNRSASVRIPYGISKNSARFEFRFPDSSSNPYLAFAAILMAGMDGVKNKIDPGEAMDINLFKLTLDEIREKGIKQMPHTLRRSLEEMLADKQYLKESQ

SEQ ID NO: 12553 - protein, 1128 aa, Oryza sativa Japonica Group
MAASVEAAAAAVVAPPASVGGDEVVVGGGGGGASEQARTLIGALNLLSRNLPLPPAVLHAVSSIYHGGDAWEGEGEEGGEEEVAAAAAAVGDGCGESGEGEEDRADASPGADEGVTLIQELEDAVLKNQGPYMSYSELTALKEDRFNTSIQHRLTELEGLPSTRGEDLQMKCLLELYGLKLLDLQKKVRTDISAEYWLHKKCAHPDRQLFDWGMMRIRYPFTMYGIGDSFSMDADDINRKKRFSERISRLEEEEKNQAEIRKRKFFSEILNAAREYQLQVPASYKRKKQRNDGVLAWHVRARQRINRMEKSRLQVLKAGDQEAYLRMVEESKNERLKLLLGKTNELLEGIGKAVQRQKDAEHVSRPDGSELPKGSESDDCSQISGLKVESPDEESPSDVDADHHSSADHSKFNAGHRLDSTVHSIEEKVTEQPSALEGGELRPYQLEGLQWMLSLFNNNLNGILADEMGLGKTIQTIALIAYLLEKKEVTGPHLIIAPKAVLPNWSNEFKTWAPSIGTILYDGRPDDRKALREKNFGQRQFNVLLTHYDLILKDLKFLKKVHWHYLIVDEGHRLKNHECALARTLVSRYQIRRRLLLTGTPIQNSLQELWSLLNFILPNIFNSSQNFEEWFNAPFACEVSLNDEEQLLIIHRLHQVLRPFLLRRKKDEVEKYLPVKTQVILKCDMSAWQKAYYEQVTSNGRVSLGSGLKSKALQNLSMQLRKCCNHPYLFVEHYNMYQRQEIVRSSGKFELLDRLLPKLQRAGHRVLLFSQMTKLLDILEVYLQMYQFKYMRLDGSTKTEERGRLLADFNKKDSEYFLFLLSTRAGGLGLNLQTADTVIIFDSDWNPQMDQQAEDRAHRIGQKNEVRVFVLVSVGSIEEEILDRAKQKMGIDAKVIQAGLFNTTSTAQDRRALLQEILRRGTSSLGTDIPSEREINRLAARNDEEFWLFEKMDEERRQRENYKPRLMEGIEVPDWVFANDTLTEKIPADEPQNVLLTTKRRRKEVVYSDSFGDQWMKADDVVEETPRMAPRAKRSAYSSDVQEVDFSERRKRHKSLVNIADDASIPMWTPEKVRAGVSSYSKDENEDDAEDESTTSVLQGGSFTWKTLRRKRSSHFSNSSDSKGRSAF

SEQ ID NO: 12554 - protein, 477 aa, Clostridium perfringens ATCC 13124
MVNLMILSGIVLLTCIISSKIFYKWGVPVLLVFIIIGMLFGSDGIGGIYFDNYNITYSLSSIALVFIMFYGGFCTEWKKARSVAIPSIMLSTLGVIITAGLTGLFCHFVLKTSIFEGLLLGCIVASTDAASVISILRSRNLKLKNNIDTLVEFESGSNDPTAYMLTSVMLIFITSNESVGIGLLGMIFKQIVFGVTVGLFLSKLAVFILRKVEFEIEGLYPIFTITVAILAYSISEFLGGNGYLSVFIAGIVMGNSKIPHKKSLNHFFDGLSWIMQIILFFMLGLLAFPSQLPSIAFEGIAISIFLILVGRPIAVFTILSWFKVPIKEQMFISWVGLRGAGSLVFAIYAITKTSAIENDIFHIIFFIALFSVAIQGTLIPWFAKKLDLICYEDDNHEDNMKNNIKDYIFEVKVGENNKVVNKAIMDSEIPDEILIVMIKRDNKVVIPKGFTIIKPNDTLVLTSENNEIMNSFLDEIR

SEQ ID NO: 12555 - protein, 170 aa, Helicobacter pylori
GSGMHTHVSIWKNNENLFGGETYKGLSELALHFLGGVLRHARGLAAFTNASTNSYKRLIPGYEAPSILTYSANNRSASVRIPYGISKNSARFEFRFPDSSSNPYLAFAAILMAGMDGVKNKIDPGEAMDINLFKLTLDEIREKGIKQMPHTLRRSLEEMLADKQYLKEGQ

SEQ ID NO: 12556 - protein, 427 aa, Candidatus Kuenenia stuttgartiensis
MKKSLFVLLFYTMIIFAGSVSANTFTLGAPANAVTKRANQQTSDFIYKEFEEFVKVIKALQEKYVEELDINTIFTNAYRGMMSELDPFSQYISPEELEELKIETEGEFEGLGIEVIVRHGLITVITPILDSPAFKAGILVGDRILKVDGIPTKDIAIRETVKLLRGKPGTTTTLTVLHEGESMPVDITIQRAKIHVNSIRDVKMVDETEKIGYLALINFQENTVDDLDKTVKELLKQGMEGLILDLRFNPGGLLSAAVGVSDRFLKKGVIVSTRGRGPDQNILYRARRSGSYPDFPLVVLVNNGSASASEIVAGAIKDNKRGLLVGMKTFGKGSVQSLVPIREGNAALKLTTAKYYTPSGECIHEKGIEPDIEIPLDFSQMRELQVELSAAKIGRKAADKEKEPPLFKDLQLEKAIEVIKGMETDGK

SEQ ID NO: 12557 - protein, 456 aa, Oryza sativa Indica Group
MALELSLVSASPPGGLAASPPPPAAIPGKEQQVAGVGILLQISMLVLSFVLGHVLRRHRFYYLPEASASLLIGLVVGGLANISNTETNTRTQSGFSLSPKPFFANFGAIVTFAILGTFVASVVTGVLVYLGGLTFLMYKLPFVECLMFGALISATDPVTVLSIFQELGTDVNLYALVFGESVLNDAMAISLYRTMSLVRSQAAAGENFFMMVFQFLETFVGSLSSGCITAQNILNYFKGTFGIVVLELDLSLLLYPFPKFYMETLFAKHERLCMLSIDHVKLQYLCITIYHLLIACFTVNYFIYYLILCNLDHSVYLFKYAGLDIDKYMLAEGLGLSGIVSILFTGMVMKHYTFSNLSNNSQRFVSAFFHLLSSLAETFVAVNVFSCAYLVNMSRPEHRRIPLKHQKALWFSGEGRSPLLLGLEGPWLLHLLSNLPMNFLEDMEKQYSQPPQLLLF

SEQ ID NO: 12558 - protein, 538 aa, Caragana korshinskii
MAFEIVSKLQNLSTSDHASVVSMNLFVALLCACIVVGHLLEENRWMNESITALLIGLCTGIIILLFSGGKSSHILVFSEDLFFIYLLPPIIFNAGFQVKKKQFFVNFITIVSFGAIGTLVSCVIITLGVMYAFKRMDIGPLELGDYLAIGAIFAATDSVCTLQVLNQDETPLLYSLVFGEGVVNDATSVVLFNAIQSFDLNRLNSLIALHFLGNFLYLFIASTLLGVLTGLFSAYVIKKLYIGRHSTDREVALMMLMAYLSYMLAELSYLSGILTVFFCGIVMSHYTWHNVTESSRITTKHAFATLSFVAEIFIFLYVGMDALDIEKWKFVSDSPGTSVAASSVLLGLVLLGRAAFVFPLSFLSNLTKKSPYEKISFRQQVIIWWAGLMRGAVSMALAYNQFTMSGHTQLRCNAIMITSTITVVLFSTVVFGLMTKPLIRLLLPHPKATNSMTTTESSTPKSAIVPLLGSAQDSEADLDGHEIHRPSSIRALLSTPTHTVHRLWRRFDDSFMRPVFGGRGFVPVEPGSPSERNGHQWR

SEQ ID NO: 12559 - protein, 154 aa, Oryza sativa Japonica Group
MDRVEEKEGNRFQEPASDRCEDNEDKEQDNSEESSSVDQRKEEEEEEKEGCEEATPAAAAAAAAPSFFAHPCSLLQYIARVCACCLGLSDSFCDPKASSVLVPEPEPAAADPSQEGEEDMKSSEATTRVRAARLRPKPPGNPREGSGGNGGHHH

SEQ ID NO: 12560 - protein, 468 aa, Triticum aestivum
MDRLRGSALLLGVLLAGSLFALCAAKEEAKKLGTVIGIDLGTTYSCVGVYKNGHVEIIANDQGNRITPSWVGFTDGERLIGEAAKNQAAVNPERTVFDVKRLIGRKFEDKEVQRDMKLVPYKIVNKEGKPYIQVKIKDGETKVFSPEEISAMILGKMKETAEAYLGKKINDAVVTVPAYFNDAQRQATKDAGVIAGLNVARIINEPTAAAIAYGLDKRGGEKNILVFDLGGGTFDVSILTIDNGVFEVLATNGDTHLGGEDFDHRIMDYFIKLIKKKHGKDISKDNRALGKLRREAERAKRALSNQHQVRVEIESLFDGTDFSEPLTRARFEELNNDLFRKTMGPVKKAMDDAGLEKTQIHEIVLVGGSTRIPKVQQLLRDYFDGKEPNKGVNPDEAVAFGAAVQGSILSGEGGDETKDILLLDVAPLTLGIETVGGVMTKLIPRNTVIPTKKSQVVETAVISLLSEL

SEQ ID NO: 12561 - protein, 668 aa, Glycine max
MACSFSRGSLLPLAIIVSLGCLFAISIAKEEATKLGTVIGIDLGTTYSCVGVYKNGHVEIIANDQGNRITPSWVAFTDSERLIGEAAKNLAAVNPERVIFDVKRLIGRKFEDKEVQRDMKLVPYKIVNKDGKPYIQVKIKDGETKVFSPEEISAMILTKMKETAEAFLGKKINDAVVTVPAYFNDAQRQATKDAGVIAGLNVARIINEPTAAAIAYGLDKKGGEKNILVFDLGGGTFDVSILTIDNGVFEVLATNGDTHLGGEDFDQRIMEYFIKLINKKHKKDISKDSRALSKLRREAERAKRALSSQHQVRVEIESLFDGVDFSEPLTRARFEELNNDLFRKTMGPVKKAMEDAGLQKNQIDEIVLVGGSTRIPKVQQLLKDYFDGKEPNKGVNPDEAVAYGAAVQGSILSGEGGEETKDILLLDVAPLTLGIETVGGVMTKLIPRNTVIPTKKSQVFTTYQDQQSTVSIQVFEGERSLTKDCRLLGKFELSGIPPAPRGTPQIEVTFEVDANGILNVKAEDKGTGKSEKITITNEKGRLSQEEIERMVREAEEFAEEDKKVKERIDARNSLETYVYNMKNQVSDKDKLADKLESDEKEKVETAVKEALEWLDDNQSVEKEEYEEKLKEVEAVCNPIISAVYQRSGGAPGGGASGEDDDEDSHDEL

SEQ ID NO: 12562 - protein, 543 aa, Rosa hybrid cultivar
MASHLAMLMTKLPKLQNLSASDHSSVVSLNLFVALLCACIVIGHLLEENRWVNESITALLIGVSTGVLILLISGGKSSHLLVFSEDLFFIYLLPPIIFNAGFQVKKKQFFRNFITIVMFGAIGTLVSCTIIAFGATQIFKKLDIGSLDIGDYLAIGAIFAATDSVCTLQVLHQDETPLLYSLVFGEGVVNDATSVVLFNAIQSFDLTHLDSRIALKFMGNFLYLFFASTMLGVITGLLSAFIIKKLYFARHSTDREVALMMLMAYLSYILAELFYLSGILTVFFCGIVMSHYTWHNVTESSRVTTKHAFATLSFVCETFIFLYVGMDALDIEKWRFVSDSPGTSVAVSSILLSLVMLGRAAFVFPLSFFSNLFKKNQSEKISLQQQVVIWWAGLMRGAVSIALAYNQFTRSGHTQLRANAIMITSTISVVLVSTVVFGLMTKPLIRLLLPHKQLTSTNSIMSDPPSPKSVIVPLLGQDSEADLSGHEVRRPASIRDLLTTPTHTVHRYWRKFDNAFMRPVFGGRGFVPFVPGSPTERNNTQWQ

SEQ ID NO: 12563 - protein, 461 aa, Triticum aestivum
ASGISSTGSADDKKLSKKNELIVWLRLTACQRQLYEAFLNSDLVHSSMQGSPLAAITVLKKICDHPLILTKRAAEGILEGMEGMLDNKDMGMVEKMAMNLADVAHGDQALQVGEEVSCKLIFIMSLLRKLLEEGHHVLIFSQTRKMLNLIQEAILLEGYKFLRIDGTTKIAERERIVKDFQEGPGAQIFLLTTQVGGLGLTLTKAARVIVVDPAWNPSTDNQSVDRAYRIGQTKDVIVYRLMTSGTIEEKIYKLQVFKGALFRTATEQKEQTRYFSKRDIQELFSLPAQGFDVSLTQKQLQEEHGQQLVMDESLREHIEFLERQGIAGVSHHSLLFSKTAVLPSLEPEALESKHPAMPMMARQYNKASSMDYVANGAAHAFKPKDFTPRAYSGSNTSSESPEEIKAKINRLSQTLSNTTLVSRLPDRGEKLKKQIHDLDEKLTVIESSPESSSMMSQREGA

SEQ ID NO: 12564 - protein, 478 aa, Mycobacterium abscessus
MAFSSPDEVFKFIADEKVEYVDVRFCDLPGVVQHFSIPASAFDQSVFDDGLAFDGSSVRGFQSIHESDMLLLPDISTARVDPFRAAKTLNINFFVHDPFTREAYSRDPRNVARKAEQYLASTGIADTCYFGAEAEFYIFDSVTFDSKMNGTFYEIDSESGWWNTGEPYEEDGSPNRGYKVRPKGGYFPVAPYDHYVDLRDEMSTNLINAGFTLERGHHEVGTAGQAEINYKFDTLLAAADDVLLFKYIIKNTAWANGKTVTFMPKPLFGDNGSGMHAHQSLWKDGKPLFHDEAGYAGLSDLARHYIGGILHHAPSLLAFTNPTVNSYKRLVPGYEAPINLVYSQRNRSACVRIPITGNNPKAKRLEFRCPDSSGNPYLAFAAMLMAGIDGIKNKIEPLAPVDKDLYELPPEEAAGIPQAPTSLATVIDNLEKDHEYLTEGGVFTSDLIETWISYKRENEIEPVNIRPHPYEFALYYDV

SEQ ID NO: 12565 - protein, 417 aa, Arabidopsis thaliana
MALNVSKVVPNSPILVKSVNASRSRRVLLAYVHHPLAANKGSSVEELKQGLCCTKTVTLVSSRRCSTLCFVGKSQDTETNSQVVQKEGEKQVMPRRKSSNSSQLLVEYVSNDAKFVNERARNDFVLLSRGIMRLDARARQDVAILGSGFLKLDARAREDTEKIDRDVKRKAERLHHIATILKNIAESKLKNAADKHWSDGALEADLRRADFRAKQRAMEDAFMALEFIKNIHDMMVNKMLDSLLTSETGTTDRISLEKNGIALGFFPGEVSSDRISAIEEAYKSMASALSEADGIDYTDPEELELLVTTLIDLDAMDGKSSASLLAECSSSPDVNTRKALANALAAAPSMWTLGNAGMGALQRLAEDSNPAIAAAASRAINALKKQWEVEEGDSLRFMMNFETPNDDDDVDSDLDEI

SEQ ID NO: 12566 - protein, 385 aa, Triticum aestivum
  misc_feature (135)..(135): Xaa can be any naturally occurring amino acid
MEGGGARNVSAAAAQTKGSADDGSCKPLPPCCVKAQAAVAESEAKCHATVVSGWFTGTRSRSGKPSKAQYFNNPMWPGEAHSLKVEKILYQGKSPYQEVLVFESSTYGNVLVLDGIVQLTDKDECAYQEMVTHLXLCSIPSPKNVLVVGGGDGGVLREIAKHDSVETIDICEIDQLVIDVCKDFFPRLYVGYKDPRVKLHVGDAVEFLRNSPEGKYDAIIVDSSDPIGPAQELVEKPFFQTIARALKPGGVLSNLAESMWLHTHLIQDMLSICREVFKGGVHYAWASVPTYPSGVIGFLLCAKDGPPVDFLTPVNPIEKIEGATKDGREMRFYNSEIHRAAFILPTFVKRELEAYNTSTEKEKPEKPTAKPVKMKVMRDSAITAS

SEQ ID NO: 12567 - protein, 698 aa, Pseudomonas aeruginosa PAO1
MKRFLPRTALLLLLGASSLPLFASTAVSVGSAQNSWDSLQPDREQVIASLNVVELLKRHHYNKPPLNDERSAKIYDSYLKMLDPARMYFTAGDIAEFDRWRNRFDDFLKSGDLDPGFVIYKRHLDRLKGRLDYALAMLDKGVDKIDFSVDESLLIDREKAPWAKDTAELDDLWRKKVKDEVLRLKITGKDDKAIQEQLTKRYKNQLSRLKQTRSEDIFQAYINAFAQSYDPHTQYLSPDNAENFDINMSLSLEGIGAVLQSDNDYVKVVRLVPAGPAAKSKQIATSDKIIGVAQGKGEMVDVVGWRLDEVVKLIRGPKGSQVRLEVIPASNAPNDQTSKIVAITREAVKLEDQAAKKSIIKVDHEGRSYKLGVIDLPAFYLDFKAYRAGDPNYKSTTRDVKKLVAELQKDKVDGIVLDLRNNGGGSLQEATELTGLFIDQGPTVLVRNSDGRVDVLNDDEGKAFYTGPLAVLVNRLSASASEIFAGAMQDYHRALILGGQTFGKGTVQTIQPLNHGELKLTLAKFYRVSGQSTQHQGVIPDISYPSIVDDKEIGESALPDSMPWDTIRPVVKDEANPFKPFLAQLKAQHDARTENNADFVYARERLALAQELMKEKTVSLNEAKRRAQQTSIENRQLAMENALRKSKGQEPLKELKREDENALPEEDDKTKPQDDAYLTESGHILLDYLNLNSAVAKH

SEQ ID NO: 12568 - protein, 473 aa, Prochlorococcus marinus subsp. marinus str. CCMP1375
MGKSPQDVLRQIKDEGIELIDLKFTDIHGKWQHLTVTSDMVDENSFKEGLAFDGSSIRGWKAINESDMSMVPDSSTAWVDPFYRHKTLSLICSIQEPRSGEAYSRCPRSLAQKALAYLSNTGLADSAYFGPEPEFFIFDDVRYDSKEGTSFYSVDTIEAPWNTGRAEEGGNLAYKIQYKEGYFPVSPNDTAQDLRSEMLLLIGELGIPIEKHHHEVAGPGQHELGMKFASLISAADNVMTYKYVVRNIAKKYGKTATFMPKPVWNDNGTGMHVHQSLWKDGQPMFYGEGTYANLSQTAKWYIGGILKHAPSFLAFTNPTTNSYKRLVPGFEAPVNLVYSQGNRSAAVRIPLTGPSPKAKRLEFRSGDALANPYLAFSAMMMAGIDGIKNQIDPGDGVDVDLFELPEDELSKIATVPSSLNNALEALKADNDYLTAGGVFDHDFINNFIEMKYEEVQQLRQRPHPHEFFMYYDA

SEQ ID NO: 12569 - protein, 492 aa, Staphylococcus aureus subsp. aureus COL
MQVRCLKKVKVKRVLGSLEQQIDDITTDSRTAREGSIFVASVGYTVDSHKFCQNVADQGCKLVVVNKEQSLPANVTQVVVPDTLRVASILAHTLYDYPSHQLVTFGVTGTNGKTSIATMIHLIQRKLQKNSAYLGTNGFQINETKTKGANTTPETVSLTKKIKEAVDAGAESMTLEVSSHGLVLGRLRSVEFDVAIFSNLTQDHLDFHGTMEAYGHAKSLLFSQLGEDLSKEKYVVLNNDDSFSEYLRTVTPYEVFSYGIDEEAQFMAKNIQESLQGVSFDFVTPFGTYPVKSPYVGKFNISNIMAAMIAVWSKGTSLETIIKAVENLEPVEGRLEVLDPSLPIDLIIDYAHTADGMNKLIDAVQPFVKQKLIFLVGMAGERDLTKTPEMGRVACRADYVIFTPDNPANDDPKMLTAELAKGATHQNYIEFDDRAEGIKHAIDIAEPGDTVVLASKGREPYQIMPGHIKVPHRDDLIGLEAAYKKFGGGPVD

SEQ ID NO: 12570 - protein, 339 aa, Brassica napus
ISSDDVVALPYSSGTTGLPKGVMLTHKGLVTSVAQQVDGDNPNLYFHSDDVILCVLPRSEHASLELIQRCKVTVAPMVPPIVLAMAKSPETEKYDLSSIRVVKSGAAPLGKELEDAVSAKFPNAKLGQGYGMTEAGPVLAMSLGFAKEPFPVKSGACGTVVRNAEMKIIDPDTGDSLSKNKPGEICIRGHQIMKGYLNNPAATAETIDKDGWLHTGDIGLIDDDDELFIVDRLKELIKYKGFQVAPAELEALLIGHQDITDVAVVAMKEEAAGEVPVAFVVKSKDSELSEDDVKQFVAKQVVFYKRINKVFFVESIPKAPSGKILRKDLRAKLANGLVN

SEQ ID NO: 12571 - protein, 950 aa, Clostridium thermocellum ATCC 27405
MKKIKQMKVALFLFSFLSVIVFMSVSSLALPDVPKKSSNTSGNMANNGRVLKYDGWVYYSFDESGLYRMKEDGSQKKKICDGMYDNLTAYDGYIYGYCRYTKTNNPEETGLFRLKPDGTERVKISDKSMLFVTIYDGWIYYTSFDDNFKPYKMKLDATDDQKLSDYSASYINVDNQWVYFQNDANGGRIYKVKHDGSQITEVSDHGNMYTYLNIDGEWIYFSGHYFLYKMKVDGTELTPLFEELINNVNSKDSWIYFSVFEEGIYRIKTDGTQLQKLRDVEDFVSGISLTDEWLYYEVYDVKDSSTRVYRMRLDGSSHQKFKITEDHVPDEVENVKIRIDGKFGEYSNVPLNLYGRILLPFREILKNLGVPDDDKHIIWDGKNRTVTVKKDNITILLTIGKNTALVNGKEYVLDVAPIIYNDRTYIPTRFIAESLNKKVLWDGEKQIVSICEPAEFEKVKDILAKTNDAMVNSVERYSVDQKNSMKYNNDYLDYEIQMTAKLEIDSKKRLCNIVGERKILETGNITNFNSEETSNIYCWCENEKIYLKDENYDLWYESELTEDEWENFKRRVLSNYSYINADDLICSGFTVDETDEHYILKGEHIFDELISGALYELDIVNEIISGTNTELLINKKTYYLEKINTTVTGKEKSSYGGNFSIAVSLENTNFNSEARVTAPEGFDPDKLINKKAVELVNFISQAYLYFNEIDNFEEKSKEFITKKDFNFDDVKQYIEAIKADDDVFTVCVDENSLEYGYKEEQIETKDLGKDAVYIKIKSFTEDVGDKFIEEADKIENSEDKTLVIDLRDNGGGFIISANDILDYLLPRCLMNYYISRSGDMLPVYSNDDYKEFKQILILVNENTASSAELLALGLKKHLKNTTVIGRTTLGKGVGQLVYRDDDKKFSVYLVSFYWNVKEQNVMKSGITPDIVVNSDSDYLKEVEKLLKSKR

SEQ ID NO: 12572 - protein, 328 aa, Cochlearia officinalis
MDPCSATDLKRPREEDANSAAASNGDPTKEPACFSSVIPGWFSEMSPMWPGEAHSLKVEKVLFQGKSDYQDVIVFKSATYGKVLVLDGVIQLTERDECAYQEMITHLPLCSIPNPKKVLVIGGGDGGVLREVARHASVEHIDMCEIDKMVVDVSKQFFPDVAIGYEDPRVNLVIGDGVAFLKNAAEGSYDAVIVDSSDPIGPAKELFEKPFFQSVARALRPGGVVCTQAESLWLHMDIIEDIVSNCREIFKGSVNYAWTSVPTYPSGVIGFMLCSTEGPDVDFKNPVNSIDESSSKSNGPLKFYNAEIHSAAFCLPSFAKKVIESKSN

SEQ ID NO: 12573 - protein, 705 aa, Pseudomonas fluorescens PfO-1
MRYQLSPRRISMKHLLPSTALALFIGIGLLPVSGTTFAANSWDKLQPDRDEVIASLNVVELLKRHHYSKPPLDDARSVIIYDSYIKLLDPSRSYFMASDIAEFDKWKTQFDDFLKSGDLNAGFTIYKRYLDRVKARLDFALAELNKGVDKMDFTTKETLLIDRKDAPWLKSTAELDDLWRKRVKDEVLRQKIAGKEPKQIQETLTKRYKNQLARLDQTRAEDIFQAYINTFAMSYDPHTNYLSPDNAENFDINMSLSLEGIGAVLQSDNDQVKVVRLVPAGPADKTKQVAPADKIIGVAQGNKEMVDVVGWRLDEVVKLIRGPKGTVVRLEVIPASNAPNDQTSKIVPITREAVKLEDQAVKKSVLNLKQDGKDYKLGVIEIPAFYLDFKAFRAGDPDYKSTTRDVKKLLTELQKEKVDGVVIDLRNNGGGSLQEATELTSLFIDKGPTVLVRNADGRVDVLEDENPGAFYKGPMALLVNRLSASASEIFAGAMQDYHRALIIGGQTFGKGTVQTIQPLNHGELKLTLAKFYRVSGQSTQHQGVLPDIDYPSIIDTKEIGESALPEAMPWDTIRAAIKPASDPFKPYLAQLKSEHDTRSAKDAEFVFIRDKLALAQKLLEEKTVSLNEAERRAQHADIDAKQLAMENIRRKAKGEEPLKELKKEDDDALAAAEPDKVKPEDDAYLSETGRVLLDYLKLSNQVAKK

SEQ ID NO: 12574 - protein, 476 aa, Borrelia turicatae 91E135
MKKKCLVFVYFVLALSISSSVIVESIFAQTDPSKGKMSASTYGQMMMDAFNFIKRNYVEPVDDEAIFEGALKGMFKALNDPYSQYLTKEDLVEISKTTEGNYVGIGVSIVKKNVPVKSDSSVLDASYVMIVTAFEEGPAYKAGVKSGDYITDIDGKSTTLMTIEQVGSLLKGKAGTKVKISVLRDKDLKLEFELVREKVDIQTVKHDVINKSVGYIKILSFNPNTNTYFKKAFEKLQAQNIKSLILDLRFNTGGYLQDAIEIADDILAEGLIVSTRARDSKVPVEYKASSSHIVPLDMPIVVLIDKHSASASEVLVGALKDNQRVYVIGEKSYGKGVIQRILPFYTGGFKITNSKYYTPSGHSIHNIGIKPDLEVGEREFSETEVLAYRQILDKKLVEDFLNSRKNKKSITEKEIDAFVDKILKEHSIHNIDKDILGYYVFSQFYQDTHNEMPIYNLHYDKPLRAAYEYLVKGTKN

SEQ ID NO: 12575 - protein, 281 aa, Pyrococcus furiosus DSM 3638
MERAFIEWYPRGYGVAFKIKKKIYEKLSKYQKIEVYETEGFGRLLALDGTVQLVTLGERSYHEPLVHPAMLAHPKPKRVLVIGGGDGGTVREVLQHDVDEVIMVEIDEDVIMVSKDLIKIDNGLLEAMLNGKHEKAKLTIGDGFEFIKNNRGFDVIIADSTDPVGPAKVLFSEEFYRYVYDALNNPGIYVTQAGSVYLFTDELISAYKEMKKVFDRVYYYSFPVIGYASPWAFLVGVKGDIDFTKIDRERAKKLQLEYYDPLMHETLFQMPKYIRETLQRL

SEQ ID NO: 12576 - protein, 170 aa, Helicobacter pylori
GSGMHTHVSVWKNNENLFSGETYKGLSELALHFLGGVLCHARGLAAFTNASTNSYKRLIPGYEAPSILTYSANNRSASVRIPYGISKNSTRFEFRFPDSSSNPYLAFAAILMAGMDGVKNKIDPGEAMDINLFKLTLDEIREKGIKQMPHTLRRSLEEMLADKQYLKEGQ

SEQ ID NO: 12577 - protein, 469 aa, Xanthomonas oryzae pv. oryzae KACC10331
MSVENVEKLIKDNKVEFVDLRFVDMRGVQQHITFPANIIEPALFEEGKMFDGSSIAGWKGINESDMVLLPDAGTAYLDPFFADPTIVLTCDILDPATMQSYERDPRGIAKRAEAYLKSSGTADQAFFGPEPEFFIFDSVRFANDMGHTFFQVGSEEAAWNTGEKYDGGNSGYRPGVKGGYFPVPPTDTLHDLRAEMIKTLEQVGIETEVHHHEVATAGQCEIGTKFSSLVQKADELLTMKYIIKNVAYRNGKTATFMPKPIVGDNGSGMHVHQSLAKGGVNLFTGDGYGGLSQLALWYIGGIFKHARAINAFANSGTNSYKRLVPGFEAPVMLAYSARNRSASCRIPWVTNPKARRIEMRFPDPLQSGYLTFTALMMAGLDGIKNQIDPGAPSDKDLYDLPPEEEKLIPQVCSSLDQALDALDKDREFLKAGGVMSDDFIDGYIALKMQEVTKFRAATHPLEYQLYYGN

SEQ ID NO: 12578 - protein, 170 aa, Helicobacter pylori
GSGMHTHVSVWKNNENLFSGETYKGLSELALHFLGGVLRHARGLAAFTNASTNSYKRLIPGYEAPSILTYSANNRSASVRIPYGISKNSARFEFRFPDSSSNPYLAFAAILMAGMDGVKNKIDPGEAMDINLFKLTLDEIREKGIKQMPHTLRRSLEEMLADKHDLKEGQ

SEQ ID NO: 12579 - protein, 618 aa, Streptomyces griseus
MARAVGIDLGTTNSVVSVLEGGEPTVITNAEGARTTPSVVAFAKNGEVLVGEVAKRQAVTNVDRTIRSVKRHMGTDWKIDLDGKSFNPQQMSAFILQKLKRDAESYLGEKVTDAVITVPAYFNDSERQATKEAGEIAGLNVLRIVNEPTAAALAYGLDKDDQTILVFDLGGGTFDVSLLEIGDGVVEVKATNGDNHLGGDDWDQRVVDYLVKQFANGHGVDLSKDKMALQRLREAAEKAKIELSSSTETTINLPYITASAEGPLHLDEKLTRSQFQQLTADLLDRCKTPFHNVIKDAGIQLSEIDHVVLVGGSTRMPAVAELVKELTGGQEANKGVNPDEVVAIGASLQAGVLKGEVKDVLLLDVTPLSLGIETKGGIMTKLIERNTTIPTKRSEIFTTAEDNQPSVQIQVYQGEREIAAYNKKLGMFELTGLPPAPRGVPQIEVAFDIDANGIMHVAAKDLGTGKEQKMTVTGGSSLPKDEVNRMREEAEKYAEEDHARREAAESRNQGEQLVYQTEKFLKDNEDKVPADVKTEVETAVGELKEKLKGEDSAEIRTATEKVRGRLPRIWARRCTANAQAEGAAPGADAPGDAQAKADDDVVDAEIVDDEKDTKGGAA

SEQ ID NO: 12580 - protein, 419 aa, Nicotiana tabacum
MEVISTNTNGSTIFKNGAIPMNGHQSGTSKHLNGYQNGTSKHQNGHHNGTSEHRNGHQNGISEHQNGHQNGTSEHRNGHQNGISEHQNGHQNGTSEHQNGHQNGTSEQQNGTISHDNGNELLGNSNSIKLGWFSEFSALWPGEAFSLKVEKLLFQGKSDYQDVMLFESATYGKVLTLDGAIQHTENGGFPYTEMIVHLPLGSIPNPKKVLIIGGGIGFTLFEMLRYPTIEKIDIVEIDDVVVDVSRKSFPYLAANFNDPRVTLVLGDGAAFVKAAQAGYYDAIIVDSSDPIGPAKDLFERPFFEAVAKALRPGGVVCTQAESIWLHMHIIKQIIANCRQVFKGSVNYAWTTVPTYPTGVIGYMLCSTEGPEVDFKNPINPIDKETTQVKSKLAPLKFYNSDIHKAAFILPSFARSMIES

SEQ ID NO: 12581 - protein, 170 aa, Helicobacter pylori
GSGMHTHVSVWKNNENLFSGETYKGLSELALHFLGGVLRHARGLAAFTNASTNSYKRLIPGYEAPSILTYSANNRSASVRIPYGISKNSARFEFRFPDSSSNPYLAFAAILMAGMDGVKNKIDPGEAMDINLFKLTLDEIREKGIKQMPHTLRRSLEEMLADKQYLKEGH

SEQ ID NO: 12582 - protein, 170 aa, Helicobacter pylori
GSGMHTHVSVWKNNENLFSGETYKGLSEFALHFLGGVLRHARGLAAFTNASTNSYKRLIPGYEAPSILTYSANNRSASVRIPYGISKNSARFEFRFPDSSSNPYLAFAAILMAGMDGVKNKMDPGEAMDINLFKLTLDEIREKGIKQMPHTLRRSLEEMLADKQYLKEGQ

SEQ ID NO: 12583 - protein, 492 aa, Frankia sp. EAN1pec
MIALTLAEVAAATGGRLTAGADRLAPVTSVVIDSRQVGPGALFVALPGERVDGHDFAAGAVAAGAVAVLGARETGVPTVVADPAAALAALAAHLRDLAPATVVGVTGSAGKTTTKDLLADLLGRLGPTVAAVGSFNNEIGLPLTLLRTEPDTAFVVLEMGARGIGHIATLCAVARPHVGLVLNVGSAHVGEYADGRNGIAAAKGELAEAATGLVVLNADDPLVAAMAGRAGAQVVTFGRAAAADVRAERVEVGGDGRAAFDLLAGGERHRLRLGLVGAHQVANALAAAAVATSLGLAPAEAAAALEEARPRSRWRMEVTTTPDGVVVLNDSYNANPESMRAALTALMDMRGAGRAWAVLGPMGELGADADAAHDTLGRLAAGLGVSRLVAVGAGARRVHQAAEHEGAWAGESTWVPGVDEAVALLAAQVRPGDVVLVKASRSFGLERVATGLTADGGAGPAGRRDGAAGAAIEGIENTWNTVGHSGEPGVRG

SEQ ID NO: 12584 - protein, 507 aa, Idiomarina baltica OS145
METGTLISLALYFIVMLGIGLYAYKKSTDSVSGYMLGGRGLGPAVTALSAGASDMSGWMLMGLPGAIYVAGVSQLWIAVGLVIGAYLNYVIVAPRLRTYTEVADDAITIPDYFANRFNDKGRALRIFSSVVIIIFFTLYTSASLVAGGKLFDSSFGMDYTTGLWVTAGVVCAYTLFGGFLAVSMTDFVQGCIMFVALVLVPIVAFAELGGYSDVVGQVKDINPQFLDFFMDGSTGESLAALGIISLLAWGLGYFGQPHIIVRFMAIRSVSDIKNARRIGISWMFVSIIGAMATGFVGIAYVAETQMTLNDAETIFIIFSQFLFHPLIGGFLLAAILAAIMSTISSQLLVSSSSLTEDFYKAFLRKDASDKELVAVGRISVLLVSLVAIWLAWNPENTILSLVSNAWAGFGAAFGPVVILSLFWRRMNRHGALAGMLLGAITVLIWIYGPTVGGEHLSAYVYEIVPGFIISTIAIIVGSLVTAEPDQNLRDKFDEMEQIMDDHYHTAK

SEQ ID NO: 12585 - protein, 170 aa, Helicobacter pylori
GSGMHTHVSVWKNNENLFSGETYKGLSELALHFLGGVLRHARGLAAFTNASTNSYKRLIPGYEAPSILTYSANNRSASVRIPYGISKNSARFEFRFPDSSSNPYLAFGAILMAGIDGIKNKMDPGEAMDINLFKLTLDEIREKGIKQMPHTLRRSLEEMLADKQYLKEDQ

SEQ ID NO: 12586 - protein, 156 aa, Francisella tularensis subsp. holarctica
MSIYDFKLTANDGSEYHLPKNKVLLIVNVASKCGFTKQYRGLQHLHKIYPDLEIVAFPCNSFGGQEPGSDEEIKNFCETNYNVTFPIMKKTKVNGKDAEPLFEYLKERAKGVLGTEAIKWNFTKFLVSKDGETVVRYAPKTIPEDLIPDIDNFLKD

SEQ ID NO: 12587 - protein, 428 aa, Clostridium perfringens ATCC 13124
MSRNKDEKNKYNNIIKNLKKKKGFRALAIGVALTLIIGVSVYAGNRLTAFGILPITSVSAVQSSLEKVNDTENFKKVLEVREMLYRWYDGDIDDSKLAEGAIKGMVSSLGDQYTYYMNEKEFSDFKEKSQGNYMGIGIQVAVKDGKIVVISPIQGGPAEKAGIKTGDIILKVNGEPVSGNELDKAVSMMKGTTKENIKLTLYREGKGEFDVDVMRDVIKTVNVKSEMIDGDIGYIEVLAFDEGTAKDFETQLKALEEKGMKGLILDLRGNPGGFMKECVDLVSNFVPKDKVIVSTIDKYGNKEESVSKGGIAQGMPLVVLIDGGTASASEIVAGAIRDYDLGTLVGTTSFGKGIVQVVLDKIGQEKDGTALKVTISKYYTPNGENIHKKGIGPDVTVEYSKELKEKTYSRSTDPQFEKALEIIQEKIK

SEQ ID NO: 12588 - protein, 545 aa, Xylella fastidiosa Temecula1
MHSIQIVLAMLLVVAASGYLVRIIPFSMPLPLLQIALGAVISGVFDGGYELQPEAFFLLFLPPLLFLDGWRIPKQGLFRDKNVILELALGLVVFTVLGIGFLIHWMIPTMPLPLAFALAAILSPTDPVALSSITSRVPIPKRMMHILEGESLLNDATGLVCFQFAVAAVLTGHFSLATASLTFVWVLVVGLSLGIATTYVLSRVQRWVWRHFGGEPAAAILFNLLTPFAAYLLAESMQASGILAAVAAGITMSYVELSGNAQATIRVQRWAVWETVQFTFNGIIFVLLGEQLPGILDDLVHSAQQAGYMNVGWLLVDVAVISAGLMLLRFLWVWLSLQWNLFKAVCCGKQRISPPWQIVVAMSLSGVRGAVTLAGVLTLPLLMPDGTPLPARQLVIFLAASVILVSLLLASVALPYLLRGLELPEKSSYDKEEDFARRVSAQAALEAVERLRQRLVEDSANAERYNEAAHQVSQLYQRKLGAVDLANVDPQETKVFEQVVRRFRQVGLAAERDELFRLAREHNISDELLQRMVRNLDLIEARRRS

SEQ ID NO: 12589 - protein, 513 aa, Rhizobium leguminosarum bv. viciae 3841
MTFFETLVALLAVAILLLQVTRRMRLPYPGILAAAGVAVAMLPGAPTIPIDPPTALALFIAPVLVDSAYDFPVGAARRMLLPLFFYAVVAVLVTTGVVVSISMLTVGLPIAVAVTLGAIVSPPDAAAATAVLSNLPVARRVDALLKGESLFNDATALLLFGAALTVQARGGLDAGTALQVGFAAPGGILFGIAFGFFVSRLRPITENTVGGTLLQFVYAFSTWLIAEHLHLSAVLATVASAMTLATLSSVKDSPRMRVHSFAVWTTVVFLLNVVAFLLMGLQARRILEAMSAEELQRAMGFAAIVVVGVILARMAMAFLLHAVVASRHRRGGELAPFTSGETLLVGWAGMRGLVTLATAFALPADFPERDLVVLTAFTVVLATLVIQGATLAPMIHFLKLGRQAEVRDELKAARRSLAEAAFLRLEKEDGTEAEAIRTICKDHWTASTDANETSPLDRRRHLTIAAVLAQRQRLEELRDADQIGATQYLELQEDLDWKQLSVDSDEDRRITES

SEQ ID NO: 12590 - protein, 369 aa, Aspergillus nidulans FGSC A4; identical to SEQ ID NO: 859

SEQ ID NO: 12591 - protein, 511 aa, Prochlorococcus marinus str. MIT 9312
MRSIKLHKLLDLVGIIPSLDLIDHEINNISFNSKEVQKGTLFLGMPGLNVDGGKYCIEAIENGAEAAIIGSAAKEKIGSIDRERILVIEDNLDYIFGQIVAEFWNRPSRKLKLIGVTGTNGKTTITFLLEYLLKKLGKKTALFGTLLNRWPGFSEVALHTTDFADKLQKKLNAAVEAESEFAILEVSSHSIAQNRISGCEFEAAIFTNLTQDHLDYHSDMESYFQTKRKLFFPPYLNEKDGICVLNHDDHWISKLSSDLEKRSLLVSTKITESEFESDDFFFVTDKKFTEIGSTCIFHTPREKIQLFVPLVGEFNLMNAIQAITILYKLNFSLKDLSKLIQSFPGAPGRMEKIQIDNNDVSRSLPTVIVDYAHTPDGLKKVLQSIKKLCEGKLITVFGCGGDRDRSKRPLMGSIAEEFSDQLFITSDNPRSEEPQKIVNDILMGIKKREKITIEIDRFKAINESIKFAKKKDIVLIAGKGHEDYQILNDKVINFDDRKIAYKLLKEKNKSQ

SEQ ID NO: 12592 - protein, 497 aa, Symbiobacterium thermophilum IAM 14863
MRVKDCLVVGQLLQGDPAAEITDVVYDSRQVTPGALFVALPGRNVDGHDFAPEAVQRGAAALVVERPVAAPAHVAVIRTDSTRAALGRLAAEFWRHPSRRMRVVGVTGTNGKTTTTHLVKAVLERQGHVVGLTGTVHTLMPGERRPAGLTTPEASDLQRLFHQMAEAGCTYAVMEASSQGLDMNRVDDVEFDLGIFTNLTQDHLDYHGTFGAYREAKAKLFRLLSRPGYKPRKAAVLNADDPASEYYRSVTEVPVYTYGFRPDAMVRAADVELSPAGTRLRLCTPQGEVPVSLRLVGRFNVYNALAAAAAGVAEGIALDVIRDALEAEEGVPGRLQPVRAGQPFGVFVDYAHSPDSLENVLHTARGFTRGRLIVVFGCGGDRDPTKRPVMGRIAGCLAHHTIVTSDNPRSEDPVRIVQQIESGLVDGLLPGHTYEVVIDREEAIRRAVTMAEPDDVIVIAGKGHETYQIFKDRTIPFDDRAVARSLIEARVGKGGSS

SEQ ID NO: 12593 - protein, 478 aa, Mycobacterium sp. MCS
MADKTADDIIKLIKDESVEYVDIRFCDLPGVVQHFSIPASAFDESVFEDGLAFDGSSVRGFQSIHESDMMLLPDPETARIDPFRHAKTLNMNFFVHDPFTREAYSRDPRNVARKAENYLISTGIADTCYFGAEAEFYIFDSVTFDSKINGTSYEVDSESGWWNTGEPFEADGSANRGYKVRPKGGYFPVAPYDHYVDLRDKMATNLINAGFVLERGHHEVGTAGQAEINYKFNTLLHAADDVLLFKYIIKNTAWQEGKTVTFMPKPLFGDNGSGMHAHQSLWKDGQPLFHDESGYAGLSDTARHYIGGILHHAPSLLAFTNPTVNSYKRLVPGYEAPINLVYSQRNRSACVRIPITGNNPKAKRLEFRCPDSSGNPYLAFAAMLMAGIDGIKRKIEPQAPVDKDLYELPPDEAASIPQAPTSLSAVIDRLEEDHEYLTEGGVFTEDLIETWISYKRENEIMPIQIRPHPYEVALYFDV

SEQ ID NO: 12594 - protein, 193 aa, Photobacterium sp. SKA34
MQVISNNRFILRLILLVSSILFTSLVTTFANASSCPTLYQAPLKKLNSDEYYDFCKQLTGKVVLVVNTASQCGFTPQFKQLEELYKTYKDSGLVVIGFPSNDFKQDRGSDQQTANICYSNYGVTFPMITKTSVKGSKANPLYKHLIAQSGKSVGWNFQKYLLNKQGQVVGVFPSRLSPTSNEMVAAIKQQLNM

SEQ ID NO: 12595 - protein, 180 aa, Oryza sativa
PYLNTDPCIDAAVYGGRQCNSAVFSPSIGGNGLSRYRTDFHEIEKIGYGNFSVVFKVLNRIDGCLYAAKRSIKQLHNDMERRQAVKEVQAMAALGSHENIVRYFTSWLENEQLYIQMELCDRSLSMNRNQPVKHGEALELLYQICKGLDFMHERGIAHLDVKPDNIYVRNGIYKLGDLAV

SEQ ID NO: 12596 - protein, 281 aa, Leptospira interrogans serovar Lai str. 56601
MMELWLDEALELKNGRALKIKVKEFLHSRTTPFQKIDVFESVGFGRMFTLDGVVMMTEADEFAYHEMIVHVPMMSHPNPEKVLVIGGGDGGTVREVLKHPSVKEVHLCEIDKGVIDVCYEYFPEIANAMKDPRVKHAYEDGAKYVKDYQNYFDCIMVDSSDPVGPAEVLFKRPFYETMANCLKEGGICTTQGESFYYHGSIIRELFNFIPEIFKHCGYYYTVVPTYPSGIIGFTYCSKGPDPYTVVPDPQRVPQGLKYYSAEMHKAAFVLPQFAQKHIVRK

SEQ ID NO: 12597 - protein, 411 aa, Synechococcus sp.
MLRKRLQAGLCSLLLVLVLVFGPMERAIAFTDEQDLLLQAWRYVSQAYVDETFNHQNWWLIRQKFLKRPLKTRDEAYEAVGEMLALLDDPYTRLLRPEQYRSLKVSTSGELSGVGLQINVNPEVDVLEVILPLPGSPAEAAGIEAKDQILAIDGIDTRNIGLEEAAARMRGKKGSTVSLTVKSPKTDTVRTVKVTRDTIALNPVYDKLDEKNGEKVGYIRLNQFSANAKTEIIKSLNQLQKQGADRYVLDLRNNPGGLLQAGIEIARLWLDQETIVYTVNRQGIFESYSAVGQPLTDAPLVVLVNQATASASEILAGALQDNGRAMLVGEKTFGKGLIQSLFELPDGAGMAVTVAKYETPLHHDINKLGIMPDEVVPQEPIGYAMMGSETDLQYQAALDLLTQDQRSPKFP

SEQ ID NO: 12598 - protein, 1024 aa, Oryza sativa Japonica Group
MDTAVGPIAPPLTSLKLDSHHRSRYGAVGGEWDGRGQREVAPIEIEGKGVAGEGRKRRMPANPKLAAKPSPSPPTAAAAASRPKATAKPPLGAGYRDNDDDDDDFQSPPRASSRAARALKPSGNGAASRRPSKRLKPSSSCCSGKENRPAAAGSGRAPAGRAASKGAGVGETLGVVSRVSSGVPGGDKARGGGICGLLRCGSDDFSSVSNGKKGLDRYWRRDGGLHSRPNPMDSTVSMPDATCDLENGGSQVAQMLSSNDRISVQLEGNAKVELGKSESDPTTMRKERNGSGACESDHPARLIEPRLLTLVTNCDFGGADSMDSKELGSAIHPSVSKDRNVENESGGASVCTFALHNRNCHSSCVESELEMLNAKYDLGPRDCKESQEGPGLCSLISEERTVAAEGDATFTFEERGNTSSGLEACKGSHCLDPVEPKLMDSCATHALEGDGCDDFEIGTQLNELINLCMEDYTEGPLSNKVACLEGNGMDCGSFNSSCEVQCPLCGSNISDLSEELRLVHTNSCLDGDKPAKEPNSDNQNEPCGESNVEKRRVMEWLRNLGLSKYEEIFIKEEVDWETLQWLTEEDLLGMGITSLGPRKKIAHALCELRKKNNDANDLAADMLNLENTKKAKIPMNGNKLITEYFRCPSSDQRQKKACKVNTPSNLNSQKKSNAKATGGRRTVKGKVKDTPIWCCIPGTPFRVDAFRYLRGDCCHWFLTHFHVDHYQGLTKSFCHGKIYCSSVTANLVHYKIGIPWDRLHVLPLNEKITIAGVNLTCFDANHCPGAVIILFEPSNGKAVLHTGDFRFSSEMANNRVLQSSPIHTLILDTTYCNPRYDFPTQEIVIQFVIEAIQAEAFNPKTLFLIGSYTIGKERLYMEVARLLQKKIYVGAAKLQILKHLGLPQEIMHWFTANEAESHIHVVPMWTLASFKRMKYLSTQYADRFDLIVAFCPTGWSFGKGKKRTPGRKWQQGAIIRYEVPYSEHSSFTELREFVRFISPEHIIPSVNNDGPDSANAMLAQLLND

SEQ ID NO: 12599 - protein, 167 aa, Oryza sativa
  misc_feature (146)..(146): Xaa can be any naturally occurring amino acid
MAFASASNGAVRFTEEQEALVLKSWAIMKDDSANIGHRFFLKIFEVAPSARHLFSFLRNSDVPLEKNPNLKKHAMAVFVMTCEAAAQLRKTGRVTVRDTTIKRLGSTHFKNGVSDTHFEVARFALLETIKDGIPASMWSPEMKNAXGEAYEHLVAAIKEGMKPVALL

SEQ ID NO: 12600 - protein, 381 aa, Nicotiana tabacum
MEVISTNTNGSTIFKNGAIPMNGYQNGTSKHQNGHQNGTSEHRNGHQNGISEHQNGHQNGTSEHQNGHQNGTISHDNGNELQLLGSSNSIKPGWFSEFSALWPGEAFSLKVEKLLFQGKSDYQDVMLFESATYGKVLTLDGAIQHTENGGFPYTEMIVHLPLGSIPNPKKVLIIGGGIGFTLFEMLRYPTIEKIDIVEIDDVVVDVSRKFFPYLAANFSDPRVTLVLGDGAAFVKAAQAGYYDAIIVDSSDPIGPAKDLFERPFFEAVAKALRPGGVVCTQAESIWLHMHIIKQIIANCRQVFKGSVNYAWTTVPTYPTGVIGYMLCSTEGPEVDFKNPVNPIDKETTQVKSKLAPLKFYNSDIHKAAFILPSFARSMIES

SEQ ID NO: 12601 - protein, 353 aa, Nicotiana tabacum
MEVISTNTNGSTIFKSGAIPMNGHHNGTSKHQNGHKNGTSEQQNGTISLDNGNELLGNSNCIKPGWFSEFSALWPGEAFSLKVEKLLFQGKSDYQDVMLFESATYGKVLTLDGAIQHTENGGFPYTEMIVHLPLGSIPNPKKVLIIGGGIGFTLFEMLRYPTIEKIDIVEIDDVVVDVSRKFFPYLAANFNDPRVTLVLGDGAAFVKAAQAEYYDAIIVDSSDPIGPAKDLFERPFFEAVAKALRPGGVVCTQAESIWLHMHIIKQIIANCRQVFKGSVNYAWTTVPTYPTGVIGYMLCSTEGPEIDFKNPVNPIDKETAQVKSKLAPLKFYNSDIHKAAFILPSFARSMIES

SEQ ID NO: 12602 - protein, 468 aa, Pseudomonas taetrolens
MSKSVQLIKDHDVKWIDLRFTDTKGTQHHVTMPARDALEDDFFEVGKMFDGSSIAGWKGIEASDMILLPDDDTAVLDPFTEDATLILVCDIIEPSTMQGYDRDPRAIAHRAEEYLKTTGIGDTVFAGPEPEFFIFDEVKFKSDISGSMFKIYSEQGSWMSDQDIEGGNKGHRPGVKGGYFPVPPFDHDHEIRTAMCNALEEMGQTVEVHHHEVATAGQNEIGVKFNTLVKKADEVQTLKYVVHNVADAYGRTATFMPKPLYGDNGSGMHVHMSIAKDGKNTFAGEGYAGLSETALYFIGGIIKHGKALNGFTNPATNSYKRLVPGFEAPVMLAYSARNRSASIRIPYVNSPRGRRIEARFPDPAANPYLAFAALLMAGLDGIQNKIHPGDAADKNLYDLPPEEAKEIPQVCGSLKEALEELDKGRAFLTKGGVFSDDFIDAYIALKSEEEIKVRTFVHPLEYELYYSC

SEQ ID NO: 12603 - protein, 71 aa, Glycine max
EKLLVTSVSLFLFTSGVIGFMLCSTEGPPVNFKHPINKLNPEKNGVAKGPTKFYNPEVIFQITCLFCFIRI

SEQ ID NO: 12604 - protein, 513 aa, Frankia sp. EAN1pec
MTTPALRPAAPSPRSLTALPDVLRSITVAPGPSGGAALAGVVLTGVTHDSRAVLPGDLYAALPGAHVHGADFAAGAVAAGAVAVLTDPVGAAALSGRLAVPVLVTDDPRRDLAPAAAWIYGDPSSALTLLGVTGTNGKTTTAFLLDAGLRAAGYTTGLLGTVQTRVAGTVVPSVRTTPESGDLQALLATMVERGVGAASMEVSSHALAQHRVDALRFAGAAFTNLSQDHLDFHPTMEDYFAAKAALFEPARSAAAVVCVDDDWGRRLAALRPDARTYSVTGRPADWWPEDVVAGPGGSVFRALGPDGAKADLSLALPGRFNVANALGALALLAAVGVPLEAAAEGISSLPGVPGRMERIDAGQPFLALVDYAHTPGAVETLLATVRPIVTGRVVVVLGCGGDRDRAKRPLMGAAAARLADLAVFTSDNPRSEDPARILEQMLAGARGAPGAGEIVVEPDRASAIALAVGAAGPTDAVIVAGKGHESGQDVAGVVTPFDDREVLRSALLAAASR

SEQ ID NO: 12605 - protein, 1162 aa, Zea mays
ASDSRFPKRSPSARPVAPRHAHHHHSQSSGGSTSRAGAGGGGGGAAATESVSKAVAQYNIDARLHAVFEQSGASGRSFDYSQSLRAPPTPSSEQQIAAYLSRIQRGGHIQPLGCTLAVADDSSFRLLAFSENTTDLLDLSPHHSVPSLDSVALPPVSLGADARLYFSPSSAVLLERAFAAREISLLNPLWIHSRASSKSFYAILHRIDVGVVIDLEPARTEDPALSIAGAVQSQKLAVRAISRLQALPGGDVKLLCDTVVEHVRELTGYDRVMVYRFHEDEHGEVVAESRRDNLEPYLGLHYPATDIPQASRFLFQQNRVRMIADCHAIPVRVIQDPGLSQQLCLVGSTLRAPHGCHAQYMANMGSIASLVMAVIISSGGDDERTGRGAISSSMKLWGLVVCHHTSPRCIPFPLRYACEFLMQAFGLQLNMELQLAHQLSEKHILRTQTLLCDMLLRDSPAGIITQSPSVMDLVKCDGAALYYRGKYYPLGVTPTESQIKDIIEWLTVCHGDSTGLSTDSLADAGYLGAVALGDAVCGMAVAYITPSDYLFWFRSHTAKEIKWGGAKHHPEDKDDGQRMHPRSSFKAFLEVVKSRSLSWENAEMDAIHSLQLILRDSFRDAAEGTSNSKAIVNGQRQLGELELRGINELSSVAREMVRLIETATVPIFAVDTDGCINGWNAKIAELTGLSVEEAMGKSLVNDLIFKECDDIGEKLLSRALRGEEDKNVEIKLKTFGSEQSKGAIFVIVNACSSRDYTQNIVGVCFVGQDVTGQKVVMDKFINIQGDYKAIVHNPNPLLPPIFASDENTSCSEWNTAMEKLTGWSREEVVGKFLIGEVFGNCCRLKGPDALTKFMVIIHNAIGGQDYEKFPFSFFDKNGKYVQALLTANTRSKMDGKSIGAFCFLQIASAEIQQAIEIQRHQEKKCYARMKELAYICQEIKNPLSGIRFTNSLLQMTDLNDDQRQFLETSSACEKQMSKIVKDASLQSIEDGSLVLEQSEFSLGDVMNAVVSQAMLLLRERDLQLIRDIPDEIKDASAYGDQCRIQQVLADFLLSMVRSAPSENGWVEIQVRPNVKQNSDGTNTELFIFRFACPGEGLPADVVQDMFSNSQWSTQEGVGLSTCRKILKLMGGEVQYIRESERSFFLIVLEQPQPRPAAGREIV

SEQ ID NO: 12606 - protein, 1099 aa, Prochlorococcus marinus str. MIT 9313
MIGCGTPAWMVAVDRQCTPAPRNPTHTFCVAAMSLLHATWLPAIRTPTSSGRPALLVWADTWRVATPAGPAATPALHPFTLSPDDLRAWLIERDLLPDEIIDATACLTLPSRTVKPRNKTKNVSTESDEAKDNKTSWTGLPLQAGEPIPKQTEWWPWQVQGLAVEPAAATAWLSKLPLSGNHPDLADELRWWSHLQRWALSMIARGRWLPQVELSKGEGYPHRARWTPLLNREDDRRRLEDLAAQLPLVATCALPWREPTGRRSNRMTRLRPEAMRAANPVASCRPRSGRLRVASLLEELLDAQLRTGFEASEQGLDPLLTAWQEALGSDSGVINLPDEEAERLATASNHWREGVAGNVAPARACLELFTPGEGEDLWELRFSLQAEADPTIKVPAAAAWAAGPKVLQLGEIRVEHPGEVLLEGMGRALTVFAPIERGLDSATPEAMQLTPAEAFVLVRTAATQLRDVGVGVELPASLSGGLASRLGLAIKAELSERSRGFTLGETLDWSWELMIGGVTLTLRELERLASKRSPLVNHKGAWIELRPNDLKHAEHFCSVNPGISLDDALRLTATDGDTLMRLPVHRFEAGPRLQAVLEQYHQQKAPDPLPAPEGFCGQLRPYQERGLGWLAFLHRFDQGACLADDMGLGKTIQLLAFLQHLKAEQELKRPVLLIAPTSVLTNWKREALAFTPELNVREHYGPRRPSTPAALKKALKGLDLVLTSYGLLQRDSELLETVDWQGVVIDEAQAIKNPNAKQSQAARDMGRPDKNNRFRIALTGTPVENRVSELWALMDFLNPRVLGEEDFFRQRYRLPIERYGDMSSLRDLKGRVGPFILRRLKTDKAIISDLPEKVELSEWVGLSKEQAALYRNTVDETLEAIARAPRGQRHGKVLGLLTRLKQICNHPALALKEQTVAKGFMDRSAKLLRLEEILEEVIEAGDRALLFTQFAEWGHLLKAYLQQRWRFEVPFLHGSTSKTERQAMVDRFQEDPRGPQLFLLSLKAGGVGLNLTRASHVFHVDRWWNPAVENQATDRAYRIGQTSRVMVHKFITSGSVEEKIDRMIREKSRLAEDIIGSGEDWLGGLGVSQLRELVALEDS

SEQ ID NO: 12607 - protein, 170 aa, Helicobacter pylori
GSGMHTHVSVWKNNENLFSGETYKGLSELALHFLGGVLRHARGLAAFTNASTNSYKRLIPGYEAPSILTYSANNRSASVRIPYGISKNSARFEFRFPDSSSNPYLAFGAILMAGIDGVKNKMDPGEAMDINLFKLTLDEIREKGIKQMPHTLRRSLEEMLADKQYLKEGQ

SEQ ID NO: 12608 - protein, 170 aa, Helicobacter pylori
GSGMHTHVSVWKNNENLFSGETYKGLSELALHFLGGVLRHARGLAAFTNASTNSYKRLIPGYEAPSILTYSANNRSASVRIPYGISKNSTRFEFRFPDSSSNPYLAFAAILMAGMDGVKNKMDPGEAMDINLFKLTLDEIREKGIKQMPHTLRRSLEEMLADKQYLKEGQ

SEQ ID NO: 12609 - protein, 272 aa, Arabidopsis thaliana; identical to SEQ ID NO: 11547

SEQ ID NO: 12610 - protein, 500 aa, Anaplasma centrale
MAAERIIGIDLGTTNSCVAVMEAGTAKVIENSEGSRTTPSVVAFTENEQLVGELAKRQANINALNTIYASKRIIGRRYDDMRDVKCPYEVFPAKNGDAWIRARGAEYSPVQIGAFVLEKIKETAERYFGAPVKKAVITVPAYFNDAQRQATKDAGAIAGLDVVRIINEPTAAALAYGLDKGDKQRTIVVYDLGGGTFDVSVLEIAEGVFEVKATNGDTKLGGEDFDNAVMEHMMGSFKQETGIDLHNDPMAVQRIKEAAEKAKIELSSRLETDITLPFISSDSTGAKHLRLKLTRAKFESLVSELIERTIEPCKKALDDAGIKDTSKIDEVVLVGGMTRVPKVVQRVKDFFGGKEPCKGVNPDEVVAIGAAIQGGILTGDVRDVLLLDVAPLSLGIETLGGVFTPLIERNTTIPTKKSQVFSTAEDGQTAVTIKVYQGERKMAIDNKLLGQFSLEGIPSAPRGVPQIEVTFDIDANGIVHVSAKDKASGKEQTIKIQSSG

SEQ ID NO: 12611 - protein, 1146 aa, Arabidopsis thaliana
MTTVIDATMAYRFLEEATDSSSSSSSSKLESSPVDAVLFVGMSLVLGIASRHLLRGTRVPYTVALLVIGIALGSLEYGAKHNLGKIGHGIRIWNEIDPELLLAVFLPALLFESSFSMEVHQIKRCLGQMVLLAVPGVLISTACLGSLVKVTFPYEWDWKTSLLLGGLLSATDPVAVVALLKELGASKKLSTIIEGESLMNDGTAIVVFQLFLKMAMGQNSDWSSIIKFLLKVALGAVGIGLAFGIASVIWLKFIFNDTVIEITLTIAVSYFAYYTAQEWAGASGVLTVMTLGMFYAAFARTAFKGDSQKSLHHFWEMVAYIANTLIFILSGVVIAEGILDSDKIAYQGNSWRFLFLLYVYIQLSRVVVVGVLYPLLCRFGYGLDWKESIILVWSGLRGAVALALSLSVKQSSGNSHISKETGTLFLFFTGGIVFLTLIVNGSTTQFVLRLLRMDILPAPKKRILEYTKYEMLNKALRAFQDLGDDEELGPADWPTVESYISSLKGSEGELVHHPHNGSKIGSLDPKSLKDIRMRFLNGVQATYWEMLDEGRISEVTANILMQSVDEALDQVSTTLCDWRGLKPHVNFPNYYNFLHSKVVPRKLVTYFAVERLESACYISAAFLRAHTIARQQLYDFLGESNIGSIVINESEKEGEEAKKFLEKVRSSFPQVLRVVKTKQVTYSVLNHLLGYIENLEKVGLLEEKEIAHLHDAVQTGLKKLLRNPPIVKLPKLSDMITSHPLSVALPPAFCEPLKHSKKEPMKLRGVTLYKEGSKPTGVWLIFDGIVKWKSKILSNNHSLHPTFSHGSTLGLYEVLTGKPYLCDLITDSMVLCFFIDSEKILSLQSDSTIDDFLWQESALVLLKLLRPQIFESVAMQELRALVSTESSKLTTYVTGESIEIDCNSIGLLLEGFVKPVGIKEELISSPAALSPSNGNQSFHNSSEASGIMRVSFSQQATQYIVETRARAIIFNIGAFGADRTLHRRPSSLTPPRSSSSDQLQRSFRKEHRGLMSWPENIYAKQQQEINKTTLSLSERAMQLSIFGSMVNVYRRSVSFGGIYNNKLQDNLLYKKLPLNPAQGLVSAKSESSIVTKKQLETRKHACQLPLKGESSTRQNTMVESSDEEDEDEGIVVRIDSPSKIVFRNDL

SEQ ID NO: 12612 - protein, 170 aa, Helicobacter pylori
GSGMHTHVSVWKNNENLFSGETYKGLSGLALHFLGGVLRHARGLAAFTNASTNSYKRLIPGYEAPSILTYSANNRSASVRIPYGISKNSARFEFRFPDSSSNPYLAFAAILMAGMDGVKNKIDPGEAMDINLFKLTLDEIREKGIKQMPHTLRRSLEEMLADKQYLKEGQ

SEQ ID NO: 12613 - protein, 185 aa, Brassica rapa subsp. pekinensis; identical to SEQ ID NO: 9249

SEQ ID NO: 12614 - protein, 533 aa, Xylella fastidiosa Temecula1
MKGHMRIKTGIKKALILILSVVLVSLVAIAAHRFYIRLPQSRLFYAWKKVDEVYYDRTFAGFDWPAVLATYKKQLPRFDSDGQKTSPIINDMLSLLEVSHLQHFPAFLVPEEKKKTAVLASYFPELRDISGMVMVMDMLPRISRVLSLETWSPLYAHGVRVGDRILLDTLDTDISDKNKPVRLYCYHINTAGVKKEFEFDLPAPPLGAQQTAVPSGDHVLHIARFDQGEIQALKHVSEDRNSSITQLHYISLGAVTTALHLPKNKVIDVVKDSEADKAGVEIGSFIGNGTNIKAGPENIGGKKVIKTDSRYEVVLPDGRKVTFSINKIIPKLNDIEGIRSAQLIGKTLVITFNEMSDENTQWALQQIKNTPATAILLDLRYNTGGSGIAGEKLLAGFLASGTRIATEIRGKKTNEINVPAGYTPTDKPTAVLISLLSASGAELAARTLQFHHRARIYGAQSSGQVLTSRFYKLTDGTYMQIADTNLLDPAGKPIEWYGVMPDVKKWKTLSDVRAGRDPVLECALTDLSGGQCH

SEQ ID NO: 12615 - protein, 178 aa, Arabidopsis thaliana
MAESQAKSPGGCGSHESGGDQSPRSLHVREQDRFLPIANISRIMKRGLPANGKIAKDAKEIVQECVSEFISFVTSEASDKCQREKRKTINGDDLLWAMATLGFEDYMEPLKVYLMRYREGDTKGSAKGGDPNAKKDGQSSQNGQFSQLAHQGPYGNSQVTFPLFSSHSSNTHHSLLIC

SEQ ID NO: 12616 - protein, 889 aa, Saccharomyces cerevisiae YJM789
MPTAKRTSSRASLALPFQLRLVHKKSWGHRLRDFISGFLKSCRPIAKYVFPNFIVVHYIYLITLSIIGSILLYPCKNTAFIDVLFLAAGASTQGGLATKSTNDFNLYQQIVVYVITLLSTPILIHGFLAFVRLYWFERYFDNIRDISKQNFKLRRTMTLQQRELSGSSGNAARSRSFKDNLFRGKFVSREDPRQSASDVPMDSPDTSALSSISPLNVSSSKEESSDTQSSPPNFSSKRQPSDVDPRDIYKSIMMLQKQQEKSNANSTDSFSSETNGPAFIVQERHERRAPHCSLKRHSVLPSSQELNKLAQTKSFRKLLGLRRDEGDHDYFDGAPHKYMVTKKKKISRTQSCNIPTYTPSPSPKTSGQVVENHRNLAKSAPSSFVDEEMSFSPQESLNLQFQAHPPKPKRREGDIGHPFTRTMSTNYLSWQPTFGRNSVFIGLTKQQKEELGGVEYRALRLLCCILMVYYIGFNILAFVTIVPWACTRHHYSEIIRRNGVSPTWWGFFTAMSAFNNLGLSLTADSMVSFDTAPYPLIFMMFFIIIGNTGFPIMLRFIIWIMFKTSRDLSQFKESLGFLLDHPRRCFTLLFPSGPTWWLFTTLVVLNATDWILFIILDFNSAVVRQVAKGYRALMGLFQSVCTRTAGFNVVDLSKLHPSIQVSYMLMMYVSVLPLAISIRRTNVYEEQSLGLYDNGQDDENITHEDDIKETDHDGESEERDTVSTKSKPKKESPKSFVGAHLRRQLSFDLWYLFLGLFIICICEGRKIEDVNKPDFNVFAILFEVVSAYGTVGLSLGYPNTNTSLSAQFTVLSKLVIIAMLIRGRNRGLPYTLDRAIMLPSDKLEQIDRLQDMKAKGKLLAKVGEDPMTTYVKKRSHKLKKIATKFWGKH

SEQ ID NO: 12617 - protein, 535 aa, Xylella fastidiosa Temecula1
MTGHMRIKTGIKKALILMLSVVLVSLVAIAAHRFYIRLPQSRLFYAWKKVDEVYYDRTFAGFDWPAVLATYKKHLPRFDWDGRETSPFIHNMLSLLEVSHLRHIPGFMAPEKIKEEAVLANYFPELRDISGMVLVQETLFKMSKVLSLETWSPLYAHGVRVGDRILLDTLDTDISDKNKPVRLYCYHINTAGVKKEFEFDLPAPPLGAQQTAVPAGDHVLHIARFARFDQGEIQALKHVIEDRNSPMTQLHYIPLGAVTTRPHLIRTKVIDVVKDSEADKAGVEIGSFIGDGTDPKTESKNIGGKTVVKSNGIYKMILPDGKKVTFSINKEITLSNFEGIRSAQLIGKTLVIAFNEMTDENTQWALQQIKNTPATAIVLDLRDNTGGSSIAVPKLLAGFLASGTRIATEIRGKKTNEINVPTGYTPTDKPMAVLIGLVSASGAEVTARTLQFHRRARIYGAQSSGQVLMSRFYKLTDGSYIQIPHANLLDPAGKPLEWYGVMPDVKKWKTLSDVRAGRDPVLECALTDLSGGQCH

SEQ ID NO: 12618 - protein, 170 aa, Helicobacter pylori
GSGMHTHVSIWKNNENLFGGETYKGLSELALHFLGGVLRHARGLAAFTNASTNSYKRLIPGYEAPSILTYSANNRSASVRIPYGISKNSARFEFRFPDSSSNPYLAFAAILMAGMDGVKNKIDPGEAMDINLFKLTLDEIREKGIKQMPHTLRRSLEEMLADKQYLKESQ

SEQ ID NO: 12619 - protein, 148 aa, Astragalus sinicus
MGFTEAQEVLVNSSWEAFKQNLPHNSILFYTFVLEKAPAAKDLFSFLKNSDGVPKNNPALQAHAEKVFGLVRDAAVQLRAKGTVTLGDASLGGVHVQKGVVDPHFVVVKEALLQTIKEVAGGSWSAELSAAWEAAYDGLAAEIKKAMS

SEQ ID NO: 12620 - protein, 554 aa, Zea mays
NYSFSKHKKPKAPLIGGSNLIICPMTLISQWKAEIEAHTKPGTANIYVHYGQNRPKDASIIGQSDIVLTTYGVVSSEFSIDGSTENGALYSVHWFRVVLDEAHMIKSSKSLISLAAAALTADRRWCLTGTPIQNNLEDLYSLFRFLKVEPWRNWALWNKLVQKPYEEGDERGLKLLQSILKPIMLRRTKNCTDKEGRPILNLPPANIEVKYCVLSEAEKDFYEALFRRSKVKFDQFVEQGRVLHNYASILELLLRLRQCCDHPFLVMSRGDTKEYADLNKLAKRFLRGGNGAVNGDSCIPSRAYIEQVVQELQKDEGECPICLEAFEDAVLTPCAHRLCRECLLSSWRSATAGLCPVCRMSMSKQDLITAPTDNRFQIDVEKNWVESSKISALLQELEALRSSGAKSIVFSQWTAFLDLLQIPLSRNNFSFARLDGTLNLQQREKVIKEFSEDKGILVLLMSLKAGGVGINLTAASNAFVMDPWWNPAVEEQAVMRIHRIGQTKTVSIRRFIVKGTVEERMEAVQARKQRMISGALTDQEVRTARIEELKMLFS

SEQ ID NO: 12621 - protein, 446 aa, Mycobacterium sp. MCS
MDRQKEFVLRTLEERDIRFVRLWFTDVLGYLKSVAIAPAELEGAFEEGIGFDGSSIEGFARVSEADMVARPDPSTFQVLPWADGSGKHHSARMFCDITMPDGSPSWADSRHVLRRQLGKASDLGFSCYVHPEIEFFLLKPGPNDGTPPVPADNGGYFDQAVHDSAPNFRRHAIDALEQMGISVEFSHHEGAPGQQEIDLRYADALSMADNVMTFRYVVKEVALGDGVRASFMPKPFAEYPGSAMHTHMSLFEGDTNAFHSPDDPLQLSDVAKSFIAGILEHACEISAVTNQWVNSYKRLVHGGEAPTAASWGAANRSALVRVPMYTPRKASSRRIEVRSPDSACNPYLTFAVLLAAGLRGVEKGYVLAPQAEDNVWSLTPEERRAMGYRELPTSLGVALGEMENSELVAEALGEHVFDYFLRNKRAEWETYRSHVTPYELQAYLSL

SEQ ID NO: 12622 - protein, 545 aa, Azotobacter vinelandii
MQLLYTILIMLLVVGGTRITAQFIPIPLPLIQIAIGALLALPGFGLHVRLDPELFLLLFIPPLLFVDGWRMPKGEFWRLRTPILLLAFGLALFTVLGAGWLIHLLFPGIPLAAAFALAAVLSPTDAVAVSAIAHGRLPRTLMNILQGEALMNDASGLVAFKFAVAAALTGSFSLTEAGLEFVLVALGGLAVGVALSYALGRFRAWMIALGWEEPAPHVMFMLLLPFAAYVAAEHLGVSGILSAVAAGMMQSRLDLLPRQTTTRLLNRSVWALLEFTFNGLIFLLLGLQLPDIVKATLKEGELFWTSAVELGLLVGQVFLALILLRFVWTWLYWLVSGALRRWRGLPSSFAGQSSLRLAALLTLGGVRGAVTLAGVLSLPLLLSNGEAFPQRDLLIFVAAGVILLSLLVATLGLPLLLRGLPADNEEAREQELRRNRVKTVEAAIRALEAQSEEPGLSPEEMALAAEVKAKIMAEYRQQLERDDSVEARTRLRQMDALEQRLRLQALRSQRLELYRLRRRHQVDDDLLGEILRELDISEARLFRST

SEQ ID NO: 12623 - protein, 444 aa, Campylobacter jejuni subsp. jejuni NCTC 11168
MMELILKTKRFFAGLAGFATTFILCLFLTSHLQAKVDQKEEQVQKRLEALDKLTKTLAIVEQYYVDDQNISDLVDKSLSGLLSNLDAHSSFLNEKDFNDMKIQTNGEFGGLGITVGMKDGALTVVSPIEGTPADKAGIKSGDIILKINDEATLGINLNDAVDKMRGKPKTQITLTIFRKGATKPFDVTLTREIIKIESVYAKMIENENILYLRVTNFDKNVVDVASKELKKYPNVKGVILDLRNNPGGLLNQAIGLVNLFVDKGVIVSQKGRIASENQEYKADPKNKISNASLVVLVNGGSASASEIVSGALQDLKRGVIVGENTFGKGSVQQIIPINKTEALRLTIARYYLPSGRTIQAVGVKPDIEVFPGKVNTQEDGFSIKESDLKQHLESELEKIDKNKKEDKQENKDNKNLISQKQINDDAQLKSAIDTIKILNIKQGQ

SEQ ID NO: 12624 - protein, 174 aa, Streptococcus pyogenes MGAS10394
MIPLTKLLITPRRCHMPNLYDFTVKAQNGNDLSLAAYKEKVVLIVNTATKCGLTPQYQALQALYDTYHDKGFEVLDFPCNQFLNQAPGDAEEINHFCSLTYHTTFPRFAKIKVNGKDADPLFTWLKEEKSGPLGKRIEWNFTKFLIDQNGQVIKRYSSKTDPKLIEEDLKALLG

SEQ ID NO: 12625 - protein, 378 aa, Arabidopsis thaliana
MIFSVVRSSLPYIFRFTSHQNHHLSQTLVPPLSHFSEIFTRAITMDAKETSATDLKRPREEDDNGGAATMETENGDQKKEPACFSTVIPGWFSEMSPMWPGEAHSLKVEKVLFQGKSDYQDVIVFQSATYGKVLVLDGVIQLTERDECAYQEMITHLPLCSIPNPKKVLVIGGGDGGVLREVARHASIEQIDMCEIDKMVVDVSKQFFPDVAIGYEDPRVNLVIGDGVAFLKNAAEGSYDAVIVDSSDPIGPAKELFEKPFFQSVARALRPGGVVCTQAESLWLHMDIIEDIVSNCREIFKGSVNYAWTSVPTYPSGVIGFMLCSTEGPDVDFKHPLNPIDESSSKSNGPLKFYNAEIHSAAFCLPSFAKKVIESKAN

SEQ ID NO: 12626 - protein, 100 aa, Arabidopsis thaliana
  misc_feature (81)..(81): Xaa can be any naturally occurring amino acid
  misc_feature (89)..(89): Xaa can be any naturally occurring amino acid
MAWAMLSSGTMVASPAQATMDAPFNGLKSYAAFPATRNANNDITYITSNCGRVNCMQVWPPIGKKNVETLSYLSDLTDFQXAKEVDYLXIRNKWISLVKY

SEQ ID NO: 12627 - protein, 244 aa, Rheum australe
MLRVPLLRSPLAKSLNLRSLALSPYSDPIVFRQHFSCSANQFLFKQPSSIGFGNPRFRSDSFSLLRSLRFEHSSMASASSTDAKSVYDFVVKDARGNDVDLSQYKGKVLLIVNVASQCGLTNSNYTELSELYTKYKDQGLEILAFPCNQFGAQEPGSNDQIVEFACTRFKAEFPIFDKVDVNGDKAAPIYKFLKSSKGGLFGDGIKWNFTKFLVGKDGNVVERYAPTTSPSSIEKDVKKVLGVS

SEQ ID NO: 12628 - protein, 1120 aa, Oryza sativa; identical to SEQ ID NO: 9270

SEQ ID NO: 12629 - protein, 359 aa, Arabidopsis thaliana
MDSNNHLYDPNPTGSGLLRFRSAPSSVLAAFVDDDKIGFDSDRLLSRFVTSNGVNGDLGSPKFEDKSPVSLTNTSVSYAATLPPPPQLEPSSFLGLPPHYPRQSKGIMNSVGLDQFLGINNHHTKPVESNLLRQSSSPAGMFTNLSDQNGYGSMRNLMNYEEDEESPSNSNGLRRHCSLSSRPPSSLGMLSQIPEIAPETNFPYSHWNDPSSFIDNLSSLKREAEDDGKLFLGAQNGESGNRMQLLSHHLSLPKSSSTASDMVSVDKYLQLQDSVPCKIRAKRGCATHPRSIAERVRRTRISERMRKLQELVPNMDKQTNTSDMLDLAVDYIKDLQRQYKILNDNRANCKCMNKEKKSI

SEQ ID NO: 12630 - protein, 169 aa, Hordeum vulgare
MAAAASSASSVHDFTVKDASGKDVDLSTYKGKVLLIVNVASQCGLTNSNYTELAQLYEKYKDQGFEILAFPCNQFGGQEPGTNEEIVQFACTRFKAEYPIFDKVDVNGDNVAPVYKFLKSSKGSLFGDNIKWNFSKFLVDKDGNVVDRYAPTTSPLSIEKDIKKLLASS

SEQ ID NO: 12631 - protein, 170 aa, Helicobacter pylori
GSGMHTHVSVWKNNENLFSGETYKGLSELALHFLGGVLRHARGLAAFTNASTNSYKRLIPGYEAPSILTYSANNRSASVRIPYGISKNSARFEFRFPDSSSNPYLAFGAILMAGMDGVKNKIDPGEAMDINLFKLTLDEIREKGIKQMPHTLRRSLEEMLADKQYLKEGQ

SEQ ID NO: 12632 - protein, 170 aa, Helicobacter pylori
GSGMHTHVSVWKNNENLFSGETYKGLSEFALHFLGGVLRHARGLAAFTNASTNSYKRLIPGYEAPSILTYSANNRSASVRIPYGISKNSARFEFRFPDSSSNPYLAFGAILMAGIDGIKNKMDPGEAMDINLFKLTLNEIREKGIKQMPHTLRRSLEEMLADKQYLKEGQ

SEQ ID NO: 12633 - protein, 236 aa, Zea mays
MASSMLSSAAVVTSPAQATMVAPFTGLKSSSAFPVTRKANNDITSIVSNGGRVSCMKVWPPVGKKKFETLSYLPDLTEVELGKEVDYLLRNKWIPCVEFELEHGFVYREHGSTPGYYDGRYWTMWKLPLFGCTDSAQGLKEVQECKTEYPNAFIRIIGFENNRQAQGISFIASKTHRLPRGFNLRWNENFQHKKTPGLQFHLPNGLGSFSPFGFSLFPKNFKIRNCKNWVKEETRN

SEQ ID NO: 12634 - protein, 193 aa, Bradyrhizobium sp. ORS278
MMIDRRMVVLGLGASLSGAMIASRVAQAENAAVSKSTAYRFSFPVPSGEPIRLADFAGKPVLVVNTASQCGYTPQYTGLQKLWSEFHERGLTIIAVPSNDFNQEPGVGGDIAELANKEYGVTFPMTAKAVVTGSNAHPFYRWAAEARPKDTPRWNFHKYLVGRDGYIADVFASSVEPTDTRVKTAIARMLAEG

SEQ ID NO: 12635 - protein, 102 aa, Salmonella typhimurium
QALYYIGGVIKHAKAINALANPTTNSYKRLVPGYEAPVMLAYSARNRSASIRIPVVASPKARRIEVRFPDPAANPYLCFAALLMAGLDGIKNKIHPGEAMDK

SEQ ID NO: 12636 - protein, 102 aa, Salmonella typhimurium
QALYYIGGVIKHAKAINALANPTTNSYKRLVPGYEAPVMLAYSARNRSASIRIPVVASPKARRIEVRFPDPEANPYLCFAALLMAGLDGIKNKIHPGEAMDK

SEQ ID NO: 12637 - protein, 1859 aa, Ustilago maydis 521
MTGATSTPALSPQEITELQRTEIEAIESILDQDFTRVEQKAWKGAAVSQLHEFQVVIRPDEERLKPLVSAYVSFRLPKNYPLVTPTIIVKLNDGRHKGLSASHLTSLGGALNRKAKSLIGAEMIWELITVAQDFISLNNTIPKEVKDGAPSLSLEEEMQKRAKEQQERQRAEQQEENLRRQRAETIRSEQLVQLIQQEASKKAALLKQEKERKRENSYFTQHGPLSPVHGLNASSTSASADTAANTAAAASMSDDSRIETFLEPIEHNGRVISVLRVGPVLSNTGLATRHLAEPAHQAPTDSRAPSHSWLIEHYLITSQHYAYSSGKRKLEEVEFEFDKLVKVREPGLINVLASAVTRITDPQGWKLSVVTERTDGFCLRDLLEQCDSLPWKRVRHYLLALLKTLDSLHTRNLVHRGVDADSIFIESRTQSAIPSVLRLAGACYARRLKDMHKSNPLNDLIGPIQDPVQPDAWKSPESIDQPLSYSRKRDIWDLGVCACQMLFGLECFHEHDLPEHLIRGSKVLAPHVQAFLLLMLERASKKRPTAASLVSRLDELILYEDTDLADDSSTKMPQQHVTSAAVTPAKPTKATPRPGTARQQSDPQNHFPASPSPKIGTPLNAGGLQPIGSLWPFRSPSGPGVSHAAATSRYLSDFEEVEFLGKGAFGSVVKARNRLDGRFYAVKKIKLSSSPDEDERTLREISALSRLDHPHIVRYSTCWIEETQMPITGLAASDTDGFTSSQTLETNTTTSKTHASGPSLSMSAFGNGFQRSALSNRQKAGRDDSFRAVPGFDDDDDDAFASGANSSNLTGSYSDIRFADDDEDSSDQRNAGNSSRAIADMSYKGGLLALRTPSDDSDDSEDENDEDDDRDSEVSSSEDEFGGDDDDDDFSRIPLSSRRASRAGRSMSRSVVDARLGNSVPMQRVLYIQMEFVENRTLREAIEKGLTEDEAWRILRQMVEALAHISSLGIIHRDLKPSNVLMYANGDVKIGDFGLATNALQIAEGNAGNAGGTTDLAESTDLTGDLGTYLYTAPELRAKSGVKYNFKVDIYSLGIIFFEMLASQRVYRTGMERILLIRELRDSGISLPAVWPHSKLEKQTTLIRQMLDHDPDRRPSPLEILKSDLLPPKMEDEYIEECLRLMANPTSAYNHQLMDALFSRTAADLVRDFTFDTGAETDRDTSLTTVVCDLIRNAARRHGAVEFTAPLIVPPNGLYTANEKIVQMLDRTGRVVHLPYDLTVPFARVFARSSNQRFKRYEISNVYRENVVAGGQPRAVLAASFDIVSPEKSAAAEAEALALVEEVLDEIPGIANEDWVIHINHEVVLSMILERIPAKHHTAVLGVVALLAGSKTIQSARTHLLQLGLPRSTIEELEAFNLNDEVSAVHRRLERLFPLDQRTRLAKAVSQISDVVATARFFGVQRRFLFSPLLAQSSSLYRGGVLFTVVRAGKRRDVVAAGGRYDGLLKHFANPSTASSAPLHGVGVQLAVGKLTLGLSKYQEVQVPKLLSRTEEERSFGLYTPRRCDVYVASTPGLLETRMEICRELWAHNIAADLQYEHATYDTPEAAAATCRAEGILLLVFAKARSPVLKVKVVLQRAEYEVARHELVGFVQDRIAKQRSIDVQVAGSGGSGAVAARFGSATFDAASMRAATAASAAPGSLGGMHHHHHYPHGGFSRTYSANEVKPSATIAVREREMLLPERPIERSKKGDKSQQNRPKPSSRLLVLDKASRQVSKFADQLQSGNVPILAVDFTGANFDRLAAALTACLGSHGERGYGANGDAGSGGTDGSEDEGAYMFRAFLETLSADEREYARLIKARAIAFAFPDATNSAINTVGCGRVFLYSLREDRTALIGCGR

SEQ ID NO: 12638 - protein, 168 aa, Yarrowia lipolytica CLIB122
MSAEKTNTAFYNLAPLDKNGEPFPFKQLEGKVVLIVNVASKCGFTPQYKGLEEVYQKYKDQGFTIIGFPCNQFGGQEPGSADEISSFCQLNYGVTFPVLQKINVNGNDADPVYVYLKEQKAGLLGFRGIKWNFEKFLVDKHGNVVDRYASLKTPAGLESTIETLLKKP

SEQ ID NO: 12639 - protein, 395 aa, Desulfitobacterium hafniense Y51
MDLQESRWKEYLKNLGWVLAIGSLIFTVVVGGFIVTNLDHLGRLARVVKLVESDYLEEVSVDTLIEGATKGIVDSLGDPYSSYMNAQENEELMQQIEGKFGGVGIILSLKDPQKLVVLRPIKNTPAAKAGLLPGDVIIKIDDVDATTIDQEKAVSLMRGNPGTNVTLVVYRESIKQNVTVPLTRENIAVPTVEGLALPGNSDIAYIGISQFSSHTALELNEVLRNMDISKYKGMILDLRYNHGGELESAVGVASYFVQPGPIVYIVDKGGNAVTKASEGNYLGIPFVVLVNEESASAAEIVSGAIKDRGTGTLVGTKTFGKGIVQTIYQLDRGTSVKLTTAKYLTPNKIDIHKKGIEPDVEVKLKDGEEATLSPTTKAFDTQLTEALKVLRQQMK

SEQ ID NO: 12640 - protein, 296 aa, Thauera sp. MZ1T
MSGASWFADLPKDVLAELLGEDAGYFLRGARLLESGRSEWQDYEVWETPRFGKLFRLDGCFMTSERDEFHYHENLIHVPGVAHPGLRRALLIGGGDGGSAEELLKYPGIERIVIAELDAKVVDIARRYLDAVHHGALDDPRVEIRIGDGMAHVCEHAPATGERYDLIVLDLTDPIGPAEALYTADFFAACKALLAEGGALTLHIGTPVFQPERVRELLARLRRVFARVRPYFLYIPLYGSLWGMACASDTLDPAALDANEVDRRLAERAIRELQHFNGAVHCAQFALPNHLRALLA

SEQ ID NO: 12641 - protein, 186 aa, Emericella nidulans; identical to SEQ ID NO: 943

SEQ ID NO: 12642 - protein, 141 aa, Triticum aestivum
  misc_feature (105)..(105): Xaa can be any naturally occurring amino acid
FKGKALLIVNVASQCGLTTANYTELSHLYEKYKTQGFEILAFPCNQFGFQEPGSNTQIKQFACTRFKAEFPIFDKVDVNGPFTAPIYKFLKSSAGGFLGDIVKWXNFEKFLVDKNGKVVERYPPTTSPFQIEKDIQKLTAA

SEQ ID NO: 12643 - protein, 622 aa, Mycobacterium marinum M
MARAVGIDLGTTNSVVAVLEGGDPVVVANSEGSRTTPSVVAFARNGEVLVGQPAKNQAVTNVDRTIRSVKRHMGGDWSIEIDDKKYTAPEISARVLMKLKRDAEAYLGEDIADAVITVPAYFNDAQRQATKDAGQIAGLNVLRIVNEPTAAALAYGLDKGEKEQTILVFDLGGGTFDVSLLEIGEGVVEVRATSGDNHLGGDDWDDRVVEWLVDKFKGTSGIDLTKDKMAMQRLREAAEKAKIELSSSQSTSINLPYITVDADKNPLFLDEQLTRAEFQRITQDLLDRTRKPFQSVIADTGISVSDIDHVVLVGGSTRMPAVTELVKELTGGKEPNKGVNPDEVVAVGAALQAGVLKGEVKDVLLLDVTPLSLGIETKGGVMTKLIERNTTIPTKRSETFTTADDNQPSVQIQVYQGEREIAAHNKLLGSFELTGIPPAPRGVPQIEVTFDIDANGIVHVTAKDKGTGKENTIRIQEGSGLSKDEIDRMIKDAEAHAAEDHKRREEADVRNQAETLVYQTEKFVKEQREAEGGSKVPEDTLNKVDAAVAEAKSALAGTDIAAIKSAMEKLGEESQALGQAIYEATQADAAAAGAPGGQPGGAEPGADDVVDAEVVDDDQESK

SEQ ID NO: 12644 - protein, 471 aa, Burkholderia vietnamiensis G4
MSKTVADVMQLVKDEDVKFVDFRFTDTRGKEQHVSVPVSAFDEDKFESGHAFDGSSIAGWKGIEASDMLLMPDPTAAFIDPFYEESTLVMTCDVVEPADGKGYERDPRSLAKRGEAYLKSTGLGDTAYFGPEPEFFIFDSVQWNTDMSGCFVKINSEEAPWSAGKEFEGGNTGHRPGTKGGYFPVAPVDTFQDMRSEMCLLLEQLGIPVEVHHHEVAGQGQNEIGTKFSTLVQRADWTQWSKYIIHNVAHSYGKTATFMPKPVVGDNGSGMHVHQSIWKDGQNLFAGNGYAGLSEFALFYIGGIIKHARALNAITNPTTNSYKRLVPHFEAPVKLAYSARNRSASIRIPHVSNPKGRRIETRFPDPMANPYLCFTALMMAGLDGVQNKIHPGEAADKNLYDLPPEEDAKIPTVCAGLDQALEALDKDREFLTRGGVFTDGMIDAYLALKEQELAKFRMTTHPIEFEMYYSL

SEQ ID NO: 12645 - protein, 869 aa, Microcoleus chthonoplastes PCC 7420
MRLDLEELIDKPSNVLPGFYEGLVETLPSLEDHFCSPGVRGGFLSRVKEGTMMGHIIEHVALELQELAGMRVGFGRTRETGTAGIYQVVFEYIDEQAGRYAARAAVRLCQSIIDTRAYPQRELAQDLKDLSELARDAALGPSTEALVKEADARGIPWLTLSARAMIQLGYGLHQKRIQATLSDYSGILGVELACDKEGTKQILLDAGVPVPRGTTVLYLDELDSAIEYVGGYPIVIKPLDGNHGRGITIDIRNWDEVEKAYDRAKDISRAVIVERYYPGFDHRVLVINGKVEAVAQRIPARVIGDGKSTVEELIERTNRDPNRGDGHDNVLTKIVVDHTSLSVLERQGYSLDTVLKEDEVCYLRATANLSTGGIAIDRTDDIHPENVWLAERVAKIIGLDIAGIDIVTPDISQPLRDIDGVVVEVNAAPGFRMHVCPSEGLPRNVAAPVMDMLFPPGQASRIPILAVTGTNGKTTTTRLLAHIYKQTGHVVGYTTTDGIYIGDHLVEQGDTTGPQSAQVILKDPTVEVAVLETARGGILRSGLAFDACDVGVVLNVSADHLGIGDIDTLDQMAHLKSVVAESVSPAGYAVLNAEDPLVTEMAQRVKGHVAFFSMNPDNEVVKAHTRQGGLAGVYENGYLSLIRGEWTLRIEKAENMPVTMRGMAPFQIANALAASLAAFAQGVPIEAIRDALTTFRASVAQTPGRMNLFNLGEYHALVDYAHNAASYEAVGGFVRNWSGERVGVVGGPGDRRDEDFINLGRLSADIFDRIIIKEDADLRGRPSGEAAELIRKGILETNPDREYEIILNETDAINTALDGVASGGLVVIFPEKVSGTIRLIEERRPLPENGYQSVGESPVDLQPSVANPR

SEQ ID NO: 12646 - protein, 1634 aa, Oryza sativa
  misc_feature (247)..(247): Xaa can be any naturally occurring amino acid
  misc_feature (308)..(308): Xaa can be any naturally occurring amino acid
MASPPPFDICGDLDDDPTPPAPTPLAAPTPNGLNDRLLRLTRTHQRGPSQNPNPNPNPKPPPPPPPQEPEPAKVKLAGRRRLCKLSTAGDESAGDDDSIRDILDDLTTRLDSLSVDRSTARPRPHVSPLPCALHADPDPSQSQLNDGTKPSSSFVDCDDDDDDAGGAYGGFGVKEEVTRKVFKASSSSFGGRGNDDKMKAKGAYAFDTVSRKTTTESKTSKFFGDYDDEDDIDQDAENGKENHADDXGWEKTEDFKMEPTGTGVTRKPYNLPGRIFNMLYPHQREGLRWLWVLHCRGTGGILGDDMGXLGKTMQVSAFLAGLFHSRLIKRVLVVAPKTLLTHWTKELSVVSLKDKIRDYSGPNANARNYELKYAFKEGGILLTTYDIVRNNFKMIKGNFTNDFDDEEETLWNYVILDEGHIIKNPKTQRAQSLFEIPCAHRIVISGTPIQNNLKVQSKELRERIKPYFLRRMKNEVFLDSGTGEDKKLAKKNELIIWLKLTSCQRQLYEAFLNSELVHSSMQGSPLAAITILKKICDHPLLLTKKAAEGVLEGMDAMLNNQEMGMVEKMAMNLADMAHDDDDVELQVGQDVSCKLSFMMSLLQNLVSEGHNVLIFSQTRKMLNIIQEAIILEGYKFLRIDGTTKISERERIVKDFQEGPGAPIFLLTTQVGGLGLTLTKAARVIVVDPAWNPSTDNQSVDRAYRIGQMKDVIVYRLMTSGTIEEKIYKLQVFKGALFRTATEHKEQTRYFSKRDIQELFSLPEQGFDVSLTQKQLQEEHGQQLVMDDSLRKHIQFLEQQGIAGVSHHSLLFSKTAILPTLNDNDGLDSSRRAMPMAKHYYKGASSDYVANGAAYAMKPKEFIARTYSPNSTSTESPEEIKAKINRLSQTLANTVLVAKLPDRGDKIRRQINELDEKLTVIESSPEPLERKGPTEARTLKDWESLKAKEEEAGGRARGEGRKGSELNSTPFRLNSTSSTLVVFKVPSTFTTGRGALAAAAANGRFVPMAPTSQPQPQQEVEVEVDEDEELVNMVVEAGVGAIKMKMKIPRRVLGSLYPHQRDGLAWLWALHCTATGGILADDMGLGKTIQEGGILLTSYHIVRNNYMLLRGNGNGNNVDNNEEEPLWDYVILDEGHIVKNTKTQRAQSLFQIPSAHRIVLTGTPIQNKLKRRLYEAFLNKDPVRSQTGALKGSSLEASTILRKICDHPLLLTKRDTDDFLEEMGAMLNNRDMCMVERILEDNLYADKRLQIVQGASCKIAFILPLLRNLVEEGHYVLIFSQTRVMLNLIQDAVSIEGHKFLRIDGTTKISERKKILKDFQEGLDSPILLLTSHVGGLGNTLTKADRVIVVDPAWNPSIDNQSVDRAYRIGQTKDVIVYRLVTCGTIEEKIYKQQIFKGGLFRTATECKEQPQFYNQDLYLQNEQEYSSLPPHGFDASLTQHKMQVENGQQLVMDESLKKHIQFLEQQGIAGVNRHGVLFCKTETTATLGDDGAINRKVRDIMVRRCYAPWEHICRDVEKKSLIDQVKEMSKKMDGLGDTMGRIVALEEEYAAELIGMLHENRWERSHLEKIRMQIDDLHEEHMAKFDEMLERIKRMELADEGELIAKFGEMVERMRQRCDMDRLSLPLLSSTLVA

SEQ ID NO: 12647 - protein, 197 aa, Raphanus sativus
MPRSRSRVLILLLPLAFVFYLYRYLPSPAIVDQSSYSSIYHISVKDIDGNDVSLSKFTGKVLLIVNVASKCGLTQGNYKELNILYAKYKTKGLEILAFPCNQFGSQEPGSNKEIKDNICTTFKGEFPIFDKIEVNGENASPLYKFLKEQKGGLFGDSIKWNFAKFLVDKQGNVVDRFAPTTSPLEIEKDIEKLLAST

SEQ ID NO: 12648 - protein, 170 aa, Helicobacter pylori
GSGMHTHVSIWKNNENLFSGETYKGLSELALHFLGGVLRHARGLAAFTNASTNSYKRLIPGYEAPSILTYSANNRSASVRIPYGISKNSARFEFRFPDSSSNPYLAFAAILMAGMDGVKNKIDPGEAMDINLFKLTLDEIREKGIKQMPHTLRRSLEEMLADKQYLKESQ

SEQ ID NO: 12649 - protein, 661 aa, Opitutaceae bacterium TAV2
MSKILGIDLGTTNSCMAVMEGGEPVVIPNAEGARTTPSIVAFTKTGERLVGQAAKRQAVTNPQNTIFSAKRLIGRKFSEIAKEAKNLPFKVVEGKNGDAYIEAKVGDKVEQFAPQQISAFVLGKLKADAEAYLGEKITQAVITVPAYFNDAQRQATKDAGQIAGLEVKRIINEPTAASLAYGLDKKKDEKIAVFDLGGGTFDVSVLEIGDGVFEVKATNGDTQLGGDNWDEQLINWLVETFQKENGINLRNDPMALQRLKEEAEKAKIALSSTQSYDINLPFITADASGPKHLNISLSRAKMEQICDSLFERCFAPFKNCVRDAGLSTDKIDELVLVGGMTRMPKVVDIARQLAGKTPHQGVNPDEVVAIGAAVQGGVLKGDVRDVLLLDVTPLTLAIETMGGVATPMIARNTTIPHKKTERFSTAADNQPSVEIVITQGERPMSRDNKVLGTFKLDGIPPAPRGTPQIEVTFDIDANGILHVTAKDTGTGKEQKITIQGSSGLSKDEVERMTKEAESHAAEDKARAETVKNRNELDGAVFSLEKAVKEGGDKLPAEVKTKVEGGLADAKKALESNDDAQIKSALENLQKIGAEFYAQANAAAQAAGGAGAPGGFPGGFPGADGNASGNDAPPPPPGKTEKKADVVDADFEVVDDKKDGKK

SEQ ID NO: 12650 - protein, 1343 aa, Yarrowia lipolytica CLIB122
DISSLSESDRFNRISHLLEQSKVYSSVLQDRLQKEREARELARQEEEKAQEASRDRKDRREAREREKQKNLEKLEEKKNATRGKTRASRRKAVLSKTEVQEMDKSKKSKNFKKIGQPRIITGASMYDYQIHGIEWMASLYENGLNGILADEMGLGKTLQTIAFLSFLIEKQVGGPYLVVVPLSTLNNWENEFRKFAPSIPVVKFYGDKKERAALWKGVRVDYEMRGLKKRGGKDGEFVETFPVVITTYETVVMETRRLQMMTWKYLIVDEGHRIKNVNSLLLKKLKLLDTSNRLLLTGTPLQNNLTELWSLLNFLLPDVFSDLSMFQSWFDEKENGSGDGFGGENRSAELVETLHSILKPFLLRRLKSEVYSNLPDKREYLIYIQMAPLQEALEHRLRRHARTINTKAQKKDRVTPEIVPEPLGKRVRKQIVREDVVDTFDADLGSDDDGYDSNESVDRDLKRQKKEDYEEEEDYEDGSDGEEEEEEEDDEEGGSEVEDEGIRKKKKKHVNSTTSSSLLPPADKAAPLTQLQKDIIEGRVKWVDNKWVPKTEEELAKMEADRALAENLMNEHTMSETAQMADHVPKDILDVINDTKNASTTIPSLQPMHPDAPRHAIKSDPHQMPPKNYYSAPDGNWYPLYLHPLFPKRKQTVTGMTNHVIGSDGFGKPLKESHQKSREQKSREQKSREQKSREQKSREQSPSQKLGSCVSTAAKVESRDLTSSFSVKKELDPVDQYMLRLQLLKEKREKEEAEAAAERAKMDPVDAYVDKLRQLQRLSPEDEEETDVETKMEEELRRLREETLNSLDSVEAETETESREMRELRAELLGLKKQEDVKSESETVKKGSFGEDKDSMKKEQVSISSFVKSESEGVTSKNDSESSGVSEPSAVTVTSGMAFEPIYSASQSSEVTHNAPETVQSPSMVSDTTLNPSTLSDTALNPSIVSDTAPKPSTSPSVTPTAPKTVVKPSTTSQLSAVPLTTISDSDSDEFASANEDLQESNGKVPPEDLDEEVSEKLKEEVKSEQKVVDSVDEKAAEVVQELSTSVMPSRDLTPEELAPDITEFLSTIAFDKISTSQTLANLRKVANSPYLVKFPWGEEEPVDERIISDSGKMRVFDQLAMELVSRKHKMLVFSQFSGTLDLLTEWCEFRHLPYCMLIGSMGLEERQEMIDAFNEESGPSIFLITTRAGGTGINLTAADSVVIFDSDWNPQQDKQAIDRSHRIGQKKPCVIYRLISTNTMEEMLVRVASDKKRLDEMVIQAGDYSGFSKDANKTVDIDKTFLREIMTGKSDYEAHEGIEKIDDELMETLLDRSDESYKRHRDKTVELPKSIEVIIGSRDEHT

SEQ ID NO: 12651 - protein, 165 aa, Solanum tuberosum; identical to SEQ ID NO: 957

SEQ ID NO: 12652 - protein, 170 aa, Helicobacter pylori
GSGMHTHVSVWKNNENLFSGETYKGLSGFALHFLGGVLHHARGLAAFTNASTNSYKRLIPGYEAPSILTYSANNRSASVRIPYGISKNSARFEFRFPDSSSNPYLAFAAILMAGMDGVKNKMDPGEAMDINLFKLTLDEIREKGIKQMPHTLRRSLEEMLADKQYLKEGQ

SEQ ID NO: 12653 - protein, 241 aa, Medicago truncatula
MEIDRPDGRSPNQLRPLACSHSVLHRAHGSATWAQGETKVLAAVYGPKAGTKKNENPEKASIEVIWKPNTGHVGQADREYEMILKKTLESICIRTIYPNTTTSVIVVHDDGALLPCAINAACAALVDAGIPLRHLAVAICCSVTDNNSIILDPSKKEEEKSKAFAYLVFPNTTVSVVPEKSSQVGNDPMAHGIITSVTHGAMSVDDYLHCLERGRATTQRLSEFLRKNIAPKSTREASKAG

SEQ ID NO: 12654 - protein, 692 aa, Aspergillus nidulans FGSC A4
MSSVGTDLIPQGTAYGLLIGLGVLFCGVILIAIKVQKAYLSEDSATSEMFMVANRSVGTGLTASAVFSSWMWINETVLCAAMCYRDGLAVPLWWGSGLCFQIALMAALGVMAKIRVPYAHTSLEIIKMRYGTIGHLVFIFLNLVNNVFGCASMILTGSQLVSGVSGMHFVAATILIPLGVVLYTAVGGLKATFLTDFLHTAVALILIIYSTLSVLTNEHIGGLGGLYDKVMATASENYIPDNYEGSLLTMKSKGAIIWGLVLKFGNLALVVMDTAFWQKSFASEVNSTVPAYNLAAIAVFGIPWGLGTVLGLSARALHLTPIFPTYPADITETEVSTGLVMPFLVKALIGDSGIVAFFVLLFMALTSTVSSSMIAVSSILSFDIYKTYFNPKATDRKLLRASHVTVVIHAVFITGISIALNYGGANMTWLGYFRPVLSCPGIIPLGLTLFWSGQTKLAAILAPVLGFFTGLAIWLGTAHALYGEVNMITTGNPLPALYGAIGSFFSPAIYSVVISLYKPYKFDWRIFLRIELAAEAQLHSADKSKATVIESEVKEKSGTNTPKRDTSDAAAATTATADPEHAAALEKPNPASRANSTPVSESSLDDIRHPFDEKTLRELYRWMKIAWVIFVVIVLVTFILWPMPLYRNYIFSKSFFSGWVSVAIVWQFFAFSAVVIYPLYDGRYEIDKGARE

SEQ ID NO: 12655 - protein, 527 aa, Rhizobium leguminosarum bv. viciae 3841
MEPTHLFELVIAMFLAIIALHYAAHRLGLPPSVALLTGGALLAFVPGLPAISVDPELVLVIFLPPLLMDGAWSIAVARLRRHVIGIASLAVGAVLFTCAVVAVVAHLIFPSIPWAACAALGAIVAPPDAVAARAVLQRVRLPRRLQILLEGESLLNDASGLVLFRFAVAAAATGAFSAAEAGGSFLVLALGGAVVGIVVGTAWFKLVRLLGDEYLIIAASVLLGWIAYLAGEQLHVSGVIATVTAGLIMSWHQHTVLSAAMRMRGTSFWTVMIFLMEAAVFILIGLSLRDVVERGGGLTTVIATMGLPMLAILVALVLARFAWVFACDFAVRFCAALGFAQARPLGVGGATVLSWAGVRGVVTLALALSLPEGFPGRDFILVTSFAVILGTVLIQGTTLGRVIAWARLVEPESERARLTMSQAEAAMAQAQVEVVQNLAYDAEGKLIHPQLLERYQRRATSIVDYAEKTEQYMPVLHAHFDVILEAVAIGRRELIRLHRAGEIDDETLLELERDLDLEELSAISAKA

SEQ ID NO: 12656 - protein, 346 aa, Zea mays
MRQPRSGPGKRRGRGPRIPAATLQKQKTALANVDQITGAKIPKSFVFSRGKLPSTLRHLQQDLRKVMLPYTALNLKEKKRNNLKDFVNVAGPMGVTHFLILSNPQSLPHLRFAKSPQGPTFTFQIEEYSLAADIANSQKRPRCPPGIFKNSPLVVLGGLTGLGNPFRSLVEYFQHMFPSVDPTTVKLATCQRILLLKHDKEKDVIEFRHYSIKLQPVGVSRRIRKLMQNNQVPDLGEFEDVSEFVKKAGYGSESEADDEAAMVSLPSDIDKLNRASRKSAVRLQEIGPRMTMRLVKVEAGLCSGDVLYPWPVEKEVVGKKGTETGEVEGQEDDSEATDESEDEMEV

SEQ ID NO: 12657 - protein, 541 aa, Zea mays
MGLGVVAELVRLGVLSSTSDHASVVSINLFVALLCACIVLGHLLEENRWVNESITALIIGLCTGVVILLTTKGKSSHILVFSEDLFFIYLLPPIIFNAGFQVKKKQFFRNFMTITLFGAVGTMISFFTISLGALGLISRLNIGALELGDYLALGAIFSATDSVCTLQVLSQDETPFLYSLVFGEGVVNDATSVVVFNALQNFDITHIDAEVVFHLLGNFFYLFLLSTVLGVATGLISALVIKKLYFGRHSTDREVALMMLMAYLSYMLAELFALSGILTVFFGCIVMSHYTWHNVTESSRITTKHAFATLSFLAETFLFLYVGMDALDIDKWRSVSDTPGKSLAISSILMGLVMVGRAAFVFPLSFLSNLAKKTEHEKISWKQQVVIWWAGLMRGAVSMALAYKKFTRAGHTQVRGNAIMITSTIIVVLFSTMVFGLLTKPLINLLIPHRNATSMLSDDSSPKSLHSPLLTSQLGSDLEEPTNIPRPSSIRGEFLTMTRTVHRYWRKFDDAFMRPMFGGRGFVPFVPGSPTERNPPDLSKA

SEQ ID NO: 12658 - protein, 436 aa, Haemophilus somnus 129PT
MSIYTYICFLSTISILIGFVTQKISDRIQYTIAITATATVGSLILLIAGSTNLFHLDDIAQNVMQRIDFKDFLLNGILGFLLFAGALGIKLPVLKSQKLEITILALFSTIASTLFIGVLFYGISALLRLHIDFIYCILFGALISPTDPIAVLAIIKNLKAPKKLSMKVEGESLFNDGVGLVIFTTIFTVAFGGHEPTAMEITKLFLAEAVGGIFFGLILGVIAHFLISATDDGSLEILLTLTIPTAGFMLANLLHVSGALAMVVAGIMISNWTRHSGFSEQSQHYLDHFWEMIDHFLNSLLFLLIGSAMLLVNFTSQAIILSLIAIPVCLFCRYASVWIPFKFLSMKTVYNPYTLRILTWGGLRGGLSLAMALSIPATSAFLENIGMNVRDLFIIITYSVVLFSILIQGTTIETMIRKSKEATLQKRGYIGLKNQT

SEQ ID NO: 12659 - protein, 635 aa, Ehrlichia chaffeensis str. Arkansas
MAVIGIDLGTTNSCVAVMEGGDAKAIENSEGARTTPSIVAFTDSERLVGDPAKRQATTNAKNTIYASKRLIGRRYQDVKDIKSSYDVVSAKNGDAWIKVLGKEYSPSQIGAFVLEKMKETAERHLGHKVEKAVITVPAYFNDAQRQATKDAGRIAGLDVIRIINEPTAAALAYGLNKSDKQKVIAVYDLGGGTFDVSILEIADGVFEVKATNGDTMLGGEDFDHAIMNYLMDDFKKTTGIDLHNDSMAVQRIKEASEKAKIELSNRMETDINLPFISSDSTGPKHLSLKLTRAKFENLVDDLIQRTIEPCKKALKDAGISADKIDEVVLVGGMTRVPKVIQKVKEFFGREPHKGVNPDEVVAIGAAIQGSILAGDVRDVLLLDVTPLSLGIETLGGVFTPLIERNTTIPTKKSQVFSTAEDGQTAVTIKVYQGERKMAADNKLLGQFSLEGIPSAPRGMPQIEVTFDIDANGIVHVSAKDKASGKEQAIKIQSSGGLSDDEIQRMIKEAEQKAGEDEKRKKFIELKNNGENLVHSTEKSLNEYGDKIPNSDRLEIENAIRDVKDGLSSSDMESVDVLQQKVDHLMKVSMKLGEALYGNAANNPSSAENSTASNNEEEDSKVVDSDYQEIDKKDSK

SEQ ID NO: 12660 - protein, 775 aa, delta proteobacterium MLMS-1
MVKRVRTAIIVMGFSGLVAEILLLRELLIVFAGNELSIGIILANWLILEAFGCYFAGGRAAESPRRVEVFTVITILFSLFLVAAVVATRLLKEMLGVSIGENVGFLPMFYSSFLILLPVSVLHGALFTSGCRIYADCAPAAGPDASPAGRVYVYETVGTIIGGIACTYLLIPYLDAMHTTAWLALLNFVVCLALLAPHRRRRRLTGMVAAALGGLILLTGTLLATGQVERLHWYTVAGQWQNLNVVEYRNSPYGNICVIENEGQYIYFLDGIATILTPIPDIPFVEEFVNVPLLTHRQPEKILILSGGAGGIINEALKHPSLAAVEYAEQDPLLFELLRKFPTELTESELDDPRVKIHHTDGRLLLQTTPRQYDLIFIGILEPSSLQTNRYFTREFFTLARERLNPGGILVFGLPGSMTYLNDELKNLNSSVFHTVKSVFPHVRVIPGDGHNLFLSSDAPDVAAVDAHQIMARLTEREIRAEAMLPWHIEKKLHPGWQEWFYEFIEESSRQLNRDFTPLGVFYSISHWNALYSPEFGRFFNKLERADLKGAALVPLLLLAAYLLLRAGVKRAVRPGIPLAIATTGFAGMISSLVLIFTFQAFYGYLFSWIGLLVAAFMAGAAAGAQLVTSALGRIQDHRQLFKRIELAIVVFSLLLPLGLLAANTWVASVAAFDLLRVLFLVVSLVAGFLLGAQFPLANKLYLGDNAHLSRTAALLYTADLLGGWLGGIVGAVVLLPVLGLVGTCLVMGLLKAVSFVIISFEFSDLVTVHQGRQP

SEQ ID NO: 12661 - protein, 175 aa, Physcomitrella patens subsp. patens
QDIDGVDTKLSKYANKIIVLLNVASYCGLTDRNYTELQEIYDKYKKDGLEVLAFPCNQFAETEPGTHMQIKKFVKKTYNGTFPLFAKIEVNGPNQHELFKYLKATSGGIRGFYRDNLKWNFAKFVIGKDGVVIERFAPTSSPRMIEVSRLSFSIPKISLTNSCAECYLCLQIEYD

SEQ ID NO: 12662 - protein, 1028 aa, Yarrowia lipolytica CLIB122
MSGPAPIDLDKSNPGSSMVSTVTTPNRDTPPVQLSTEDLLNIRSGYLLPDKGLGKPKQKSIPELVKKIKHLYGLSDVFEYFLKSKGESDPNYRKAMEQAKEELGLNKTTEKPTGGARHRKTEKEEDAELMQGEEEAENSVETVFETSPGYIQGTLREYQVQGLNWMVSLYEHGLSGILADEMGLGKTLQTISFLGYLRYFRGIPGPHLVCVPKSTLDNWAREFAKWTPEVNVLVLQGDKEGRAQLIQDRLLTCDFDVCITSYEMVLREKGYLRRFAWQYIVIDEAHRIKNEESSLSQIIRLFHTENRLLITGTPLQNNLHELWALLNYILPDVFQDSAAFDAWFGEDQSGDQDAAVNQLHKILRPFLLRRVKADVEKSLLPKKEINLYVGMSDMQVKWYQKILEKDIDAVNGQIGKREGKTRLLNIVMQLRKCCNHPYLFEGAEPGPPYTTDEHLVYNAGKMVILDKLLKRIQEQGSRVLIFSQMSRVLDILEDYCLFRGYKYCRIDGQTAHEDRINAIDAYNKEGSEKFVFLLTTRAGGLGINLTTADQVVLYDSDWNPQADLQAMDRAHRIGQTKQVYVYRFITENAVEEKVIERATQKLRLDKLVIQQGRSQSKVNNNAQNKDDLLNMIQFGAEKVFNRGKGEEQEEADLDIDDILKRGQQKTMELNSRYDSLGLDDLQKFTSDSAYEWNGEDFKKKDTSKTNKPFVWIAPNKRERKENYSIDSYYREMLNQGAAAGKNAAPKAPKAPKQLNIQDHQFYPQRLIDIQEKETSYYRKQIGYKVPLPDGAEEELEMRESERDLEQQEIDNAEPLTEEEEEEKVDLSTKGFSNWNRRDFTNFIQASARHGRNNFAAIATEFEDKTQADIKKYAGVFWQRYTEINGFDRYIQQIEAGEDKAKKQNHQNTLLTRKVEGYEAPLQQMVIVYPAGQKKIYSEDEDRYILVQLYRYGLETEGVYEMIRDAIRASPVFRFDWFFLSRTPAELARRGQTLLSYVGKEYDGAGEKRKSSSTPDVETPKKSAKKKKA

SEQ ID NO: 12663 - protein, 102 aa, Salmonella typhimurium
QALYYIGGVIKHAKAINALANPTTNSYKRLVPGYEAPVMLAYSARNRSASIRIPVVASPKARRIEVRFPDPAVNPYLCFAALLMAGLDGIKNKIHPGEAMDK

SEQ ID NO: 12664 - protein, 181 aa, Vibrio parahaemolyticus RIMD 2210633
MKGLLKLAAYLGFISMSSFVLASECPDILQGKQRMLNSTEEIELCEVFKGKTLLVVNTASQCGFTPQYEQLETLYQTYKDKNFAVIGFPSNDFRQDKGSEENTAKICYLDYGVTFPMMARSSVLGNDANPVFSEISTQAGVTPKWNFYKFLISKEGKVIATFPSSTSPTSTTLTNMIEQQL

SEQ ID NO: 12665 - protein, 494 aa, Neisseria meningitidis Z2491
MSKPVFKKIALYTLGAISGVAVSLAVQGFAAEKDRRDNEVLPVQSIRTMAEVYGQIKANYYQDKPDADLFEGAMKGMVAGLDPHSEYMDKKGYAEIKESTSGEFGGLGMEIGQEDGFVKVVSPIEDTPAERAGVKSGDFIVKIDNVSTRGMTVSEAVKKMRGKPGTKITLTLSRKNADKPIVVNLTRAIIKVKSVRHHLIEPDYGYIRVSQFQERTVESVNTAAKELVKENKGKPLKGLVLDLRDDPGGLLTGAVGVSAAFLPSEAVVVSTKGRDGKDRMVLKAVPEDYVYGMGGDSLAGIPAELKTIPMTVLVNSGSASASEIVAGALQDHKRAVIVGTQSFGKGSVQTLIPLSNGSAVKLTTALYYTPNDRSIQAQGIVPDVEVKDKERIFESREADLVGHIGNPLGGEDVNSETLAVPLEKDADKPAVKEKGKKKKDEDLSSRRIPNPAKDDQLRKALDLVKSPEQWQKSLGLAAKKPVSNKDKKDKKDKK

SEQ ID NO: 12666 - protein, 1060 aa, Cryptococcus neoformans var. neoformans B-3501A
MSSKKPLLSIRADPTSDDDFDIESRALAEEYAEARKKGSNVKTRRRDMVGKHQSEQPGTSYQARGVQNRAGTESIDSSDGDDEVVVKWKRKSLREEMAYEGLVQKEIILEFNPLYRLAGKKDGLSEPKKGQEDEAPSLKNLISSHKKEALMANASLRASETSTPSVTPQKGKEGSSDIQILSDEEVFGLPAEAVTQNPEPRNASPSPTDEIFDSDEEVFQPVEVKSKISAPSEKIQSSSPVETPISSQSSYVFWNCDNIPSHKPNFPMDDQQFLVKPFVLDQETKDIKIPPSINRFLKEYQRAGAKFLYDAYKQGRGAVLGDDMGLGKTVQVISFLSAIMRKTGTYVDHQRRKRTIRESVVDVSPRHWPTALIICPKSLINNWGYFEYAVWKSDNWRDVQQKFIHGYLDLISYDVARLDIQHIKDLPLSTVIADEAHRLKEPMSQTTLALKSIQCQMCFALTGTLVQNRIDEMWSVLDFVHRGWAGTYRQWKEFAVSPIKKGHQVEGTAAEVVRAIMTIGVMTQRILPHFYLRRDKKLIAHELPEKKDLVVFCPLASRQIVAYRALIESDDVVNIQARNRPCPCGSGKSNMKEILFQYLSALRKVANHFGLLYDLDKDDNKHTRMINRKLFKICTGREPTSRSDYTLEEALDPENCGKWDLLKKLLVQWRNEPVKNKVLIFSTSVRLLKIISRFISTSPSLSGFEFDALTGEASGTERQEMIDRFQDLERDHFIMLISTRAGGVGLNLTAANKVVIFDPSWTMDRAFRIGQKRTVEVYRLIGQGTIEELIYERQVQKQQSARQLNNGTLEPRIYQGYDRATNAKDQAELFGVHNLFHFDPSGFAPANLGVHVANDNFLGEPTSLAENEGEVDEVDEDEDIKPEIPAGGSRTSSQSQKHREGRRKDKGKEKKSEQMEETADMVQSLLEDAPTPSQGSKEVDILTELGFDSLLHENVFGDSAEEREIFEKGLKILEKNPMLAKSIKANSLIKTQRRTARKSAMALGPGLEPVTSRRESREVKKEGRRSRLMEEEGHEDERVGVRREKRRKGESSKNLVELSD

SEQ ID NO: 12667 - protein, 546 aa, Lophopyrum elongatum
MGLDLGAIALKYTGLAVSDHGSIVAITMFIALLCGCIVFGHLLEGNRWVNESTTALVLGLITGGVILLCTKGVNSRILIFSEDIFFIYLLPPIIFNAGFQVKKKQFFRNFATIILFGAAGTLISFVIITLGAMGLFSKLDVGPLELGDYLAIGAIFSATDSVCTLQVLNQDEAPLLYSLVFGEGVVNDATSVVLFNAIQNIDINHFDVFVLLQFIGKFLYLFFTSTVLGVAAGLLSAYIIKKLCFARHSTDREVAIMILMAYLSYMLSMLLDLSGILTVFFCGIVMSHYTWHNVTESSRVTTKHTFATLSFIAEIFLFLYVGMDALDIDKWKLASSSPKKPIVLSAVILGLVMVGRVAFVFPLSFVSNLSKKESHPKISFNQQVIIWWAGLMRGAVSIALAYNKFTTSGHTAVRVNAVMITSTIIVVLFSTMVFGLLTKPLINLLVPPRPGTAADISSQSFLDPLTASLLGSDFDVGQLTPQTNLQYLLTMPTRSVHRVWRKFDDKFMRPMLGGRGFVPFVPGSPIERSVHGPGLLGTVTEAEDRS

SEQ ID NO: 12668 - protein, 214 aa, Ostreococcus tauri
MLTQRAVVAPARLARARSRTRGLARGARAQTNASQTIHDFTLKTLGGGTREAPTEGADLPLSQYKGKVVLINNKYGDDLVILGVPCNQFGHQCYDKDFELLNTLKYVRPGNGYEPKFQITGKMTINGEDEDAFWTFLKRAIPYPADDNGGRGDDFIYNTQPNSMPLQWSPVRRSDVVWNFEKFLIGKDGKPAKRYSPKFENANLTADIDALIKA

SEQ ID NO: 12669 - protein, 608 aa, Orobanche densiflora; identical to SEQ ID NO: 9298

SEQ ID NO: 12670 - protein, 814 aa, Hordeum vulgare subsp. vulgare; identical to SEQ ID NO: 9299

SEQ ID NO: 12671 - protein, 643 aa, Davidiella tassiana
MAPAIGIDLGTTYSCVGIYRDDRIEIIANDQGNRTTPSFVAFTDTERLIGDSAKNQVAINPHNTVFDAKRLIGRKFQDAEVQADMKHFPFKVIEKAGKPVTQVEFKGETKDFTPEEISSMILTKMRETAESYLGGTVNNAVITVPAYFNDSQRQATKDAGLIAGLNVLRIINEPTAAAIAYGLDKKQEGEKNVLIFDLGGGTFDVSFLTIEEGIFEVKSTAGDTHLGGEDFDNRLVNHFSNEFKRKHKKDLSDNARALRRLRTACERAKRTLSSSAQTSIEIDSLFEGIDFFTSNTRARFEEVGQDLFRGNMEPGERTLRDDKIDKSSVHEIVLGGGSTRIPKVQKLVSDFFNGKEPCKSINPDEAVAYGAAVQAAILSGDTSSKSTKEILLLDVAPLSLGIETAGGVMTALIKRNTTIPTKKSETFSTFSDNQPGVLIQVFEGERARTKDINLMGKFELSGIRPAPRGVPQIEVTFDLDANGIMNVSALEKGTGKTNKIVITNDKGRLSKEEIERMLADAEKYKEEDEAEAGRIQAKNGLESYAYSLKNTVSDPKVEEKLSAEDKETLTGAIDKTVAWIDENQTATKEEYEAEQKQLESVANPVMMKIYGAEGGAPGGMPGQGAGAPPPGAGDDGPTVEEVD

SEQ ID NO: 12672 - protein, 611 aa, Orobanche fasciculata; identical to SEQ ID NO: 9301

SEQ ID NO: 12673 - protein, 471 aa, Streptomyces avermitilis MA-4680
MIALSLAEIAAVVGGQTYDIPDPAVQVTGPVVRDSREVESGSLFVAFAGERVDGHDFAAAVVEAGAVAVLASRPVGVPAIVVDDVQTALGALARHVVERLGATLVALTGSAGKTSTKDLIAQVLRSKAPTVFTPGSLNNEIGLPLTALSATEETKFLVLEMGARGIGHIRYLADLTPPKVGLVLNVGTAHIGEFGGREQIAQAKGELVEGLPPAEDGGAAILNADDPLVRAMASRTKARVILFGESDEADVRAENVRLTAGGQPSFSLHTPSGCSDVTMRLYGEHHVSNALAAAAVAHELGMSADEIARALSEAGSLSRWRMEVTERPDGVTVVNDAYNANPESMRAALRALAAMGKGRRTWAVLGKMAELGDEALAEHDAVGRLAVRLNVGKLVAVGGREASWLQLGAYNEGSWGEESVHVSDAQAAVDLLRSELRPGDVVLVKASRSVGLESVAQALLETGAEGEVVAR

SEQ ID NO: 12674 - protein, 702 aa, Oryza sativa Japonica Group
MASTTTKNALLLLLLLLLLFPLLHSSLADVAAAAPSSASAAEVDALMELKAALDPSGRLLPSWARGGDPCGRGDYFEGVSCDARGRVAAVSLQGKGLAGAISPAVAMLPGLTGLYLHYNELAGAIPRQLGDLPMLAELYLGVNNLSGTIPVELGRLPALQVLQLGYNQLSGSIPTQLGQLKKLTVLALQSNQLTGAIPASLGDLPELARLDLSSNRLFGSIPSKLAAIPKLATLDLRNNTLSGSVPSGLKKLNEGFHFDNNSELCGAHFDSLKPCANGDEDDNEEGSKMARKPESTNVKPLQAPQTMNVNRDCDNGGCSRSSSSSTTLSSGAILAGTIIIIGGAAACGISVISWRRRQKQKVGGGGTVESLEGRASSSNASSSLINVEYSSGWDTSSEGSQQGLRLSPEWSPSVRYNMEEVECATQYFAGANLLGRSGFAATYRGAMRDGAAVAVKSIGKSSCKAEEADFLRGLRAITSLRHDNLVALRGFCRSRARGECFLVYEFMANGSLSRYLDVKDGDVVLDWATRVSIIKGIAKGIEYLHSSKANKAALVHQNICADKILMDHLFVPHLSGAGEHKLLADDVVFSTLKDSAAMGYLAPEYTTTGRFTDRSDVYAFGVVVFQVLTGRKAVSSELRLLGGGGGAEYSGKLDDLVDPRLGGRFSRPEAAKLAGIALLCTSESPAQRPAMAAVLQQLGATQ

SEQ ID NO: 12675 - protein, 383 aa, Orobanche gracilis; identical to SEQ ID NO: 9304

SEQ ID NO: 12676 - protein, 1082 aa, Shewanella sp. MR-7
MNRLSPQEPIQLTQTAIESLFTPPTLMRARDYVMQGRVLSAKANADFRHIEGTVTGTETTPYRQDIRLVSVNHKLVMNGFCSCPASGNCKHMAAVLYSLLTDKTVEDQRIAQWLHLLDEADDPNVNDVESLYDDRVLYILSKDDNGVFIELRRGKLGKKGGYNKGTKIALSDVQYYMPAWIGAEDVLILNLIMSTRRHGASRLYLKAQLGAVAIEKMLATERCFWEESRLALTAGEAITPQFLWQDIDSEHKQMRLVLPERDNWELVPTEPPYYIELDYFHIGAIDTDISVDKLRLLSQMPPVPSTQVELVSHRLIKHFSARTVPPPSAIDFVELRDKLQLRLTLKVVPAGTMPPGSALSSATETSIAQPYLALEFVYGDLVLSGNAAKEALTLVTQGGTTYQINRALEEEQQAVSKLQTLGFSRFSLEGAANGASLWSLGHLPDAIREWLAFIDEEVPRLQTQGIEVRLAPEFSLKVVDTPLTVELDDSQEGWFSLSLHADINGQRLPMLPLVATWLKQHGEPADDAELLLPSPSGEWLKIKASVIKPLMSIIQELFEQHRGHSIAIPKYRAHLLNELAESEISLLNGERVRQLATKLAEFNGVVAVSAPTGLNAQLRAYQQQGLNWLCFLKEYQLGGILADDMGLGKTIQTLAFLLKQQEAKLAGQPRLPSLIICPTSLVGNWAKEAAKFAPSLSLAVIHGAQRGPLLSRLSEFDVVVTTYPLMVRDYDYYQTQPFEHIVLDEAQQIKNAQAKVSQQIKALQAPFRLCLTGTPLENHLGELKSLMDFCLPGLLGTTAYFNKAFRYRIERYGDGEQAKVLSQRIAPFVLRRTKAEVVTELPPKTEIYQTLELEKDQRNLYESIRLSMEKKIRELFASQGVAGSHIEFLDALLKLRQACCDPRLVKLEQAQKVKNNAKLNWLSQNLPEMVQEGRKILIFSQFTSMLILIEELLQSLDIDYSKLTGQTRLRQGQIDKFQEGDTPVFLISLKAGGTGLNLTAADTVIHYDPWWNPAAEKQATDRAHRIGQENPVFVYKLIAEGTVEEKIQEMQQHKQGLADSILEGKGKGAWQGSADELLSLFH

SEQ ID NO: 12677 - protein, 613 aa, Nocardioides sp. JS614
MPPDVCASGRPGTGRGGPSGLRHRGERKVFTMASPTVLATDTIISANAVDYVIVALYFAVVLGIGVVARRQISDSVDFFLSGRSLPAWVTGLAFISANLGAVEIMGMSASGAEFGLPTVHYFWIGAIPAMLFLGVVMMPFYYGSKVRSVPEFMRRRFGTGAHLVNAVSFAVAQLLIAGINLFLLGSIVHALLGWPLWVALIVAAAIVLSYITLGGLSAAIYNEVLQFFVIVAGLLPLTLIGLHRIGGWGGLTDKITEAAQAHPDAIPPADQQLNSWPGLPLTGFDSSLLSVIGIVFGLGFVLSFGYWTTNFVEVQRAMASNSISSARKTPIIGAFPKMFVPFITIIPGMIAAVLVTEIGKVKAGQSVPGGASGDGVAYNDALLYLMRDVLPNGLLGLAITGLLAAFMAGMAANVSAFNTVFSYDLWQQYVVKDRDDHYYLVIGRIATVAATVVAIFTAGLASNFSNIMNYLQVLFGFFNAPLFATFILGMFWKRMSAAAGWVGLVAGTVSAVIVAFLSEDAFGSWSTGALPISGQGAAFVAAGVAFVVDIVLSVAISLVTPPKPVEELRGLVYSETPREDLVDPDEASHPWYQRTLPLAGVALVLVIILNVIF

SEQ ID NO: 12678 - protein, 239 aa, Triticum aestivum
VITSCTHIYCQTCILKILKSPSSRCPICRRSLSKEDLFIAPAVQHPDDDDSGSLDSDKPLSSKVQALLELLKRSRQEDPSSKSVVFSQFQKMLILLEGPLKRAGFKILRLDGTMSVKKRSDVIKQFAVVGPDAPTVLLAGLKAAGAGVNLTAASTVYLFDPWWNPGTEEQAMDRVHRIGQKKAVKVVRLIVKNSIEERVLELQERKKRLISGAFRKKGGTKEDKELRLEELRIMLGFQP

SEQ ID NO: 12679 - protein, 676 aa, Oryza sativa Japonica Group
MARPRRASTMQLGLFLAALLLLTPSPAGSVAAAKGGGAKSGGGGTVIGIDLGTTYSCVGVYRNGHVEIIANDQGNRITPSWVAFTDGGERLIGEAAKNQAAANPERTIYDAKRLIGRQFSDAEVQRDMKLLPFAVVDRNGKPHVRVEVKDGDVRVFSPEEVSAMVLTRMKETAEAYLGEKVTRAVVTVPAYFNDAQRQATKDAGVIAGLTVDRIINEPTAAAIAYGIDKKGAEKNVLVFDLGGGTFDVSILAIDNGVFEVLATNGDTHLGGEDFDQRLMDHFVKVIRRKHGRDITGDARALGKLRRECERAKRALSNQHQVRVEVESLFDGVDLSEPLSRARFEELNSDLFKKTMVPVRKAMADARLSKGDIDEIVLVGGSTRIPKVQQLLKDYFGGKEPNRGVNPDEAVAYGAAVQASIISGHVDENTESMILLDVAPLTLGLETAGGVMAKLIPRNTVVPTKKTQVFTTYKDKQTTVTIQVFEGERSMTRDNRLLGRFDLAGIAPAPRGAPQIEVTFEVDANGILSVLAADKATGRSEKITISGDDRKISQEEIDRMVREAEEFAEEDRRHREQVDARNSLEAYVYNIKNTLGGKMADAMEGEEKDKVEEAVREAYEWLDGNPDAGKEEYEEKLRELEDVCNPVMSAVYQRSGGGGGGAPEDGNVDDEDDHDEL

SEQ ID NO: 12680 - protein, 693 aa, Vitis vinifera
MSDDDDFQEIPLTQATQQPLKPSDSSRRPSKRPKAAATAAPGKENVPPSRKKRDCSEREELKSKGSYLCDSIESRLLNARSGGDGNITCGFSEESEGSYSCNSVESRLLKSRSGGDGDGNGGFCEESDEDFEQLDVLIRLCSEGEEEPDSDGFRFREQRGSGSEGRGLVRCPLCEIDISDLNDELRQVHTNGCLDRLEADNPFNDGSPVQTHQKVVDVSPVIGWIHSLGLGRYEEAFIREEIDWDTLQRLTEEDLLNIGVTALGPRKRIVHALSELRKGSTHTVDIHTHVPALSELRKQSTHGLAANKLITDYFPGSVTDRSRGCISSGERKAAEKIQLGSSRKQVVVKNHARSGKLRDLPLWCCIPGTPFRVDAFRYLRRDCSHWFLTHFHLDHYQGLTRSFCHGKIYCSAITARLVNMKIGIPWDRLQILPLNQKINIDGVDVTCLDANHCPGSIIILFEPSNGKAVLHTGDFRFSEEMTSMSVLQMCPIHTLILDTTYCNPQYDFPKQEAVIQFVIDAIQAEAFNPRTLFLIGSYTIGRERLFLEVARVLRKKVYVNAAKLHILECLEFQKEDMQWFTLNEQESHIHVVPMWTLASFKRLKHISNQYAGRFSLIVAFSPTGWTFGKGKKKTPGRRWQQGTIIRYEVPYSEHSSFTELREFVKFVSPVNIIPSVNNHGSESVDTMVRLLSS

SEQ ID NO: 12681 - protein, 680 aa, Staphylococcus aureus subsp. aureus MW2
MEIFETILIFIAVVILSSFVHTFIPKVPLAFIQIFLGMLLFITPIPVQFNFDSELFMVTMIAPLLFVEGVNVSRVHLRKYIKPVMMMALGLVITTVIGVGLFIHWIWPDLPIGAAFAIAAILCPTDAVAVQAITKGKVLPKGAMTILEGESLLNDAAGIISFKIAVGVLVTGAFSLVDAVQLFLIASIGGAVVGLLIGMALVRFRLTLMRRGYENINMFTIIQLLTPFVTYLIAELFHASGIIAAVVAGLVHGFERDRIMQVRTQLQMSYNHTWNILGYVLNGFVFSILGFLVPEVIIKIIKTEPHNLIFLIGITIVVALAVYLFRFVWVYVLYPYFYLAISPFQKMMTKNDDDNPTTEKPPKRSLYALIMTLCGVHGTISLAIALTLPYFLAGHHAFTYRNDLLFIASGMVIISLVVAQVLLPLLTKPAPKTVIGNMSFKVARIYILEQVIDYLNQKSTFETSFKYGNVIKEYHDKLAFLKTVEKDDENSKELERLQKIAFNVETKTLESLVDEGQITNSVLENYMRYAERTQVYRQASLIRRMIVLLRGALLKRRVQTRVNSASSLSVTDNLMELNKINKLVHYNVVSRLSKETTKDNTLEVGMVCDGYLMRIENLTPSNFFNSASEDTITKIKLNALREQRRILRELIDTDEVSEGTALKLREAINYDEMVIVDSMT

SEQ ID NO: 12682 - protein, 293 aa, Burkholderia xenovorans LB400
MSAPLLFRPSLDAVYGFPHAKRVTQVVSPYQRIEVWDTPQLGRLFTLDGRPMTSTGDEFIYHECMVHPAALAHPSPQAALVLGGGDGGAARQLLRHAGIERIVVAELDAEVVRLTREHLPEVHGGAFDDPRVELVIGDAAHYVAHAAPARFDLVVFDLTPPDSPAAGLYTPTFYQQLKRVMRPIAAVSVHLGSPYFHAARIARLLDDLRAAFAVVRTMNTFIPLYGSLWIMATASDTLDPAALAADTLIERLAARRIGPLMHYDAGTHAALFSASRSVRDKLRRCCEIKFWVC

SEQ ID NO: 12683 - protein, 482 aa, Thermus thermophilus HB27
MPTLKELFALFGKEAPEVPVRGLTLDSRRVEPGFVFVAVPGVPLPHRKPLDGHDFVPEALARGAVAVVGEKPLALPVPYLQVADGRQALALLARRFHGEPDRKLLLVGVTGSKGKSTTASLLHHLLKRAQGGSALLSTVGLRLGEEARPPVGHFTTPEAPEVYAFLREAADRGLKSAVLEVSSHALALKRVEGLTFRVGVFVNFYPDDHLDFHGTAEAYFRAKALLVERSDLAVLARSLPHFPRLAQKPHLSFGEGGEVYAEGLRETPEGLAFRLHTPWGSGEAFLPLLGAYNLENALAASAAALALGVGLEAVLEGLATFPGVPGRMEVVLKAPFRVVIDFAHTGKSLEAALKTLRPTTPGRLLLVVGAAGERDPQRRVDIGRVAARLADKTFFTEEDHRGEDLFAILEAMAQAARAEGGVYELVPDREEAILKAILEARPGDTVLLAGKGHEATLERGQVALPWNEREAALKALRARGLP

SEQ ID NO: 12684 - protein, 751 aa, Dechloromonas aromatica RCB
MKNKDIIFRDTISLRGPSIWTYPPSIETWIDIGELEDFPSDKIPGLYERLSTWLPGLIEHRCNYDIRGGFLQRLKEGTWAGHILEHVVLELMTLAGLPDGFGRTRETTTRGVYKLVVSNFHEECTRLALETGRELLLAAIKNEPFDLEEAIKPLRRRVDRKYLGPSTAAIVQAGEKRGIPHIRLLDDGNLVQLGYGAAMRRIWTAETDQTSAIAETISRDKDLTKELISSVGVPVPEGREVDSADDAWEAAEDIGVPVVVKPTDGNHGRGVFIDLTTKEEVAKAYAIATEEGSGVLVERSIQGIEHRLLIVGGKLVAANRSDLITVTGDGKSTVLELIASQVNTDPRRGTTELHPLSIIKIDTAARMELERQKLEADSVPAKGREVLIQRNANHAFDCTDEVHPDTAAVASLAARVVGLDIAGIDLVCKDISKPLAEQGGAIVEVNAGPSLLMHIKPGIGKPRPVGQAIVDNLFAADESGRIPLVGVTGTHGRNTVAKLVAHLIYLSGQHGGLACTDGMFLARRQVQKTSAANWEGGRRLLLNRAAQAAVIENGPDVILGEGLPYDRCSVGIVTNISSEVEDLSRWDVQPTGGEYYTTPRSIYRTQVDVVLPNGHAVLNAEDELVADFAELCDGEVIFFACDPANPTLVAHLAAGKRGVTVIDNRIVLRSGADETRLCRLVDAPYIGKAKQPTSIANVLAAIAAGWAMGLSQEVLTVGIKTFSLEIADPAALLPQSARKSQPAKKPAITRK

SEQ ID NO: 12685 - protein, 170 aa, Helicobacter pylori
GSGMHTHVSIWKNNENLFSGETYKGLSELALHFLGGVLRHARGLAAFTNASTNSYKRLIPGYEAPSILTYSANNRSASVRIPYGISKNSARFEFRFPDSSSNPYLAFAAILMAGMDGVKNKMDPGEAMDINLFKLTLDEIREKGIKQMPHTLRRSLEEMLADKQYLKEGQ

SEQ ID NO: 12686 - protein, 857 aa, Dechloromonas aromatica RCB
MDVSRIRALRGPNLWSRHTAIQAIVTCEGAELAIADLPGFEARLRERFPELGDLIPSDHLDTVSMAHALEFCALGLQAQSGCPVTFSRTTQTVDAGVYQVVVEYSEEDVGLLAFERAEQLCQAALDDTPFDLDGVLKEIRDLDEDIRLGPSTGAIVSAAIARGIPIRRLTQGSLVQFGWGSKQKRIQAAETSFTSAIGEAIAQDKELTKKLLHASGVAVPYGRPVEDEDDAWVAAQEVGLPVVVKPQDGNQGKGISVNLTTEEQVRRAYRVAIEYRDDIMVEKFLSGHDWRLLVIGDKLIAAARRDPPLVIGDGTHTVRELVNIVNSDPRRSDGHATSLTKIRFDEIALARLEEQGYSADSVPGRGVRVVLRNNANLSTGGTATDVTDDVHPELAAAAVAAAQTVGLDICGIDVVCDTMHKPLEEQGGGIVECNAAPGLRMHLDPSFGKGRPVGEAIVGMMFPDGDNARIPVVAIAGTNGKTTTSRLIGRIFESNGLRVGMTSTDGIYIEGKRIDTGDCSGPRSARNVLMHPDVDAAVFETARGGVLREGLGFDLCDVAVVTNIGLGDHLGLNYVTTVDELAVVKRVIVENVSPHGTAVLNATDPIVASMAIHCPGDVIFFARDRNHHVLATHRAQGKRVVYVERDAIIFGEGGRKKHRVPLANVPLTRNGSIGFQVENAMAAAATGWALGYDWPVIERALANFVSDATTAPGRFNVFDFKGATLIADYGHNPDAIQALVKAVENMPAVRRSVVISGAGDRRDEDIRQQTEILGEAFDDVILYQDACQRGRADGEVIGLLRDGLANASRTKQIDAITGEFVAIDTALNRLQPGDLCLILIDQVEEALAHIEKRIAAG

SEQ ID NO: 12687 - protein, 503 aa, Verrucomicrobium spinosum DSM 4136
MRPFSNVWFKLLTGAALVTQGPLHSQEPAKPAAPAQEAAFAQFELLTRAMEIIRQNYVDEKKVSYEQLIEGALDGMLKKLDPHCEYMGKSLFEEMQQEQRDTSEGVGITIALREGMLTIITVDEQGPAAKAGVLPNDQIIRIGEVLADNMSTMEAVQHLKGKAGDAVRLTVRRPGTKQFLDFNLVRQALQESSVRDAMMLHARLSSPWKIGYARITEFTQGTVKDLSNELDRLEKEGMQAFVLDLRNNPGGLIDSAVGVCGEFLPSGTVVVTTEGRVATQNPPPYRTPPRNGKAQRKYPMCVLVNHGSASGSELVAGALQDLKRAIVVGTTSFGKGSVQTVLPMKNGAAMRLTTAKYYTPSHRTIHENGVEPNIVSALTSEEEMKIMQWRTANTQGEGRSLDLAKLNDRQLERATDVLKGVMTYEEFKKGDAKPAAKPPVEAPAAPTKPQESPTPAPASASTPPAAPAPAPAPAATPAPSGTTPPAPSPTPAPTPAPATPAAR

SEQ ID NO: 12688 - protein, 170 aa, Helicobacter pylori
GSGMHTHVSVWKNNENLFSGETYKGLSELALHFLGGVLHHARGLAAFTNASTNSYKRLIPGYEAPSILTYSANNRSASVRIPYGISKNSTRFEFRFPDSSSNPYLAFAAILMAGMDGVKNKMDPGEAMDINLFKLTLDEIREKGIKQMPHTLRRSLEEMLADKQYLKEGQ

SEQ ID NO: 12689 - protein, 170 aa, Helicobacter pylori
GSGMHTHVSVWKNNENLFSGETYKGLSELALHFLGGVLRHARGLAAFTNASTNSYKRLIPGYEAPSILTYSANNRSASVRIPYGISKNSARFEFRFPDSSSNPYLAFAAILMAGMDGVKNKIDPGEAMDINLFKLTLDEIREKGIKQMPHTLRRSLEEMLADKQYLKEDQ

SEQ ID NO: 12690 - protein, 1015 aa, Physcomitrella patens subsp. patens
MAENRNDCSTYSSLVCKNKPSPCDLLRGAEHTTEKHVPVTARAYFRERESEGERQRETEKRWCCFLIFNCLLVVVTSHRFVCCVFPVLLRSFPGHHISAPAYVALDWKLCYAAASTSIFSGDGESDAGSMRFWGSSGSRRVSSCGCSAIAVWSFKTFLEDGLRVWCTRKQCGTDNRCRIVTVEALVGVLLVANDAAYQCFWVAGIFRRPSGWQWSMWHIRLQHCRTMSLYVPERERSGGMLDAVIPLNDFHRSKKSHFSQLALAPVPDQDTLEVAWNDNGKIDIQGQDSQRSKSPWQINCISDWSSGQEAEAGVTPSKPDTPKGGNLLETGGNGSNTAPNPVHNIDVDNDEMVSWLQYPLDDPFCSDFFGEIQEANTQLLRESFTHGSTKTLPRTNFPGASGNDAGINRETPSDSAMLLGVGRVSGLLPQGGVEAFNKVRSLHSLQQHSSLPRWPQPLTPNSSSGSSLLATNNLTFTKASAPTLASPSHHMLPPKTQRVAPVLNSQNTPQPSSPGSMNFSHFSRPAAMVKANLHSLVGINCGPPPSTRVKQQHNSPVVRPIMEACTSTGSSIAESTTAGQGPSGSYQEVKTQPAVLEREQNNGIEESRWPSAPCPSPTKDSDCVVSEGNFRSTPPDQETCRLSGVTNGAVLASSDKGASHGTQHPDVQEPTITSSSGGYGTSIEPLQKVRTSNKRKCSEREETECQSEDGEDESVDTKHKPITTGRGSTTKRSRAAEVHNQSERRRRDRINEKMRALQELIPNSNKTDKASMLDEAIDYLKILQLQLQMMSIRTGMTLPPMVMPPGLQHMQMPQMPQVAAMPSMGMVQMGLGMGMMEQAAQRRTRMPMQSHTGPPLNVCLANTSSMVDVHDLRYQQPGVLGYNTSMSRQHQPMQTTKGLDLDKCNAYMLQQHQLLFQQQQLQQHQLHQHQQHLQHHQRAPNMGGVQTLGEGCRQCKLNVIYLFAILVEWNKSLNVKPRSWSLPFHSGIFSRIRVLLGVAMSHHLGSIFRQLCREL

SEQ ID NO: 12691 - protein, 164 aa, Vitis vinifera
MENSMVLAHETQPHRDFSASSLRDVSYSCGSCGYELKLCSSNRNTKNIGSKYGKNIKRGVISFLQVDESRFTLVDEFKCIPYFISRHSWGLFCHRTKLLCRKCSNHVGNAYVRKSPYPLVLDESDSAPAPATATTDISTCRKYDIRLRALQPSSSEPSAIPLLT

SEQ ID NO: 12692 - protein, 169 aa, Oryza sativa Japonica Group; identical to SEQ ID NO: 11407

SEQ ID NO: 12693 - protein, 482 aa, Tropheryma whipplei str. Twist
MGRGQRCCVFENAKEAAEYIKSNQIEVLDVRFCDFLGAQHHFAVPAHAVDDEFFQSPQVFDASSLRGYADINHSDMLLVADPSTSYIDPFRHHKTLAMIFDVHDPRTGDVYERDSRNVAKKAEKYLAGCRFADTAYFAAEAEFFIFDDVRFKISNHSSSYSVDSEEGIWNSSRRKGGGNLGNQLKHKGGYAPLPPADQHADLRDDIMNALTKVGLRVEKGHHEAGSAGQGEINYRFNTLVNAADDLLKFKYVVKNTAHEWGKSATFMPKPIAGDNGSGMHTHQSLWKNGKPLFYSETGYANLSDIALWYIGGLLKHGPALAAFTNPSTNSYKRLVAGFEAPTSLVYSAGNRSAAIRIPPTIGAEGSKRIEYRVPDSSSNPYLAFSALLMAGIDGIKNKIHPGSPVEQNMYELTKEQSRDLRYLPSSLSDALRALEQDCDFLLEGNVFTREFISAWIDYKRKNELNRIAQYPHPLEFGMYYGV

SEQ ID NO: 12694 - protein, 283 aa, Clostridium perfringens ATCC 13124
MELWYTEEHTDKVRFSIKVDEQLYSGKSDFQRIDVFKSQEFGTFFTLDGLMMVTEKDEFIYHDMIVHVPMATNPNIKNVLVIGAGDGGTVRELTRYETIEKIDMVEIDKLVVDVCREYLPQTANKLDDPRVSLFFEDGLKFVRSVENKYDLIIVDSTDPFGPGEGLFTREFYGNCFKALKEDGILVNQHESPYYEEYARGMKRAHKRIKECFPVCRVYQAHIPTYPSGHWLFGFASKKYDPLNADIEKWNDLGLKTKYYNTELHKGCFALPNYVKEMLENVDE

SEQ ID NO: 12695 - protein, 366 aa, Triticum aestivum
MARVRSNGRRAGGSGGGGGRGGKGKGKGKGPGKWKMPLSVARKQQAVLANVDQVTGERIPKSFVFSRGKLPSTLRHLQQDLRKLMLPYTALKLKEKKRNNLKDFVNVASPLGVTHFLILSNPKSLPHLRFAKSPQGPTYTCQILEYALAADIANSQKRPRCPAEIFKNSPLVVLSGFNGLGEPFKSFVTFFRHLVPAIDTDTVKLSTCQRLLLLQYDKETEAIDFRHYSIKLQPVGVSRKIRKLMQNNQVPDLRDLKDVSDYVTKAGYGSESEPDDEAATVSLASDIDKLNRASRKSAVRLQEIGPRMTMRLVKVESGLCSGDILYPQSVGKEDVKEGQEEEEIEDAEDMMELDDGTEEDDSVDEE

SEQ ID NO: 12696 - protein, 456 aa, Orobanche pinorum; identical to SEQ ID NO: 9327

SEQ ID NO: 12697 - protein, 584 aa, Orobanche raddeana; identical to SEQ ID NO: 9330

SEQ ID NO: 12698 - protein, 609 aa, Orthocarpus bracteosus; identical to SEQ ID NO: 9335

SEQ ID NO: 12699 - protein, 1108 aa, Ustilago maydis 521
MSKAPNGTNGHPKPSALPPAMRDSKNWEDQDKLSDYIPGSGDLSRAPTASASVSRAQTPPKKCLADSDDEDADELDDDDSVVIISPSKTPRQLEKEREKNERAAARKQEKAVKAAQNETLASTRQEMSKSKLADSMKRFTYLLGQTELFQHFIDIKKERDEEFAKMLEESQAASAKKAKKGGDNRRRKTEKEEDEELLKEGNDEEEESFVFNESPAYVKGGKMRDYQVQGLNWMISLYHNGINGILADEMGLGKTLQTISFLGYLRDFRETPGFHLVVVPKSTLDNWYREFHRWVPGFNVVTLKGSKEEREKVIQDHLLPQDFDVLITTYEMCLREKSALKKLSWEYIVIDEAHRIKNVDSMLSQIVRAFNSRSRLLITGTPLQNNLMELWSLLNFLLPDVFSNSEDFESWFKGKGDENQDQVVQQLHKVLRPFLLRRVKADVEKSLLPKKEINIFVGLTEMQRKWYKSILEKDIDAVNGGVGKKEGKTRLLNIVMQLRKCCNHPYLFDGAEPGPPFTTDEHLVDNSGKMVILDRLLHKMKQKGSRVLIFSQMSRMLDILEDYCLFREYKYCRIDGGTAHDDRIAAIDEYNKPGSEKFVFLLTTRAGGLGINLTTADIVVLFDSDWNPQADLQAMDRAHRIGQTKQVYVFRFVTEHAIEERILDRAAQKLRLDQLVIQQGRAQQAAKAAQSKDDLVDMIQHGAEKIISNKEDMSINDDIDDIISRGEERTQAIQAKYQGLNLDDLNNFKSDTVYNWEGNDFSERKPIGQLWIEPSKRERKANYSIDNYYRDAMRVGPKPTQPKAPRAPKQININDFQFYPARLTELQERETAAYQRSIGYRVPAKEASEGQTAEEAEQERKQEQDFIDTAVALTEDEVEEKEVLAQEGFGNWNRREFQIFVRGCERYGRRAFALIAADMPDASKTEKEVREYSKVFWDRIDELSDSAKLIARIEEGESKLVKQQHQESVLRKKVSSYRLPLLQLKVVYGQNKGKSYSEEEDRFLLVKLAEYGLAEGSDTYDRIKKDVMGWSGFRFDWFIKSRTPQELGRRCNTLVLLVLKEMGEEEVPSVGGGAKKRKSGLDTASNAGSSRAGTPITAPGGPSKKKKK

SEQ ID NO: 12700 - protein, 405 aa, Alkaliphilus metalliredigens QYMF
MISKKKALIGVVIIVILTTILNLTLGNMIALKMGQKVVVTRDTYEFYQTIKNEYGKMFALKDFLETNYYREIEPEHLVEGAIKGMFEGIGDPYTNYLSQREFEDLMTRTQGTYGGIGVIVTPGDDGMVTVVSPIEDTPGERAGLRTGDKIMSVNGEPISGDRLDKAVEMMKGEPGTEVRLSIWREGLTEAMDVRIQREEIRLQTVRSEIVEGNIGYVRISMFDEKTANDFKTQVDQLQQENIEGLILDLRNNPGGLLSQCVEIADYLLGEQVIVYTEDRQGNREVERSDRREVALPMVVLVNEGSASASEILAGAIKDGERGTIVGTTTFGKGLVQQVKPLDDGTGFKFTVSEYFTPNGTNIHGTGIEPDVIVERPEGIEGEPVTEADEDPQLEKSIEVIKSKMN

SEQ ID NO: 12701 - protein, 158 aa, Glycine max
MDDSAFKRGGHFNRTYSCSSQRDVCYSCGTCGYELNLSSSNRNTASIGSKYGKSIKRGIISFFSIDLSRFTQVDEIQCVPHFDKHSWGLFRRRTKLLCRKCGNHIGNAYNGYTSSFPLVSDGAESSPSSKVVSHTKYDIRICALQPSSSEESGIPVFA

SEQ ID NO: 12702 - protein, 1064 aa, Bacillus cereus E33L
MSFTLNKSTIKEVCGETSYKRGEAYYKSNKVIVNHYDETKEICEATVKGNEDFHVTVEKAKKGDVVARCSCPSLASFQTYCQHVAAVLIQINYNQQAGVMGSISSRNDQLTNGMFQLFADKPLRPKSKQHRFDTREILDVAFICSPVATKSGGALLGIQLKLAKTYLINHIREFLSKVEKRETFHCSNEFTYTPDIHSFKQETDVIIQHLIKIYHNEKMYEDALEVHAKQDESMIFIPPASWNDMLAALSRAEYVQLKQNEQLFHGLQISKGLLPLHFEFTKGNNGGFTLHIDGLNRVRVMEMYNNALYDGKLYHLPMEDCMRLIELQKMMSRSNSNQFYIPENKMEHFVAKVVPGLMKLGTVRIDEGISDHVETPSLKAKLYLDRVKNRLLAGLEFHYGNVMINPLEEDGQPSVFNRDEKKEKEILDIMSESAFAKTEGGYFMHNEEAEYNFLYHIVPTLKGLVDIYATTAIKLRIHKGDTAPLIRVRRKERIDWLSFRFDIKGIPEAEIKGVLVALEEKRKYYRLANGSLLSLESKEFNEINQFVKESGIRKEFLHGEEVNVPLIRSVKWMNGLHEGNVLSLDESVQDLVESIQNPKKLKFTVPQTLHAVMREYQVYGFEWMKTLAYYRFGGILADDMGLGKTLQSIAYIDSVLPEIREKKLPILVVSPSSLVYNWLSELKKFAPHIRAVIADGNQAERRKILKDVAEFDVVITSYPLLRRDIRSYARPFHTLFLDEAQAFKNPTTQTARAVKTIQAEYRFGLTGTPVENSLEELWSIFHVVFPELLPGRKEFGDLGREDIAKRVKPFVLRRLKEDVLKELPDKIEHLQSSELLPDQKRLYAAYLAKLREETLKHLDKDTLRKNKIRILAGLTRLRQICCHPALFVDDYKGSSAKFEQLLDILEECRSTGKRILIFSQFTKMLSIIGRELNRQAIPYFYLDGNTPSQERVELCNRFNEGEGDLFLISLKAGGTGLNLTGADTVILYDLWWNPAVEQQAADRAYRMGQKNTVQVIKLVAHGTIEEKMHELQESKKNLIAEVIEPGEEKLSSITEEEIRDILMI

SEQ ID NO: 12703 - protein, 663 aa, Candida albicans SC5314
MSSLTIYAAKILLKRAISGDLEEDTPDLTTPDDAEDSNPVENEIFSSWALFILLFLLMSALWSSYFLQQRRIKAVHETVLSIFCGMIVGLIIRMSPGHYIQDAVKFNPGYFFNILLPPIILNSGYELHQANFFRNLGSILTFAIPGTFISALVVGIILYIWTALGLDNVSLEFVDALAVGATLSATDPVTILSIFNAYKVDPKLYTIIFGESLLNDAISIVMFETCQKFHGQPVRFSSFFQGVGLFLMTFTISTIIGIFIGILVALILKHSHIRRYPQIETCLVLLFAYQSYFFSNGAHMSGIVSLLFCGITLKHYAYFNMSRRTQIATKYIFQLLAQLSENFIFIYLGLSLFTEVELVFKPMLIIVAFIAICVARWSAVFPLSRFLNFFYRTRFERYSAGTLSTSAGNMINMPDEISHSYQMMIFWAGLRGAVGVALAMGFSGEAKWTLLATVLVVVVLTVILFGGTTASMLEILGIKIGCVDESGDFSDDEFDIEAPPRFPQQSQQSNISSVANKNQNIYGNRRFARSSKLSNYKDNLSAVNLLDQEHGGVPNTGNSSTSNFANVNDDDDDDEIVGSDVDDFISGSISNSTSNINNNNDRGGVLGAILSAEEHAKWFTRFDEEVLKPVLLDTLPSTGQSSQNNSTSNLNSSGNGNGKRNQS

SEQ ID NO: 12704 - protein, 427 aa, Corynebacterium glutamicum
MRLWFTDILGHLKSVVVAPAELESALEEGIGFDGSAIEGYARISEADTIARPDPSTFQVLPLEAGISKLQAARLFCDVTMPDGQPSFSDPRQVLRRQVQLAADEGLTCMISPEIEFYLVQSLRTNGLPPVPTDNGGYFDQATFNEAPNFRRNAMVALEELGIPVEFSHHETAPGQQEIDLRHADALTMADNIMTFRYIMKQVARDQGVGASFMPKPFQEHAGSAMHTHMSLFEGDTNAFHDPDDSYMLSKTAKQFIAGILHHAPEFTAVTNQWVNSYKRIVYGNEAPTAATWGVSNRSALVRVPTYRLNKEESRRVEVRLPDTACNPYLAFSVMLGAGLKGIKEGYELDEPAEDDISNLSFRERRAMGYNDLPSSLDQALRQMEKSELVADILGEHVFEFFLRNKWREWRDYQEQITPWELRNNLDY

SEQ ID NO: 12705 - protein, 565 aa, Glycine max
ARAARGLSGAIPPEISNMASLQVLQLGDNQLVGNIPTQMGSLKQLSTLALQYNKLTGQIPLSLGNLEKLSRLNLSFNNFSGTVPATLAYIEHLEVLDIQNNSLSGIVPSALKRLGEGFQGANNPGLCGVGFSTLRACNKDQDLNVNHIDTSDGDQPKNSNSSKALPEPAYVQLHCGQTHCSKSRRFPQTVITAGVVIVTLTFICAGFLTFFRYRRQKQRISNTLSSSSEGKVSLDQPKEFYTKSPSALVNIDYYSGWDQLSNGQNADAGGLSNEYLNQFRFNVDEVESATHYFSEANLLNRSKFAAGYKGVLRDGSLVAIRSISVTCCKTEEAEFVKGLNLLTSLRHENLVRLRGFCCSRSRGECFLIYDFATMGNLSQYLDIEDGSSHVLEWSKRVSIIKGIANGIGYLHSNEESKPTIVHQNISVENVLLDYQFNPLIRDAGLPMLLADDVVFSALKVSAAMGYLAPEYITTGRFTEKSDIYAFGVIILQVLSGKTTIGSSIRTAVESFRFDDSVDTNLKGIYSKSEAATLSKLAIQCTNELPDERPTMVDVIQELSVLSAHL

SEQ ID NO: 12706 - protein, 125 aa, Betula pendula
LKQEPGTSEETEQFACTRYKAEYPIFQKIRCNGPDTAPLYKFLKASKTGFLGSRIKWNFSKVAFPCNQFLKQEPGTSEETEQFACTRYKAEYPIFQKIRCNGPDTAPLYKFLKASKTGFLGSRIK

SEQ ID NO: 12707 - protein, 531 aa, Streptomyces avermitilis MA-4680
MLTVDQLALLFVLLLGAVVSVPVGDRFGLPAPVLMTLLGIGLAVADFVPNVDIPPDLILPALLPPLLYAAVRRTSWRQFTANKRPIFLLAVALVFVTTAVVALVAGAIVPGLPIAAAVALGALVAPPDPVAATAVAGQLGLPRRLVSILEGEGLFNDVTAIVLYHVAIAAAVSGTFSLPNAVLDLVLSAVVAVAVGLALGWAANRLMDLLDDVTLQIGLTLLVPYASYVLAEELHGSGVLAVLTTALFLAEYATDADDVMTRLAGHTFWNVVDTLVTGVAFGLIGLELHNALRTASGRWGEMLGWAAAIVAVVVLVRLAYLLPATWLTKRLHAKRDYDEEIPTSWRETVVMWWAGMRGVASAALALAIPLKMDDGSPFPDRDEIVFIAFGVIMGTLVLQGLTLPWLVKRLGVRADTGSEKAFEKALAIRAAKAAKRRLREIEDVEELPEELSEQLLRRAFDIGARISPDLGDEERREAHEQRVRRMKRVRRIQGEMMSAARHEVLAARSEPGADPEIVDRVLRHLDVRSLR

SEQ ID NO: 12708 - protein, 178 aa, Clostridium perfringens SM101
MLYDFKVKDIEGNEVSLGEYKGKVLLIVNTATGCGFTPQYEGLEMLYKKYHDKGFEILDFPCNQFFEQAPGSNEEIAGFCKLNYGTTFKTFAKVEVNGENACELYKFLKKEAPMAKEDETSLGFYDKLKGLGFTTEGEEIKWNFTKFLIDKNGEVIARFAPTFEPEKLDELIEELLEE

SEQ ID NO: 12709 - protein, 1148 aa, Oryza sativa Japonica Group
MDNPEAEPDDAVLFVGVSLVLGIASRHLLRGTRVPYTVALLVLGVALGSLEFGTKHGMGKLGAGIRIWANINPDLLLAVFLPALLFESSFSMEIHQIKKCMAQMVLLAGPGVLISTFFLGSALKLTFPYNWNWKTSLLLGGLLSATDPVAVVALLKELGASKKLSTIIEGESLMNDGTAIVVYQLFYRMVLGRTFDAGSIIKFLSEVSLGAVALGLAFGIASVLWLGFIFNDTIIEIALTLAVSYIAFFTAQDALEVSGVLTVMTLGMFYAAFAKTAFKGDSQQSLHHFWEMVAYIANTLIFILSGVVIADGVLENNVHFERHGASWGFLLLLYVFVQISRILVVVILYPLLRHFGYGLDLKEATILVWAGLRGAVALSLSLSVKRASDAVQTHLKPVDGTMFVFFTGGIVFLTLIFNGSTTQFLLHLLGMDRLAATKLRILNYTKYEMLNKALEAFGDLRDDEELGPPADWVTVKKYITCLNDLDDEPVHPHAVSDRNDRMHTMNLRDIRVRLLNGVQAAYWGMLEEGRITQTTANILMRSVDEAMDLVPTQELCDWKGLRSNVHFPNYYRFLQMSRLPRRLITYFTVERLESGCYICAAFLRAHRIARRQLHDFLGDSEVARIVIDESNAEGEEARKFLEDVRVTFPQVLRVLKTRQVTYSVLTHLSEYIQNLQKTGLLEEKEMAHLDDALQTDLKKFKRNPPLVKMPRVSDLLNTHPLVGALPAAMRDPLLSSTKETVKGHGTILYREGSRPTGIWLVSIGVVKWTSQRLSSRHSLDPILSHGSTLGLYEVLIGKPYICDMITDSVVHCFFIEAEKIEQLRQSDPSIEIFLWQESALVVARLLLPMMFEKMATHELRVLITERSTMNIYIKGEEIELEQNFIGILLEGFLKTKNQTLITPPGLLLPPNADLNLFGLESSAINRIDYCYTAPSYQVEARARILFVEIGRPEIEADLQRSASLISQTLELPRTQSKEHSGLLSWPESFRKSRGAQNGASLTEIRDHPASFSARALQLSMYGSMINDMKSGQGQGQRRQRHRHTKASSNKAHSSSYPRVPSRSSNTQRPLLSVQSEGANMTTARQAAAAGASLPPEPEEAGRRRRRQRKAIEEDEDNSSDESAGEEVIVRVDSPSMLTFRQPSSAADR

SEQ ID NO: 12710 - protein, 1130 aa, Vitis vinifera; identical to SEQ ID NO: 9343

SEQ ID NO: 12711 - protein, 973 aa, Adiantum capillus-veneris; identical to SEQ ID NO: 9344

SEQ ID NO: 12712 - protein, 296 aa, Oryza sativa Indica Group
MKSRKSYGHLLSPVGSPPSDNESGAAAAAAAAGGGGCGSSAGYVVYGGGGGGDSPAKEQDRFLPIANVSRIMKRSLPANAKISKEAKETVQECVSEFISFVTGEASDKCQREKRKTINGDDLLWAMTTLGFEAYVGPLKSYLNRYREAEGEKAAVLGGAGGAAAARHGEGGCCGGGGGADGVVIDGHSPLAGGLSHSHHGHQQQDGGGDVGLMMGGGAAGVGYNAGAGSTTTAFYAPAATAASGNKAYCGGDGSRVMEFEGIGGEEESGGGGGGGERGFAGHLHGVQWFRLKRSTN

SEQ ID NO: 12713 - protein, 291 aa, Pseudomonas fluorescens PfO-1
MTVTKTSEYLETLYEGYGQRFRMEKLLHEVRTEHQHLVIFQNPRMGRVMALDGVIQTTEADEFIYHEMLTHVPILAHGTAKRVLIIGGGDGGMLREVTKHASVEHITMVEIDGTVVDMCKEFLPNHSSGAYDDPRLNLVIDDGMRFVATTTEKFDVIISDSTDPIGPGEVLFSENFYQACHRCLNEGGILVTQNGTPFMQIEEVKTTAGRLRSLFPDWHFYQAAVPTYIGGSMTFAWGSTNPAYRKLSREVLQQRFIGSGIVTRYYNPEIHIGAFALPQYVLQAVNKPSND

SEQ ID NO: 12714 - protein, 170 aa, Helicobacter pylori
GSGMHTHVSVWKNNENLFSGETYKGLSELALHFLGGVLRHARGLAAFTNASTNSYKRLIPGYEAPSILTYSANNRSASVRIPYGISKNSARFEFRFPDSSSNPYLAFAAILMAGIDGIKNKMDPGEAMDINLFKLTLDEIREKGIKQMPHTLRRSLEEMLADKQYLKEDQ

SEQ ID NO: 12715 - protein, 520 aa, Anabaena variabilis ATCC 29413
MVLESAISEEAIATNLKQFLLVLSVSLGVATLPQVFSWFRQIPYTLLLVIVGLGLAVVDVRLVVLSPALILSIFLPPLLFEAAWNLKWSDLQRDFVPISLYAVFGVIISIAGVAIGLNQLGGISLTTALLIGASLSATDPVSVTALFRELGVGTRLVTLMEGESLFNDGMAVVAFGFLVALPLGSAELGVQPILLQFFQVVGIGVAIGCLIGFAISYLTQRFDLPMVEQSLTLVSAYGTYLVTEDLGGSGVIGVVTTGLILGNFGSRIGMNPRTRIIVSEFWEFLAFFVNSIVFLLIGDQIRFASLGENLQIIAITVGAMIFMRAVTLFILSKLSVMMTQSQVSLPEQTILWWGGLRGSVSIALALSVPTVLPGREKIIATVFGVVLFTLLVQGLTIKPLLQKLNLLGDAPLREQYLQLVARIVALERVLQYLQTEKRPGIGPEFLRYQEKLVTGEIAELQTKIDKLHHEYPNLQNFTTEQFRDELLAIEADTYAEFVKSGRLNKELAPMLEDVLGHQRD

SEQ ID NO: 12716 - protein, 469 aa, Idiomarina baltica OS145
MSASKIFDAIKEHDVKFVDLRFTDTKGKEQHVTIPVSQIDDDFFEEGKMFDGSSIAGWKGINESDMVLMPDAESLVLDPFTDEMTLNVRCDILEPDTMQGYSRDPRSIAKRAEEFLQASGVADSAFFGPEPEFFLFNDVRFHTDMSGSFYKIDAEEAKWNSGREYSEGNLAHRPGVKGGYFPVPPVDSAHDIRGTMSLVMEDMGLVVEAHHHEVATAGQNEVATQFNSLTKKADEIQIYKYVVHNVAHSYGMTATFMPKPLVGDNGSGMHVHMSLAKDGQNLFAGDQYAGLSETALYYIGGIIKHARAINAFTNPSTNSYKRLVPGFEAPVMLAYSARNRSASIRIPLVSSAKARRIEVRFPDPSANPYLCFTALLMAGLDGIRNKIHPGDAMDKDLYNLPPEEAKDIPTVCHSLEMALDALDKDRDFLKQGGVMDDDMIDAYIGLKYNEVETLKKTTHPVEFDMYYSV

SEQ ID NO: 12717 - protein, 170 aa, Helicobacter pylori
GSGMHTHVSVWKNNENLFSGETYKGLSGLALHFLGGVLRHARGLAAFTNASTNSYKRLIPGYEAPSILTYSANNRSASVRIPYGISKNSARFEFRFPDSSSNPYLAFAAILMAGMDGVKNKIDPGEAMDINLFKLTLDEIREKGIKQMPHTLRRSLEEMLADKQYLKEDQ

SEQ ID NO: 12718 - protein, 86 aa, Zea mays
PNPRKVLIIGGGDGGVLREVVKHPSVESVVQCEIDEDVIQVSKKFLPGMAIGYSSSKLTLHVGDGFEFMKQNQDAFDVIITDSSDP

SEQ ID NO: 12719 - protein, 170 aa, Helicobacter pylori
GSGMHTHVSVWKNNENLFSGETYKGLSELALHFLGGVLRHARGLAAFTNASTNSYKRLIPGYEAPSILTYSANNRSASVRIPYGISKNSARFEFRFPDSSSNPYLAFAAILMAGIDGVKNKMDPGEAMDINLFKLTLDEIREKGIKQMPHTLRRSLEEMLADKQYLKEGQ

SEQ ID NO: 12720 - protein, 845 aa, Oryza sativa Japonica Group
MSEVRSVPGMKVEASPAAAAAATVDSPTSVLEDDEISECKNGDVLDTTEAIKQEEDHLDVLIEEKVDGFVDASSSLNVEPAANNSDLSPLTVPVKEEGQLLEPVKEEKADDFVDAVPSLPIDLEAKNGDASLITDAMKEEEEKLHDARVKAEEEEVARKREEAARLAFDPNARFNKLDELLSQTQLYSEFLLEKMETIADVEGVQTHAEEEPVEEKKNGRGRKRKATSAPKYNDKKAKKAVAVMLTRSHEDCSPEDCTLTEEERWEKEQARLVPLMTGGKLKSYQIKGVKWLISLWQNGLNGILADQMGLGKTIQTIGFLAHLKGKGLDGPYLIIAPLSTLSNWVNEISRFVPSMTGLIYHGDKAARAEIRRKFMPKTTGPDFPLIVTSYEMAMSDAKHLAHYKWKYVIVDEGHRLKNSKCLLLRELKRLPMDNKLLLTGTPLQNNLAELWSLLNFILPDIFSSHQEFESWFDFSAKGGEEEQEDSEEKRKVDVVSKLHAILRPFLLRRMKEDVEHMLPRKKEIIIYANMTDHQKQIQNHLVEQTFDQYLHEKSEIVLRKPGIKAKLNNLLIQLRKNCNHPDLLESAYDSSGLYPPVEKLLEQCGKFQLLNRLLSLLLARKHKVLIFSQWTKVLDIIEYYLETKGLQVCRIDGSVKLEERRRQIAEFNDLNSSMNIFILSTRAGGLGINLTSADTCILYDSDWNPQMDLQAMDRCHRIGQTRPVHVYRLATSHSVEGRIIKKAFGKLRLEHVVIGKGQFEQDRAKPNALDEAELLALLRDEQGDEDRMIQTDISDEDLLKVMDRSDLTGPPANADAAPLVPLKGPGWEVVVPTKSGGGMLTSLTS

SEQ ID NO: 12721 - protein, 393 aa, Vitis vinifera
MGRALTEENLLFLEAWRTIDRAYVDKTFNGQSWFRYRENALRNEPMNTREETYMAIKKMLATLDDPFTRFLEPDKFKSLRSGTQGALTGVGLSIGYPTGFDGSPAGLLVISATPGGPASRAGILSGDVILTIDGTSTETMGIYDAAERLQGPEGSSVELTIRSGPEVKRLSLMRERVSLNPVKSRLCKMPGLGKDSPKIGYIKLASFNQNASGAVKEAIESLRSNDVNAFVLDLRDNSGGLFPEGVEIAKIWLEKGVIVYICDGRGIRDIYDTDGSSVVAASEPLAVLVNKGTASASEILAGALKDNKRAVLFGEPTFGKGKIQSVFELSDGSGLAVTVARYETPAHIDIDKVGIAPDHPLPTPFPKDAEGFCGCLMDPTSACYLNRVQLFSR

SEQ ID NO: 12722 - protein, 170 aa, Helicobacter pylori
GSGMHTHVSVWKNNENLFSGETYKGLSEFALHFLGGVLRHARGLAAFTNASTNSYKRLIPGYEAPSILTYSANNRSASVRIPYGISKNSARFEFRFPDSSSNPYLAFGAILMAGIDGVKNKIDPGEAMDINLFKLTLDEIREKGIKQMPHTLRRSLEEMLADKQYLKEGQ

SEQ ID NO: 12723 - protein, 849 aa, Oryza sativa Japonica Group
MVEGMVVAVANGTKVEAAPAAGAGAAANADSPTSVLEDEISECKNGDASDTVEAIKQEDDHLKVLAEERADDFVDASSSLTVELAANNGDLSPHPVPVKEEDQLLEPVKEEKADDFVDATSSLPIDLEAKNGDASLITDAMKEEEDKLHEARVKADEEEEARKRAEAARLAFDPNARFNKLDELLTQTQLYSEFLLEKMETIADVEGVDTPDEEEPVEEKKKGRGRKRKATSAPKYNNKKAKKAVAAMLTRSREDCSPEDCTLTEEERWEKEQARLVPLMTGGKLKSYQIKGVKWLISLWQNGLNGILADQMGLGKTIQTIGFLAHLKGKGLDGPYLIIAPLSTLSNWVNEISRFVPSMTGVIYHGDKAARAEIRRKFMPKTTGPNFPLIVTSYEMAMSDAKQLAHYKWKYVIVDEGHRLKNSKCILLRELKRLPMDNKLLLTGTPLQNNLAELWSLLNFILPDIFSSHQEFESWFDFCAKGGEEEQEESEEKRKVDVVSKLHAILRPFLLRRMKEDVEHMLPRKKEIIIYANMTNHQKEIQNHLVEQTFDEYLHEKSEIVLRRPGIKAKLNNLLIQLRKNCNHPDLLESAYDSSGMYPPVEKLLEQCGKFQLLNRLLNLLLARKHKVLIFSQWTKVLDIIEYYLETKGLQVCRIDGSVKLEERRRQIAEFNDLNSSMNIFILSTRAGGLGINLTSADTCILYDSDWNPQMDLQAMDRCHRIGQTRPVHVYRLATSHSVEGRIIKKAFGKLRLEHVVIGKGQFEQDRAKPNALDEAELLALLRDEQDEEDRMIQTDITDEDLLKVMDRSDLTGPPANADAAPLVPLKGPGWEVVVPTKSGGGMLTSLTS

SEQ ID NO: 12724 - protein, 476 aa, Campylobacter lari RM2100
MGKFVNNIDEFFSYCQEHEVLFVDFRFTDMIGTWHHITYNIKAIDDKTFENGIPFDASSLHGWQPIEKSDMILKPDVKSAFLDPFTADPTIIVICDVYDIYKDQMYEKCPRSIAKKAMQHLSTSNIADTAYFGPENEFFIFDNVKIVDSSHCAKYEVDTEEGEWNDNKDFADSYNSGHRPRNKGGYFPVSPVDSSVDIRSEMVQVLERVGLKVFVHHHEVAQGQAEIGVEFGNLVEAADNVQIYKYVVKMVAHLNGKTATFMPKPLYGDNGSGMHVHMSLWKDGVNLFYDKEGYGKLSECAINYIGGILANARSVAAFTNPSSNSYKRIVPGFEAPCILTYSCQNRSASCRVPYGINEKSARVEIRFPDSTSNPYLAFTSLLMAGLDGIKNKTIPVGPMDENLFALTLDEIREKGIEQLPHTLRGSLEALIRKNAFLKPVMSDVFIDDYQHMKFETQVWPVEARPTAYEFKTCYSC

SEQ ID NO: 12725 - protein, 610 aa, Parentucellia viscosa; identical to SEQ ID NO: 9359

SEQ ID NO: 12726 - protein, 607 aa, Paulownia tomentosa; identical to SEQ ID NO: 9362

SEQ ID NO: 12727 - protein, 118 aa, Aegiceras corniculatum
ISVVLFSTVIFGLLTKPLVRLLLPSSKHLSRMLSSEATTPKSFIVPLLDNGQESESDLGGFHIVPPSGLRMLLTTPARSVHHYWRKFDDAYMRPMFGGRGFVPFVPGSPTESSVPQEE

SEQ ID NO: 12728 - protein, 612 aa, Pedicularis densispica; identical to SEQ ID NO: 9364

SEQ ID NO: 12729 - protein, 776 aa, Listeria monocytogenes str. 1/2a F6854
MIKLDMTMLDSFKEDPKLRKLLFSGHFGLEKENIRVTSDGKLALTPHPAIFGPKEDNPYIKTDFSESQIEMITPVTDSIDSVYEWLENLHNIVSLRSENELLWPSSNPPILPAEEDIPIAEYKTPDSPDRKYREHLAKGYGKKIQLLSGIHYNFSFPEALIDGLYANISLPEESKQDFKNRLYLKVAKYFMKNRWLLIYLTGASPVYLADFSKTKHEESLPDGSSALRDGISLRNSNAGYKNKEALFVDYNSFDAYISSISNYIEAGKIESMREFYNPIRLKNAHTDQTVESLAEHGVEYLEIRSIDLNPLEPNGISKDELDFIHLFLIKGLLSEDRELCANNQQLADENENNIALNGLAQPSIKNCDNEDIPLADAGLLELDKMSDFIKSLRPEDTKLRAIIEKQKERLLHPEKTIAAQVKQQVTKEGYVDFHLNQAKTYMEETEALAYKLIGAEDMELSTQIIWKDAIARGIKVDVLDRAENFLRFQKGDHIEYVKQASKTSKDNYVSVLMMENKVVTKLVLAEHDIRVPFGDSFSDQALALEAFSLFEDKQIVVKPKSTNYGWGISIFKNKFTLEDYQEALNIAFSYDSSVIIEEFIPGDEFRFLVINDKVEAVLKRVPANVTGDGIHTVRELVEEKNTDPLRGTDHLKPLEKIRTGPEETLMLSMQNLSWDSIPKAEEIIYLRENSNVSTGGDSIDYTEEMDDYFKEIAIRATQVLDAKICGVDIIVPRETIDRDKHAIIELNFNPAMHMHCFPYQGEQKKIGDKILDFLFD

SEQ ID NO: 12730 - protein, 611 aa, Pedicularis foliosa; identical to SEQ ID NO: 9366

SEQ ID NO: 12731 - protein, 612 aa, Pedicularis gyrorhyncha; identical to SEQ ID NO: 9371

SEQ ID NO: 12732 - protein, 540 aa, Petunia x hybrida
MAFDFGTLLGNVDRLSTSDHQSVVSINLFVALICACIVIGHLLEENRWMNESITALVIGSCTGIVILLISGGKNSHILVFSEDLFFIYLLPPIIFNAGFQVKKKSFFRNFSTIMLFGALGTLISFIIISLGAIGIFKKMNIGSLEIGDYLAIGAIFSATDSVCTLQVLNQDETPLLYSLVFGEGVVNDATSVVLFNAIQNFDLSHIDTGKAMELVGNFLYLFASSTALGVAAGLLSAYIIKKLYFGRHSTDREVAIMILMAYLSYMLAELFYLSAILTVFFSGIVMSHYTWHNVTESSRVTTKHTFATLSFIAEIFIFLYVGMDALDIEKWKFVSDSPGISVQVSSILLGLVLVGRAAFVFPLSFLSNLTKKTPEAKISFNQQVTIWWAGLMRGAVSMALAYNQFTRGGHTQLRANAIMITSTITVVLFSTVVFGLMTKPLIRILLPSHKHLSRMISSEPTTPKSFIVPLLDSTQDSEADLERHVPRPHSLRMLLSTPSHTVHYYWRKFDNAFMRPVFGGRGFVPFAPGSPTDPVGGNLQ

SEQ ID NO: 12733 - protein, 553 aa, Nierembergia caerulea
MAFDFGTLLGKMNNLTTSDHQSVVSVNLFVALICACIVIGHLLEENRWMNESITALVIGSCTGVIILLISGGKNSHILVFSEDLFFIYLLPPIIFNAGFQVKKKSFFRNFSTIMLFGAVGTLISFIIISAGAIGIFKKMDIGHLEIGDYLAIGAIFAATDSVCTLQVLNQEETPLLYSLVFGEGVVNDATSVVLFNAVQNFDLSHISTGKALQLIGNFLYLFASSTFLGVAVGLLSAFIIKKLYFGRHSTDREVAIMILMAYLSYMLAELFYLSGILTVFFCGIVMSHYTWHNVTESSRVTTKHTFATLSFIAEIFIFLYVGMDALDIEKWKFVSDSPGTSIKVSSILLGLVLVGRGAFVFPLSFLSNLTKKNPEDKISFNQQVTIWWAGLMRGAVSMALAYNQFTRGGHTQLRANAIMITSTITVVLFSTVVFGLMTKPLILLLLPSQKHLIRMISSEPMTPKSFIVPLLDSTQDSEADLGRHVPRPHSLRMLLSTPSHTVHYYWRKFDNAFMRPVFGGRGFVPFVPGSPTEPVEPTEPRPAESRPTEPTDE

SEQ ID NO: 12734 - protein, 448 aa, Cyanobium sp. PCC 7001
MGSARTSLIVLVSVGACAATAVMAREAVTPPGGAGSITDSPKEVIDQTWQIVFRDYLDINGKYTPEQWRQLRRDVLAKSYGTPKEAYEAIRGMLATLDDPYTRFLDPREFKEMQIDTSGELSGVGIQLSLDKDTKDLVVVAPIEGSPASRAGVLPKDVITAIDGKSTKGMTTEDAVKLIRGQAGTTVTLTLRRKGQSLDVPLVRDRIELHAVDHQINVTPDGVKVGYIRLKQFNANATKDMRVALRELEGQNVQGYVLDLRSNPGGLLGASVEIARQWLNEGTIVSTKTRNGITDVKKATGRALTDKPLVVMVNEGSASASEILSGALQDNNRAVLVGQKTFGKGLVQSVRGLSDGSGMTVTIAKYMTPKGRDIHKYGIDPDVQAKMTEQEAQRLQLQDLGTAKDSQYRVAESTLRKRLQMANSVGGTFNPGSANVPAALGASAGSRP

SEQ ID NO: 12735 - protein, 555 aa, Torenia hybrid cultivar
MGFESVIKLAASETDNLWSSGHGSVVAITLFVTLLCTCIVIGHLLEENRWMNESIIALIIGLATGVIILLISGGKSSHLLVFSEDLFFIYALPPIIFNAGFQVKKKSFFRNFATIMMFGAVGTLISFIIISLGTIAFFPKMNMRLGVGDYLAIGAIFAATDSVCTLQVLSQDETPLLYSLVFGEGVVNDATSVVLFNAVQNFDLPHMSTAKAFELVGNFFYLFATSTVLGVLTGLLSAYIIKKLYFGRHSTDREVAIMILMAYLSYMLAELFDLSGILTVFFCGIVMSHYTWHNVTENSRVTTKHTFATLSFVAEIFIFLYVGMDALDIEKWRFVSGSMTTSAAVSATLLGLVLLSRAAFVFPLSFLSNLAKKSPLEKISLRQQIIIWWAGLMRGAVSMALAYKQFTREGLTVERENAIFITSTITIVLFSTVVFGLMTKPLINLLIPSPKLNRSVSSEPLTPNSITIPLLGESQDSVAELFSIRGQTSQGGEPVARPSSLRMLLTKPTHTVHYYWRKFDNAFMRPVFGGRGFVPYVPGSPTERSVRNWEEETKQ

SEQ ID NO: 12736 - protein, 515 aa, Mycobacterium abscessus
MAASGTHRFLPRTHQHLVSDLASLVSAELHGPSATTVGGVTLRAQDARTGDLFAALPGTSTHGAQFASEAVSAGAAAVLTDAAGAELVAGQGLDIAVLVHPVPRSVLGELAATVYGEPSRHLQVVGVTGTSGKTTTTYLVEAGLRAAGKRVGLIGTVGVRIDGEDVPSALTTPEAPALQELLAEMVQRGVDTVVMEVSSHALALNRVDGTRFAVGAFTNLSRDHLDFHPDMQDYFATKARLFRRDSPQRAHRSVVCIDDDAGRAMAELAREAGPDVTTVSSLDGGVADWRCSNVAVGHDGGQRFVANGPDRDTELTIALPGHYNVANCLVAIAILDVLGVSAATAAPGIATAGVPGRMEAVAAGQPFLAVVDYAHKPGALRAVLESLRSHRDGRLAVVFGAGGNRDRGKRADMGKVAAELADLVVVTDDNPRNEEPAAIRTEIISGTTGSEAQIIEIGDRRAAIDFATLWARPGDTVLVAGKGHESGQKTGDVTVPFDDRVELRAALEALGSLDD

SEQ ID NO: 12737 - protein, 332 aa, Glycine max
  misc_feature (273)..(273): Xaa can be any naturally occurring amino acid
MSSSTQDEISFVLRQFLLRSSVTTHESNDDARNSMSKTALPDGISAYKGSSAANVSSLSVAASENETDDFDCESEEEEVPTPPKSIRSRSSSKRNRVAEVHNLSEKRRRSRINEKLKALQNLIPNSNKTDKASMLDEAIEYLKQLHLKVQMLSMRNGLSLHTMFFQEGLQPLQLSQVPRMDSGEESRLIPSNPTASLPMHQENPMHYLSNLPNKLAMADQQSVPTPSYIINSETSFRLESPIPENIRSFQLRRFPEMCREDILQHQHLNANHXDTNPLGTLATSSLSFDMQTSAVKDNSTLENGIIGSDQSKVIPRNSEPNIVLTPRLSGML

SEQ ID NO: 12738 - protein, 491 aa, Mycobacterium abscessus
MTVAEIAEIVGGRLDGISAQEARQARVTGTVEFDSRQVSPGGLFLALPGARADGHDHARGAAEAGAVAVLAARPVGVPAIVVPPTGVARTEVSALEHDSDGSGAAVLAATAALAAEVARRLTARGLRIVGITGSSGKTSTKDLIAAVLSPLGEVVAPPGSFNNELGHPWTVLRATESTKFLVLELSARRPGNIAELAAIAPPSIGVVLNVGTAHLGEFGSRQAIADTKGELPQSLSGGGVAVLNADDAAVAAMAAKTPARVVRTSVHHPADIWATEVSVDDLARARFTLHAGQDSVPVQLAVHGEHHVSNALAAAAVALECGATLAQVAAALAGAGPVSRRRMEVSTRDDGVTVINDAYNANPDSMMAGLKALVSMARHGGEPRRSWAVLGEMAELGPDAISEHDRIGRAAVRLDVSRLVVVGTGRSQRAMHAGAVMEGSWGSEAVLVDDPAAAASLLASELAAGDVVLVKASRSAGLWVVADELLKVGDA

SEQ ID NO: 12739 - protein, 1140 aa, Adiantum capillus-veneris; identical to SEQ ID NO: 9377

SEQ ID NO: 12740 - protein, 459 aa, Methylobacillus flagellatus KT
MKIVDGRFTCQPGTPAEQLAAAKKFLADNHVKYVLAQFVDIHGVAKVKSVPAAHLESILKDGAGFAGGAIWGMGILPNGPDYMAVGDLSTLSLLPWQPGYARIICDGHVDQKPYEYDSRVVLKKQVERLSAQGWTLYTGLEPEFSLLRRDEKGALHPCDETDTLQKPCYDYKGMTRQAVFLERLTEALIAAGLDVYQIDHEDANGQFEINYTYADCLKSADDYILFKMAASHIANELGMTCSFMPKPFGNRPGNGMHMHMSIGDGNKSLFHDDSDSTGHGLSPLAYHFLGGILHHAPALTALAAPTVNSYKRLVVSQSLTGSTWAPAYISYGNNNRSTMVRIPYGRLELRLPDGSCNPYLTTAAVIAAGLDGVKRELHPGPGHSTNLFDLSLAEMKEQGIGILPQNLNESLDQLEANQVLRDALGNALTEEFIKLKRAEWVDYQRHVSDWEINRYIEFF

SEQ ID NO: 12741 - protein, 170 aa, Helicobacter pylori
GSGMHTHVSVWKNNENLFSGETYKGLSEFALHFLGGVLRHARGLAAFTNASTNSYKRLIPGYEAPSILTYSANNRSASVRIPYGISKNSARFEFRFPDSSSNPYLAFGAILMAGIDGVKNKIDPGEAMDINLFKLTLDEIREKGIKQMPHTLRRSLEEMLADKQYLKESQ

SEQ ID NO: 12742 - protein, 735 aa, Saccharomyces cerevisiae YJM789
MGEFKPPLPQGVGYAIVLGLGAVFAGMMVLTTYLLKRYQKEIITAEEFTTAGRSVKTGLVAAAVVSSWIWCSTLLTSSTKEYADGIFGGYAYAAGACFQIIAFAILAIKTKQMAPNAHTYLELVRTRYGKIGHGCYLFYAIATNILVTSMLLTSGSAVFSDLTGMNTIASCFLLPVGVVVYTLFGGIKATFLTDYMHTCVIIIIVLVFAFKVYATSDVLGSPGKVYDLVREAAKRHPVDGNYQGEYMTMTSKSAGILLIINLIGNFGTVFLDNGYWNKAISASPAASLKAYAIGGLAWFAVPSLISLTMGLACLAVETSPNFPTYPDPLTSFQANSGLVLPAAAIAIMGKGGAVASLLMIFMAVTSAMSAELIAVSSVFTYDIYREYIDPRASGKKLIYTSHVACIFFGLAMSGFSVGLYYGGISMGYIYEMMGIIISSAVLPVVLTLCSKDMNLVAAVVSPILGTGLAIMSWLVCTKSLYKELTVDTTFMDYPMLTGNLVALLSPAIFIPILTYVFKPQNFDWEKMKDITRVDETEELVQADPDIQLYDAEANDKEQGEETNSLVSDSEKNDVRVNNEKLIEPNLGVVISNAIFQEDDTQLQNELDEEQRELARGLKIAYFLCVFFALAFLVVWPMPMYGSKYIFSKKFFTGWVVVMIIWLFFSAFAVCIYPLWEGRHGIYTTLRGLYWDLSGQTYKLREWQNSNPQDLHVVISQISARAHRQSSHFGQVDEII

SEQ ID NO: 12743 - protein, 624 aa, Lactobacillus johnsonii NCC 533
MSKVIGIDLGTTNSAVAVLEGKEPKIITNPEGNRTTPSVVAFKNGEIQVGEVAKRQAITNPNTIVSIKSHMGEEGYKVKVGDKEYTPQEISAFILQYIKKFSEDYLGEKVTDAVITVPAYFNDAQRQATKDAGKIAGLNVQRIINEPTASALAYGLDKDENDEKVLVYDLGGGTFDVSILQLGDGVFQVLSTNGDTHLGGDDFDQRIMDWLIQNFKEENGVDLSNDKMALQRLKDAAEKAKKDLSGVSSTHISLPFISAGEAGPLHLEADLTRAKFDELTDDLVQKTKVAFDNALSDAGLTVNDIDKVILNGGSTRIPAVQKAVKDWAGKEPDHSINPDEAVALGAAIQGGVISGDVKDIVLLDVTPLSLGIETMGGVFTKLIDRNTTIPTSKSQIFSTAADNQPAVDVHVLQGERPMAADDKTLGRFELTDIPPAPRGVPQIQVTFDIDKNGIVNVSAKDMGTGKEQKITIKSSSGLSDEEIKKMQKDAEEHAEEDKKRKEEVDLRNEVDQLIFTTEKTLKETEGKVPETETKNVQDALDALKKAQKDNNLDEMKEKKEALSKAAQDLAVKLYQQNGGAQGAAGQAGPQGPQNGGQPNNDNGSDNGQGGSTVDGDFHKVDPDK

SEQ ID NO: 12744 - protein, 170 aa, Helicobacter pylori
GSGMHTHVSVWKNNENLFSGETYKGLSGLALHFLGGVLRHARGLAAFTNASTNSYKRLIPGYEAPSILTYSANNRSASVRIPYGISKNSARFEFRFPDSSSNPYLAFAAILMAGIDGVKNKIDPGEAMDINLFKLTLDEIREKGIKQMPHTLRRSLEEMLADKQYLKEGQ

SEQ ID NO: 12745 - protein, 170 aa, Helicobacter pylori
GSGMHTHVSVWKNNENLFSGETYKGLSELALHFLGGVLHHARGLAAFTNASTNSYKRLIPGYEAPSILTYSANNRSASVRIPYGISKNSTRFEFRFPDSSSNPYLAFAAILMAGMDGVKNKMDPSEAMDINLFKLTLDEIREKGIKQMPHTLRRSLEEMLADKQYLKEGQ

SEQ ID NO: 12746 - protein, 1644 aa, Physcomitrella patens subsp. patens
MWVRSPENGSPAQEYDSPSRSQVSDETDYSQDDWRINGHAELEAERHAVIRPEMTLKRKRVPIEAYAGSNSAPRHDADSNDEEEEEDDYDVRQDYYEESHPNRGDSYDEPAKDFYHDQSGGGLYREPSAEGSYREHYQGGSYLEQSAGGSYHEQSGGDSYREHSDEHSYREQSEGGSYRDQSEERSYHEQSGGSDHEIGPQRPQSHQKAFHLKSAASLPSNMEKGPGTYLVLEDGVEFQIPQYYDELALSLHLPPFNALQIEEKVVYGRLKATAFFAIMDADPWAQLWRKQYEMGECRGKCFDKENKRRLLEKRRFGLQVIDSSVMMNPPPVEYHDEEVGVTSEVGSLGESLVIYRQISTDSGQSRRCEVKVLEHGDGYEIVERRKPKIEPVKRDPEEVALEDSEKIGRYWVNLVRKDLPRHHKYFVAYYKKQIQDVKRVAEICQREVKSRNVRSLKVMKAAPVRTRRLARDMIIFWKKWDKEQIEVRKREEKEAAEALKRDQELREAKRQQQRLNFLLTQTELYSHFMQNKTSNTTAAQASQDALRDLDTNMNSEEGSLSVEDAEEEAALKEEAVRAAKLAAAQQRNRTNDFDSESERLRTAAGGDEAGEGAEDMDLLHPSTMPTTSSVQQPKMFQGILKEYQLKGLQWLVNCYEQGLNGILADEMGLGKTIQAMAFLGHLAEEKNIWGPFLVVAPASVLNNWADELNRFCPDLRILPYWGALNERIKFMMGFSYFREAGFHVLITSYQLLVSDEKYFRRVKWQYMVLDEAQAIKSASRIEGHAEHGGTLNEHQLTRLHSILKPFMLRRVKKDVITEMTSKKEVMVPCYLSSRQQAFYRAIKNKISVADLFGNGGQLNDKKVLNLMNIVIQLRKVCNHPELFERNEGQSSVHFAAVPHSLPPPPFGELEDVHYAGGLNPVSFKIPKLLYRDGMRCLPTESSGSTQGFVEKWLKARLSVFSPDYVYSSSVGDSKRTDFDERSSRSGAFGFIRMLGLSAAETSFLARAPCLESCLFALLQLQESFSVECYGDLSKIKVLNEHRTAVHSNGSSAGNHLRSSMDSFDNDDSRDAKTRCVQRMLMLPSRADSHFLRTKHPSGPELKPFESLVVLHQDRLLGTTKLLRSVRNYMLPVRAPQIDVSCSDRGFMLQRTEELENPKMKRFLVGFGRTSENNGPSMPLPLSAPIEESDVRARLIQPLSAIPFRIFGSAPPLQSFDFAKMLTDSGKLQTLDILLKRLRAGNHRVLLFAQMTKMLNILEDYMNYRKYKYLRLDGSSTIMDRRDMVNDFQHRSDIFVFLLSTRAGGLGINLTAADTVIFYESDWNPTMDLQAMDRAHRLGQTKEVTVYRLICTGTVEEKIMKRASQKNTVQQLVMTGNNASQGDVLEAEEVVSLLLDDAELEAKMKEQVSKQVDKHGRRKKGWAVAGSLKGVRLDAEGGGASLDDVNTALTGIVESGGAATVPDAAPDSNALAVPANGRKRRRNGEEKPPKPPKMPKPAKEPKPPRSRKEPKPVRPPKEPRERKPREPRDPTTKPRQRFKKGSLGPSESNFPSPSLAGEENGDGCAGSSVPENGYSLDGGENHRVNGDRAGLEEKVFSARLGTTLQQILIWNEHSIGELSCPCLTIEKGIRGLGLATICFHAMREA

SEQ ID NO: 12747 - protein, 418 aa, Debaryomyces hansenii CBS767
MAKRRQKTRTHKKVSEEELAKIPRSMVIRLGSSLRNHSLSQLVKDFRNIMQPHTAINLRERKSNKLKDFIVMAGPLGVSDLFIFNQSEETGSISLRIGKMPRGPTLQFRVNNYSLIKDVSRILKHPKSVGKDSPEFLNPPLLVLNGFLNKLNEVENHEKLLITVFQNMFPPIQPQLTKVSSIKRVLMVNKNAETGEIDLRHYAIDTKLVDGSRNVKKLLNSHHNLKKSLPNLSANSDVSDLLLDPYSVGGITSDSEVEDDAIVEIKNSEDANVLKKKTASEEKETANPQTRKRAIKLTELGPRINMTLMKIEENLTGSSKTLYHANINKSEAEQNELNRKHELRQKQKAERRAKQQANVDAKEETKKAKKERRKARQNGEEPEQGEDEPMTESDSDSDAPEIKAEDYENDSDLYSDVE

SEQ ID NO: 12748 - protein, 170 aa, Helicobacter pylori
GSGMHTHVSVWKNNENLFSGETYKGLSELALHFLGGVLCHARGLAAFTNASTNSYKRLIPGYEAPSILTYSANNRSASVRIPYGISKNSARFEFRFPDSSSNPYLAFAAILMAGMDGVKNKMDPGEAMDINLFKLTLDEIREKGIKQMPHTLRRSLEEMLADKQYLKEGQ

SEQ ID NO: 12749 - protein, 436 aa, Dichelobacter nodosus VCS1703A
MPPEDDITLTSLPAEKGDNHIPFEELTNFVDIFDVIKRYYVEPIDNGTLIENAIRGMLVRLDPHSTYMNEREYHDFIEESEGVYAGVGVILDVKDGSVRVITAVADSPAAKAGIKTGDIISQVDGQSLNDMSSSEINQIFNGEEGTDVTLTIQRDETLFKIKLTREIIYVTSVSSSLLNDNFAYLRITQFQEDTAINVAKEIESLQVKSPLNGLILDLRNNGGGLLDSAVETADLFLDHGNIVSIRGRDYEEKFDAEAGDLLNGKPIVVLINEGTASASEVLAAALQENNRALSIGQNTFGKGSVQTVKTLYHGGAIKLTTYRYYTPSGQSIQATGITPQIPIGSLKLQTQKKNIDDKESNLPRHLEASNAIAPSPKSNTESLAMQDFALYEAINILTAMQLMNKLTPAATTTPENGSKPKPEPSAGTIKTQKNYW

SEQ ID NO: 12750 - protein, 158 aa, Azotobacter vinelandii
MRDPLFGIPLDDQPRTLADFPGRAWLVVNTASRCGFTPQYEGLQMLWQRYRERGLVVLGFPCDQFGHQEPGNELEIAEFCQLRYGVDFPLFQKVEVNGPRAHPLFVELKKRAPGLLGSQRVKWNFTKFLIGREGRVVRRFAPATGPRELCGEIEALLE

SEQ ID NO: 12751 - protein, 1405 aa, Debaryomyces hansenii
MVKPLIPEDVSLNPELYGLRRSHRERRGPAIVESDISDEDDVDNKPTRKKKKKYNDEDGFEDGFDDDDDDEDNDEDEDDEFVVSTKKRKSNGKASKSTKKKSNTPTMSEIRFSSRNSKQVNYTVDYDEDDADLLESGPEFDHDEEDDEANGDYYYYQQAAEAEDERGIDQVMDHKINEDNAELTNEPKLDYLFKVKWSDASHLHNTWESWSTLKDFKGFRKVDNYIKQFIIMDREIRNDPLTTKEDIEAMDIDLERRRDEQNEYTEVERIVDSERAEVDGESQLQYYCKWKRLYYDECSWENAEEIARIAPEQVTRYQQRLKSKILPNLSANYPSNQRPRFEKLVKQPLFIKNGELRDFQLTGLNWMAFLWSRNENGILADEMGLGKTVQTVSFLSWLIYARRQNGPHLVVVPLSTVPAWQETFEKWSPDLNCIYYLGNTESRRNLRNYEFYQGNNKPKFNILLTTYEYILKDRNELGAIKWQFLAVDEAHRLKNAESSLYESLKSFKVTNRLLITGTPLQNNIKELAALCNFLMPGKFNIEQEIDFESPDDQQEQYIKDLQKKIQPFILRRLKKDVEKSLPSKTERILRVELSDLQTDYYKNIITKNYSALNAGNKGSQISLLNVMSELKKASNHPYLFDGAEERALAKANSNARDNVLRGIIMSSGKMVLLEQLLTRLKKEGHRVLIFSQMVRMLDILGDYLSIKGYQFQRLDGGIPSSQRRISIDHFNAPDSKDFAFLLSTRAGGLGINLMTADTVVIFDSDWNPQADLQAMARAHRIGQKNHVSVYRFVSKDTVEEEILERARKKMILEYAIISLGITDPSSTKSKTEPSANELTQILKFGAGNMFRENDNQKKLEDLNLDEVLNHAEDHVTTPDLGESNLGSEEFLKQFEVTDYKADIEWDDIIPQEELSKLKEDEKKKADDEFLQEQISMYSRRKAAVRKLQDGSENVSEDEVADSDNQRKARKRNDENYQLSEKEIRGIYRSILKLGDLTGKWEQLVEDGSISNKNPVLIKHAYNEIINISKQLVKEEEARRTKVLAELERKAMESKDKNVVTVDGSSPMALWVAKKKEKRAVLFEYQGVKNINAELVLARPQDMKLLESLISKENPTSFEIPKPPKQVSSWNCEWDTKDDSMLLVGVYKFGYGSWVQIRDDPVLGLQNKLFLDSANSKESKEDKSAKKVPGAVHLGRRVDYLFTLLKEGDETPNGNASNNTTTKKKVRRVKNETPTPAVKKKPTKSQSPEVNKKPKHKKLLPKDSPTSSSANSPKDPNGHAHTHTHAHAHVKEEPPADNDLEYESMDEAECKNTLKPVSKSLMRLHKGNKGFEKAEWANILRKELLTIGDFIDQTTGSKDKHSDKLKKHLWSYASLYWPAKVPSKKINDMYNRVKVQVRAPKEPKNS

SEQ ID NO: 12752 - protein, 446 aa, Erythrobacter sp. SD-21
MKFAALVRSAALVTAVALVPATTAGMARVDGSAGPEFSKLFAVYQRVKASYVEPVEDDVLINGAISGMLTALDPHSAYLDGSDLQRLETMIDGNYSGLGLSVVGEDGAVKVISPFRGSPADKAGIKAGDYITHLDGELIYGLELDEAVARMRGQAGTSIRLTVFRPGAEEPLEVDVTRGVIELEPVTWELQDGNIGHIMINEFSRDVGSDVFAAWKDLQEQATGRLNGLVLDMRSNPGGSLDEAVALSDLFLSKGQIVSQRGRARGESITYDAETVFRGDIAEGLPIVVLIDAGSASASEIVAGALQDHRRAVVMGQRSFGKGSVQSLLPLGRDAALKLTTARYYTPSGHSVQEGGIKPDIKVPQLTDPDLAKRSKFTMRESDLRGHLINELGIKDEELENDTRSDPRFQLTAEELEERGIEDFQLHYAVQTLRRTSPSAVASRKK

SEQ ID NO: 12753 - protein, 753 aa, Hordeum vulgare subsp. spontaneum; identical to SEQ ID NO: 9404

SEQ ID NO: 12754 - protein, 223 aa, Mycoplasma mycoides subsp. mycoides SC
IKNNQKLIIMCCENGIRVSSLFKSYFSNLNNNIYFVDVLVDRIVSNKNILNDYLECEDYYLWIVDKTQLPRDFKQVPNLTYTTSLDIQITKKIYMLNALHCSLAWFVFKNFSFNKYLYVYQALKNDKVVEFVNNYLNEVILVLNHKYNINLDELNNYKNQIIKRLNSNFIKDDLKRLARNTELKLSKNERILTILDYAKDNNLKHDILLLSYQNGLEYLKNNK

SEQ ID NO: 12755 - protein, 561 aa, Bacteroides fragilis YCH46
MKKFLNRRNGVLLAAVLVAVAFFSFKSGDDRNFQIAKNLDTFNSIVKELDMFYVDTLDPNKTVREGIDYMLSSLDPYTEYYPEDDQAELQQMLNASFGGIGSLITYNQKLKRSMIAEPFEGTPAAKVGLKAGDILMEIDGKDLAGKNNQEVSQMLRGAVGTSFKLKVERPDEKGGTRPLEFDIVRQTIQTPMIPYDTIFNKNVGYINLSTFSGTPSKDFKKTFLKLKKEGITSLVIDLRGNGGGRLEEAVEIANFFLPRGKVIVTTKGKTKQASNTYKTLREPLDLDIPITVLVNGATASASEILSGAFQDFDRAVIVGSRTFGKGLVQTTRPLPYGGVMKLTTSKYYIPSGRCVQAIDYKHRNEDGSVGTIPDSLTTVFHTAAGREVRDGGGVMPDIEVKQEKLPNILFYLVRDNLIFDYATQYCLKHPSIPSPQEFKVTDADYNDFKAMVKKADFKYDQQSEKIMKTLKEAAKFEGYLDEASEEIKALEKKLTHNLDRDLDYFSKDIRSMIADEIIKRYYYTRGGIIQQLKDDDGLQAALKILADPVKYKETLSAPVKK

SEQ ID NO: 12756 - protein, 232 aa, Aristolochia liukiuensis; identical to SEQ ID NO: 9408

SEQ ID NO: 12757 - protein, 481 aa, Oceanobacillus iheyensis HTE831
MKSQEVVLLPHLNKRVVKDITGFKLCSYLVALEGWRRGLNLTWYNDETSKCKLDRLNSSTHGKFYSLSDGSKTHYFFRSRGDKVTNKAVRICQDKEETKSYLQKSNVPIPLGKVLEEDNDIINYANEIDYPVIIKPLKGSMGKGVYTNINSEEELKGILKELRSKFSHKEYLVEKHYPGEEYRIYVVGDQVIGATNRKPANIIGDGKHTVQKLIDLKNEERKKNPYLSPKPIEADYEITFMLERVGYDLNSVPEKGEQVILREKSNLSSGGDPIEATDELSPSVRQIAVDALKALPSIPHGGVDIIVDPSDPSNGVVLEINATAEIGFHPFPLIGESKDVPAAIIDYYFPETKGKYRSPFYFDYLSLLEPLKSWAVEELKVVETPKKDVYARKYIVTGQLNKVGYMTYIRRQALRRNLYGYAKKITKNEVEIYLISENQKSVEDFKKFVQKGSRKSIVKHIEDKEVEFSGKPTKVGFRIIS

SEQ ID NO: 12758 - protein, 225 aa, Arabidopsis thaliana
MVSFCELCGAEADLHCAADSAFLCRSCDAKFHASNFLFARHFRRVICPNCKSLTQNFVSGPLLPWPPRTTCCSESSSSSCCSSLDCVSSSELSSTTRDVNRARGRENRVNAKAVAVTVADGIFVNWCGKLGLNRDLTNAVVSYASLALAVETRPRATKRVFLAAAFWFGVKNTTTWQNLKKVEDVTGVSAGMIRAVESKLARAMTQQLRRWRVDSEEGWAENDNV

SEQ ID NO: 12759 - protein, 613 aa, Listeria monocytogenes EGD-e
MSKIIGIDLGTTNSAVAVLEGGEAKIIPNPEGARTTPSVVGFKNGERQVGEVAKRAAITNPNTISSIKRHMGTNYKETIEGKDYSPQEISAIILQYLKSYAEDYLGETVDKAVITVPAYFNDAQRQATKDAGKIAGLEVERIINEPTAAALAYGMDKTETDQTILVFDLGGGTFDVSILELGDGVFEVHSTAGDNELGGDDFDKKIIDYLVAEFKKDNGIDLSQDKMALQRLKDAAEKAKKDLSGVTSTQISLPFITAGEAGPLHLEVTLTRAKFDELTHDLVERTIAPTRQALKDANLSASDIDQVILVGGSTRIPAVQETIKKELGKEPHKGVNPDEVVAMGAAIQGGVITGDVKDVVLLDVTPLSLGIETMGGVMTTLIERNTTIPTSKSQTFSTAADNQPAVDIHVLQGERPMAKDNKTLGRFQLADIPPAPRGIPQIEVSFDIDKNGIVTVRAKDLGTGKEQNIVIKSSSGLTDEEIEKMVQDAEANAEEDKKNKENAELRNNADQLVFTVDKTLKELEGKVEEEEVKKAEAARDELQEALKGEDFDAIKEKTESLNEIVQNLSVKLYEQAAAEQQAAGGAEGQEAPQNDDVVDAEFEEVNDDDKENK

SEQ ID NO: 12760 - protein, 554 aa, Oceanobacillus iheyensis HTE831
MVDNRFLESLTHDIPEKANNYMLSTYSIILEAWRRGLDINIRILKEKSGSIEPYYSISNGDKVHHFSATRGDLVSKEAKELTKNKVTTKQILNKYKVPTPEGKEFEEEATTEEIISYATAIDYPLVVKPVSGTGGKGVIAGIQNEEELVEALEYVREKLNSPRIILEKYFEGEDYRIYVIDGQVIAALKRIKANIIGNGNDTIKNLIDKKNKYRSQLPSLTNRPIKVDDETKTLIRRAGYTMDSVLPDGELLYIKTKNNVSAGGDSIDITEQLSESIKQIAIDATNCFGSLPHCGLDLMVDEANDKAVIIEINSRAHITQHLFPMEGQARDIPGSLIDFYFPETKNYNRLDSFKMFIDFEYIYDSCISREAAEIRIPKKPEGPILLTRYLINGVKLTDKFAARVKRLAYNTQVSGYIKPLNNGDISIIVGGNENKIEQFKKSLNKYLPKFSKKYEITAKKRTTPIPHGFHIHDNKAQDSNNAVSASTNEYMKKYSNLQSDYQQLIRKVAEYEKRERLLEITQKQNKQLKKRLKLMENSTSWKITKPIRKLTRKK

SEQ ID NO: 12761 - protein, 550 aa, Oceanobacillus iheyensis HTE831
MKERPLGISLPHLTNEITRNARKTRLDAFAVALEGWRRGLKLKWYTKDSEHFQDMIIFGVNPPGRLFSLSSEEQTHYFFRTRGDLVSNEAVDIGSEKDDTKIYMEKAGVPIPLGKGFEPESTNEEIIEYSKTLGFPLVLKPTNASLGNGVVTNIKNEEQLIKALHYVRTELDYKEVVVEQYVSGKEYRVYVVGDEVVAAYNRVPANIIGDGEHTIEELISMKNNVRKQNARLNSCLIHMDVEILEFIEEAGYSLQSVPDKGKVIYLREKTNVSSGGDPVDVTDSLPEEYKKIAIDALKAVPDFPHGGVDIIVNDRGDLKGAAVVIELNPTAQIGGALYPIEGKARDIPKAIVDYYFPETKGQVDTRKSKVYFDLITLLEPLENRAALEVEVAPAPIGELYAKQYIVKGNVQRYNFHKWLKQQAIQHNLHGYVKSIVFDEIEIVVASTDKKTVEGFKDIIQGYPQGSSISKIKEEVYEDPITVGFEISEQYNTNNVRSVQHALRKMDRDLQRMRKLKNRADKDLKHILRSSSWKYTEPVRKLGGLIKTKNK

SEQ ID NO: 12762 - protein, 159 aa, Paulinella chromatophora
MSVNVSNSVVKRSNGSDLCLGEYTGKVLLIINLASRCGFTRQYAGLQKLQDDYGAEGLKVLGFPCNDFGNQEPGTVEKIQEFCSTVYGVNFEIFDKVSALENKSAPYDLLTQSEPFEEIAWNFEKFLIDKKGYVIGRYKSGIEPDDAGLVSDIVSALNT

SEQ ID NO: 12763 - protein, 232 aa, Aristolochia manshuriensis; identical to SEQ ID NO: 9412

SEQ ID NO: 12764 - protein, 539 aa, Oceanobacillus iheyensis HTE831
MNENNAEWLSHLSEDIVADAHGNLLDSYVIALEGWRRGLKLRWHVKDSEKFSEMRTWFVDRPGQLFSLSSKQNTHYFFRTRGDKVSNDAVDIGKDKERTKKILSENGVRVPDGKQFKKEITNQEIIEYAGQVGYPIVIKPTDGSFGRGVISNITSSSELEYSLDYLRNELGYQDIILEQFIPGKDYRLYVVGDKAVAAMHRMPPNIIGDGVNTVRALIDIKNNERKLNPRLVSCLIKADDESINYIGRQGYTLESVPENGEQVYLNSKGNISLGGDPIDVFDELPQHVKDYAVKAVQAVPGLAHGAVDMICDPDTNESYIIELNPTSQLGGLLYPIQGKSRDIPNAIIDYYFPETISDKKKTNTYFDFHDVLDPLQNRDAVVTTVTPCPQEKIYMKKYIVTGNVQELGYHRGLRKQAFERFLHGYIMKMDNGDLEVVVGGADPEMVDDFKHAFWEDEERAQVMEVSEENYDEPIKVGFEIKTDLKTQLEELKMYKQELEVTERALKKAEVERRKYYESFSWKATTPVRAVGSMFKKLKK

SEQ ID NO: 12765 - protein, 1039 aa, Synechocystis sp. PCC 6803
MATIHGNWQPSHGENGGKLFLWADTWGHPLPETIGDRHPFALDLPDLLQAWSNLPLAFPKADGVTEAALTLHLPSHRQQKIPLPFVTGQDPVAMDAKYLHWRSWQVTGVNLTPSQTLTLLQSIPLGGQALANLGSEFYFYGQLHRWCLDLVLRGKFVPGLEQRGEDGNYYAQWIPILDSIQDQTHLAQFSQRVPACALANLTDSQEPQMLVVDLLQKLLQAQIGAVSPSLANVKEVWLNDWLRGLTHGGQTSLGTGKALQRLATSLDHWYLPVQNYLGQKNNQALAQRQWRGALRLQPPADDGGGTWQLDYGLQALDDGEFWLPAASLWAMAGDRLVWQGRRVDQGAESLLRGLGVAAQIYEPIAASLTERCPTGCGLDAIQAYEFILAIAHQLRDRGLGVILPPGLERGGTAKRLGVKVVGEVQRQRGQRLTLQSLINYDLQLMMGSGDNARLLTAKDFEALLAQKSPLVVLDGEWITLQPADVRAAKVILQQQQSAPPLTVEDALRLSIGDLQTVSKLPVTQFAARGILQELIDTLRNPEGVKAIADPPGFQGTLRPYQARGVGWLAFLERWGLGACLADDMGLGKTPQLLAFLLHLAAEDMLVKPVLIVCPTSVLSNWGHEINKFAPQLKTLLHHGDRRKKGQPLVKQVKDQQIVLTSYALLQRDFSSLKLVDWQGIVLDEAQNIKNPQAKQSQAARQLPAGFRIALTGTPVENRLTELWSILEFLNPGFLGNQSFFQRRFANPIEKFGDRQSLLILRNLVRPFILRRLKTDQTIIQDLPEKQEMTVFCDLSQEQAGLYQQLVEESLQAIADSEGIQRHGLVLTLLTKLKQVCNHPDLLLKKPAITHGHQSGKLIRLAEMLEEIISEGDRVLIFTQFASWGHLLKPYLEKYFNQEVLYLHGGTPAEQRQALVERFQQDPNSPYLFILSLKAGGTGLNLTRANHVFHVDRWWNPAVENQATDRAFRIGQTRNVQVHKFVCTGTLEEKINAMMADKQQLAEQTVDAGENWLTRLDTDKLRQLLTLSATPVDYQAEASD

SEQ ID NO: 12766 - protein, 159 aa, Pseudoalteromonas tunicata D2
MASIFDFTAPLTNGEHCDLAQFKGKPLLIVNTASKCELTPQYFALEQLYQKYKDQGFTVLAFPCNQFENKEPAENDEIKHFCELQFGVSFPIFAKVAVNGPDALPLFNFLKTNSRGLMQARAIKWNFTKFLINRTGQVVARYAPRTKPDAISSVIESIL

SEQ ID NO: 12767 - protein, 448 aa, Streptococcus agalactiae A909
MTITAEDIRREVKEKNVTFLRLMFTDILGVMKNVEIPATDEQLDKVLSNKAMFDGSSIEGFVRINESDMYLYPDLDTWIVFPWGDENGAVAGLICDIYTAEGEPFAGDPRGNLKRNMKRMQEMGYKSFNLGPEPEFFLFKMDENGNPTLDVNDKGGYFDLAPTDLADNTRREIVNVLTQMGFEVEASHHEVAVGQHEIDFKYDDVLKACDNIQLFKLVVKTIARKHGLYATFMAKPKFGINGSGMHCNMSLFDNEGNNAFFDPEDPRGMQLSEDAYYFLGGLMKHAYNYTAIINPTVNSYKRLVPGYEAPVYIAWAGRNRSPLIRVPASRGMGTRLELRSVDPTANPYLALSVLLGSGLEGIENKIEAPEPIETNIYAMTVEERRQAGIVDLPSTLHNALKALEEDEVVKAALGTHIYTNFLDAKRIEWASYATYVSQWEIDNYLDLY

SEQ ID NO: 12768 - protein, 447 aa, Lactobacillus sakei subsp. sakei 23K
MARKMLTAEAIKQLVDQENVKFLRLMFTDINGIIKNVEVPISQLDKVLSNKMMFDGSSIDGFVRIEESDMYLRPDLSTWLIFPWEAEHGKVARLICSVYTADGEPFLGDPRNNLKKMVREMQDKGFKDFNIGPEPEFFLFKLDEIGKPTLKLNDQGGYFDFAPVDLGENCRRDIVLELEKMGFEVEASHHEVAPGQHEIDFKYADAVDAADNIQTFKLVVKTIARKHGLHATFMPKPLHGVNGSGMHINMSLFNQDGTNAFFDENGKEQLSETVYHFLAGLLRHARAITAINNPTVNSYKRLVPGFEAPVYVAWSGHNRSPLIRVPQSRGLSTRLELRSVDPSANPYLAISSILAAGLSGLEQGLSPEAGVDRNIYSMDETERKENHITDLPSTLHNALKELAKDDIIKDSMGTYLYQSFMDSKSLEWAAYRQQVSEWEREQYLELY

SEQ ID NO: 12769 - protein, 169 aa, Nicotiana sylvestris
MASQSSKPQSIYDFTVKDAKGNDVDLSIYKGKVLIIVNVASQCGLTNSNYTDLTEIYKKYKDQGLEILAFPCNQFGGQEPGSIEEIQNMVCTRFKAEYPIFDKVDVNGDNAAPLYKFLKSSKGGFFGDSIKWNFSKFLVDKEGNVVDRYSPTTTPASMEKDIKKLLGVA

SEQ ID NO: 12770 - protein, 170 aa, Helicobacter pylori
GSGMHTHVSVWKNNENLFSGETYKGLSELALHFLGGVLRHARGLAAFTNASTNSYKRLIPGYEAPSILTYSANNRSASVRIPYGISKNSARFEFRFPDSSSNPYLAFGAILMAGIDGVKNKIDPGEAMDINLFKLTLDEIREKGIKQMPHTLRRSLEEMLADKQYLKEGQ

SEQ ID NO: 12771 - protein, 162 aa, Saccharomyces cerevisiae
MTTSFYDLECKDKKGESFKFDQLKGKVVLIVNVASKCGFTPQYKELEELYKKYQDKGFVILGFPCNQFGKQEPGSDEQITEFCQLNYGVTFPIMKKIDVNGSNADSVYNYLKSQKAGLLGFKGIKWNFEKFLVDSNGKVVQRFSSLTKPSSLDQEIQSLLSK

SEQ ID NO: 12772 - protein, 1129 aa, Saccharomyces cerevisiae
MAYMLAIANFHFFKFYTRMRKKHENNSCNEKDKDENLFKIILAIFLQEKKKYDCISSGSIMTASEEYLENLKPFQVGLPPHDPESNKKRYLLKDANGKKFDLEGTTKRFEHLLSLSGLFKHFIESKAAKDPKFRQVLDVLEENKANGKGKGKHQDVRRRKTEHEEDAELLKEEDSDDDESIEFQFRESPAYVNGQLRPYQIQGVNWLVSLHKNKIAGILADEMGLGKTLQTISFLGYLRYIEKIPGPFLVIAPKSTLNNWLREINRWTPDVNAFILQGDKEERAELIQKKLLGCDFDVVIASYEIIIREKSPLKKINWEYIIIDEAHRIKNEESMLSQVLREFTSRNRLLITGTPLQNNLHELWALLNFLLPDIFSDAQDFDDWFSSESTEEDQDKIVKQLHTVLQPFLLRRIKSDVETSLLPKKELNLYVGMSSMQKKWYKKILEKDLDAVNGSNGSKESKTRLLNIMMQLRKCCNHPYLFDGAEPGPPYTTDEHLVYNAAKLQVLDKLLKKLKEEGSRVLIFSQMSRLLDILEDYCYFRNYEYCRIDGSTAHEDRIQAIDDYNAPDSKKFVFLLTTRAGGLGINLTSADVVVLYDSDWNPQADLQAMDRAHRIGQKKQVKVFRLVTDNSVEEKILERATQKLRLDQLVIQQNRTSLKKKENKADSKDALLSMIQHGAADVFKSGTSTGSAGTPEPGSGEKGDDIDLDELLLKSENKTKSLNAKYETLGLDDLQKFNQDSAYEWNGQDFKKKIQRDIISPLLLNPTKRERKENYSIDNYYKDVLNTGRSSTPSHPRMPKPHVFHSHQLQPPQLKVLYEKERMWTAKKTGYVPTMDDVKAAYGDISDEEEKKQKLELLKLSVNNSQPLTEEEEKMKADWESEGFTNWNKLEFRKFITVSGKYGRNSIQAIARELAPGKTLEEVRAYAKAFWSNIERIEDYEKYLKIIENEEEKIKRVKMQQEALRRKLSEYKNPFFDLKLKHPPSSNNKRTYSEEEDRFILLMLFKYGLDRDDVYELVRDEIRDCPLFELDFYFRSRTPVELARRGNTLLQCLEKEFNAGIVLDDATKDRMKKEDENGKRIREEFADQTANEKENVDGVESKKAKIEDTSNVGTEQLVAEKIPENETTH

SEQ ID NO: 12773 - protein, 345 aa, Vitis vinifera
MGDISCSNGNEVNGKSHSLAGYRKSCWYEEEIEENLRWCFALNRCVDKILKKLHKEAKEVTPFIWHFAYRSYAVPGHCTAGHEALWEGLKFYIRGIFKIYILYHTPALVIDGKLQSAEIDEFIYHESLVHPALLHHPNPKSIFIMGGGEGSTAREILRHKTVEKVVMCDIDEEVVDFCKSYLVVNREAFCDPRLELVINDARAELESREECFDVIIGDLADPIKGGPCYQLYTKSFYESTVKPRLSPGGIFVTQAGPAGVFSHTEVFSCIHNTLRQVFKHVVAYSAHIPSFADIWGWVMASDSPFLLNAEELDLRMKQRIKGENRYIDGKTFSSASTLSKVVRTS

SEQ ID NO: 12774 - protein, 200 aa, Salvia miltiorrhiza; identical to SEQ ID NO: 1083

SEQ ID NO: 12775 - protein, 635 aa, Haemophilus parasuis
MGKIIGIDLGTTNSCVAVMDGDKPRVIENAEGARTTPSIIAYTDKETLVGQPAKRQAITNPKNTLFAIKRLIGRRFTDSEVQRDIEIMPFEITKADNGDAWVSVKGEKMAPPQISAEVLKKMKKTAEDFLGESVTEAVITVPAYFNDAQRQATKDAGRIAGLEVKRIINEPTAAALAYGLDSKKENQIVAVYDLGGGTFDLSIIEIDNLDGEQTFEVRATNGDTHLGGEDFDNRLINYLVEEFQKEQGVDLRNDSMAMQRVKEAAEKAKIELSSAQSTEVNLPYITADATGPKHLVLTVTRAKLEALVEDLVNRSLEPVKVALADAGLSVSEINDVILVGGQTRMPLVQKKVADFFGKEPRKDVNPDEAVAIGAAVQGGVLAGDVTDVLLLDVTPLSLGIETMGGVMTTLIEKNTTIPTKKSQVFSTAEDNQSAVTIHVLQGERKRASDNKSLGQFNLEGINPAPRGMPQIEVTFDIDANGIINVSAKDKNTGKEQQIKIQASSGLSDAEIEQMVRDAEANAEADRKFEELVQTRNQADAIAHSTRKQIAEAGSNLADADKAKIEEAVAALEKAAKGEDKADIEAKIEALVKASEPLIQAGQAQAQQGQQQAQQSQKDDGVVDAEFEEVKDNKNL

SEQ ID NO: 12776 - protein, 386 aa, Arabidopsis thaliana
MGRVKLKIKKLENTNGRQSTFAKRKNGILKKANELSILCDIDIVLLMFSPTGKAAICCGTRSSMEEVIAKFSQVTPQERTKRKFESLENLKKTFQKLDHDVNIREFIASSNSTVEDLSTQARILQARISEIHGRLSYWTEPDKINNVEHLGQLEISIRQSLDQLRAHKEHFGQQQQAMQIENANFVKDWSTCSMQDGIQIPLEQQLQSMSWILNSNTTNIVTEEHNSIPQREVECSASSSFGSYPGYFGTGKSPEMTIPGQETSFLDELNTGQLKQDTSSQQQFTNNNNITAYNPNLHNDMNHHQTLPPPPLPLTLPHAQVYIPMNQREYHMNGFFEAPPPDSSAYNDNTNQTRFGSSSSSLPCSISMFDEYLFSQVTKTKLSQRF

SEQ ID NO: 12777 - protein, 289 aa, Francisella tularensis subsp. tularensis SCHU S4
MIANINNKKIFHETLYHSYHQSIAISEILYEHKTDYQHLVIFNNPIFGNVMVLDGIVQTTEKDEFIYHEMLVHVPVIAHGNVKNILIIGGGDGGMLREALSHKAVESVTLVEIDQAVIDMCQEYFPGHSKGAFDHPKAKIVIQDGCEFVKNPPRKYDLIICDSTDPIGPGEVLFTSKFYKDCKEAINPGGIMVTQNGVIYFQIDELKKTLERFEPLYKDVSFYTAAVPTYVGGSMAFGWGTDELSYRNHDIQVIAQRFLKSGIKTKYYNPAIHIAAFALPQYVIDTLKK

SEQ ID NO: 12778 - protein, 308 aa, Cyanothece sp. PCC 8801
MSGTEIKADLWVNEYITPWDIYSHGVTRILAYKKTQYQEMYIVESGAYGKALVLDGKWQSCTGDEFIYHEGLVQPGMISHQAVKKALILGGGEGATIREILRWKAIEKVMMIDIDGEVVDACKEYLPEMHQNCFDDPRVELKIDDALEVLDNMSEKWDLIVSDLSDPIEEGPSFPLFTKEYYEKLQKVLNPGGLVIIQAGQVAPPFIKYHARLVNTLKAVFPYVHPYFAPTPSYGSPWGFAIASHEPVNTVPDPIAVDQLLAEQTTGGLRLIDGQTLLGMLQTPLYIRQAIANYTEVYTLKEPPKFFS

SEQ ID NO: 12779 - protein, 183 aa, Xanthomonas axonopodis pv. citri str. 306
MSQTLYDIPVTRIDGQPTTLADYRGKVLLVVNVASKCGLTPQYEGLEALYRDKRAQGLEVLAFPANDFNGQEPGSEAEIAQFCQLTYDVTFPMFAKIAVAGDQAHPLYGALTSTHPHTTGEGPMREKLAGYGIAPNPAPGVVWNFEKFLIGRDGKIIDRFAPDIPADDARLRAAIDAALATRS

SEQ ID NO: 12780 - protein, 652 aa, Pneumocystis wakefieldiae
MIIIRIFLYKLFFWLNFLIFVLPRYGWAQKEESYGTVIGIDLGTTYSCVGVMQSGRVEILANDQGNRITPSYVAFTNDERLVGDAAKNQAPANPLNTIFDVKRLIGRRFDDVDVQADMKHWPFKVHHQDGKPHVIVNIAGEKKTFTPEEISAMVLRKMKEIAESYLGRTVTHAVVAVPAYFNDAQRQATKDAGTIAGLNVLRIVNEPTAAAIAYGLDKKEGERLIIVYDLGGGTFDVSLLSIEDGVFEVIATAGDTHLGGEDFDHQVMSYFKTIFHQKNGVRLDDDPKALGKLKREVEKAKRILSSQMSARVDIESLYQGIDFSETLTRPKFEEINMHLSKKTMKPVEQVLKDGNVKKSDIDDIVLVGGSTRIPKVQQLLEDYFDGKKVSKSINPAEAVAYGATVQAGILSLEEGVEDIVLVDVNPLTLGIETTGGVMTKLIARNTVIPTRKSQIFSPASDNQAVVLIQVFEGERPLTKDNNMLGKFELTGIPPAPRGVPQIEVTFEIDANGVLKVSATDKGAGKSESITIKNDKGRLSQEEIDRMIKEAEQFADEDRAQKEKIEARNSLESYVHTLRNQLNDAEGMGGKLKEEDKKTISDAVDETLKWLDQNSMTATTIDFEEKRNSLANIVMPITSKLYDTAKDEPSDEL

SEQ ID NO: 12781 - protein, 232 aa, Aristolochia moupinensis; identical to SEQ ID NO: 9435

SEQ ID NO: 12782 - protein, 608 aa, Bacillus sp. SG-1
MSKIIGIDLGTTNSCVAVLEGGEPKVIPNPEGNRTTPSVVAFKNGELQVGEVAKRQAITNPNTVISIKRHMGTDYKEKIEDKEYTPQEISAMILQHLKSYAEDYLGEKVEKAVITVPAYFNDAERQATKDAGKIAGLEVERIINEPTAAALSYGLDKMEEDQTILVYDLGGGTFDVSILELGDGVFEVRSTAGDNRLGGDDFDQVIIDYLVEQFKKENGIDLSKDKMALQRLKDAAEKAKKDLSGVSSTQISLPFITAGENGPLHLEVNMTRAKFDELSANLVERTMGPTRQAVKDAGLSVSEIDKVILVGGSTRIPAVQEAIKKELGKDPHKGVNPDEVVAMGAAIQGGVLTGDVKDVVLLDVTPLSLGIETMGGVSTKLIERNTTIPTSKSQVFSTAADNQTAVDIHVLQGERPMAADNKTLGRFQLSDIPPAPRGVPQIEVKFDIDKNGIVNVSAKDLGTGKEQNITIKSSTGLSDEEIERMVKEAEENSEADKKRKEEVELRNEADQLIFTTEKTIKDLGDKVEEAEVKKAEEAKDELKAAIEKDDLEEIRTKKDALQEIVQGLSMKLYEQAAQAQQQAQGAEGQAGGDDDVVDAEYEEVKDDK

SEQ ID NO: 12783 - protein, 488 aa, Haemophilus influenzae Rd KW20
MKKLTALFNLPELKNDIELHNMVLDSRKVKAGDLFVAIKGHQVDGNQFIDSALHSGASAVVSETELSSEHLTVAFIGNVPVVKYYQLAHHLSSLADVFYDSPSNNLTLVGVTGTNGKTTISQLLAQWAELLGHRAAVMGTIGNGLFGQIVEAKNTTGSAVEIQSSLSAFKHAGADFTSIEVSSHGLAQHRVEALHFKAAIFTNLTRDHLDYHQSMENYAAAKKRLFTELDTQIKVINADDEIGYQWLTELPDAIAVSMNADFKVGSHQWMKAINIHYHFKGADITFESSWGNGVLHSPLIGAFNVSNLLLVMTTLLSFGYPLENLLATAKSLKGVCGRMEMIQYPNKPTVIVDYAHTPDALEKALIAAREHCQGELWCIFGCGGDRDRGKRPLMAQVAEQFAEKIIVTKDNPRTESQSQIETDIVAGFKNMEKVGIIPDRAQAIQFAIESAVENDVILIAGKGHEHYQIIGSEVVHFSDQEIALDFLK

SEQ ID NO: 12784 - protein, 232 aa, Aristolochia westlandii; identical to SEQ ID NO: 9437

SEQ ID NO: 12785 - protein, 704 aa, Pseudomonas syringae pv. phaseolicola 1448A
MRYQLSSRRISMKQLFPSTALALFVGLSVLPMSASTFAANSWDNLQPDRDEVIASLNVVELLKRHHYSKPPLDDKRSAIIYQSYIKQLDPSRSYFMASDIAEFDKWQFQFDDFLKSGDLNPGFTIYKRYLDRIKARLDFALAELSKGVDKLDFNTKETLLVDRKDAAWPKDTAELDELWRKRIKDEVLRLKIAGKDPAKIQETLTKRYKNQQARLNQTRAEDIFQAYINTFAMSYDPHTNYLSPDSAENFDINMSLSLEGIGAVLQSDNDNVKIVRLVPAGPAAKTKQVAPADKIVAVAQGDKEMVDVIGWRLDEVVKLIRGPKGSVVRLEIIPASNAPNDQTSKIVAITREAVKLEEQAAKKSILHLKQDGKDYKLGVIDIPAFYLDFKAYRAGDPEYKSTTRDVKKLLTELQAEKVDGVVLDLRNNGGGSLQEATELTSLFIDKGPTVLVRNADGKVDVLEDEAKGAFYKGPMALLVNRLSASASEIFAGAMQDYHRALVIGGQTFGKGTVQTIQPLNHGELKLTLAKFYRVSGQSTQHQGVVPDITYPSLIDTKEIGESALPEAMPWDSIKPAIKPAIDPFKPFLAQLQARHEARSAKDAEFVFIEDRLALAKKLMNEKTVSLNEADRRAEHASIESKQLALENTRRKAKGEEPLKELKKEDEDALPVEDEKTKPEDDAYLAETGRILIDYLGLSAAVAKK

SEQ ID NO: 12786 - protein, 835 aa, Coccidioides immitis RS
MPGFTEDEVNKAAGADSENMTLERENRKPFDEDDEEGMDLKARALTKLLKTSSVFVAIMAEKMKEQRKRQQEEARKAEAKRRAAAERQKKPVEPAISTRRETRASQQQSKESETGTGRKDSLVGLQSSTPTRLPTRARTKKAAGGNSISNYFKKADVEIAEDNPTVQEALAKAADEFEANPATLGEQDLVATHQPALVTGGKMREYQLEGLEWLKSLWMNGLCGILADEMGLGKTVQAISLIAFFKEHSVSGPFLVAAPLSTVSNWVNEFARWTPGIETVLYHGTKEERAQIRRERMKMQHQKQMDFPVVCTSYEICMNDRKFLANYQWKYIIVNNIAELWSLLHFLLPEVFNDLDSFQNWFDFSSVLDASGQKDVIERRKKNLVSTMHAILKPFLLRRVKTDVETELPKKREYILYAPLTPEQKELYLAIIQGTSRQYLEDRAVERIESRNASVNPSRSHSLKRKANGSCNSTPNKSLKSSRDSTPGTGLTRSVRKRGKQNYREISDREFNAKLRMLENGIEEETPGESEVDESELLEIERAKTMKLAKKEIASKKLQNPIMQARLACNSPHNFYWPWDEESDIDESLVTASGKMLLLDRLVPCLLSKGHKVLIFSQFKTQLDILQDWAYLRNWNCCRIDGAVSQADRQAQINAFNADPDYKIFLLSTRAGGLGINLTAADTVILYDSDWNPQQDLQAQDRAHRIGQTKPVIVYRLATRGTVEQTLLERADSKRRLEKLVIQKGKFKNLFDVPLSEQNEVEELRKILGDDGFQVFDVGAGTRPESLLSKKELEILTDRSEEAYARAEKGLDRSGNAFLAVKSKREGDVTDMLER

SEQ ID NO: 12787 - protein, 667 aa, Vitis vinifera
MESSWRRRGSLIVAAIVCFGFLAAISIAKEEATKLGTVIGIDLGTTYSCVGVYKNGHVEIIANDQGNRITPSWVAFTDSERLIGEAAKNQAAVNAERTIFDVKRLIGRKFEDKEVQKDMKLVPYNIVNKDGKPYIQVKIKDGETKVFSPEEISAMILTKMKETAEAFLGKKIKDAVVTVPAYFNDAQRQATKDAGVIAGLNVARIINEPTAAAIAYGLDKKGGEKNILVFDLGGGTFDVSILTIDNGVFEVLATNGDTHLGGEDFDQRIMEYFIKLIKKKHGKDISKDNRALGKLRREAERAKRALSSQHQVRVEIESLYDGLDFSEPLTRARFEELNNDLFRKTMGPVKKAMEDAGLEKRQIDEIVLVGGSTRIPKVQQLLKDYFDGKEPNKGVNPDEAVAFGAAVQGSILSGEGGDETKDILLLDVAPLTLGIETVGGVMTKLIPRNTVIPTKKSQVFTTYQDQQTTVSIQVFEGERSLTKDCRQLGKFDLNGIPPAPRGTPQIEVTFEVDANGILNVKAEDKGTGKSEKITITNDKGRLSQEEIDRMVREAEEFAEEDKKVKEKIDARNSLETYVYNMKNQINDKDKLADKLESDEKEKIETAVKEALEWLDDNQSAEKEDYDEKLKEVEAVCNPIITAVYQRSGGAPGAGSDGGEDDDSHDEL

SEQ ID NO: 12788 - protein, 488 aa, Flavobacteria bacterium BBFL7
MRNLKDLLYKVSLELVIGPTDIDVEQVQFDSRAIRKGDVFIALKGTAVDGHQFIEKAVASGAVAVLLEDLPDYQAEHVTYIQVDNAHKALALIGANYYDNPSKDLKLVGVTGTNGKTTTTSLLYQLFKKLGFKTGLISTVEILIDGKVIPTKHTTPDPVTINSHLAAMRDAGVDYCFMEVSSHGIDQQRITGLHFVGGMFTNLTHDHLDYHNTFAEYRDVKKRFFDMLPSDAFALTNRDDKNGEFMLQNTKARKLGYALKTYTDYRAQIIENQFGGLQLKVNNQELWTKMIGEFNAYNVLAIYGCAIELGLESTEVLEAISQLDGVSGRFQYFTTAAQHITAIVDYAHTPDALKNVLETINAIRTRNEKLITVVGCGGDRDKSKRPVMANIAASLSDLIIFTSDNPRTENPDAILKDMEAGVEAIDFKKTLTVTDRKNAIKTAVQMAQQNDIILIAGKGHETYQEINGVRSDFNDRLIVADLLKQFNK

SEQ ID NO: 12789 - protein, 471 aa, Acidovorax sp. JS42
MAKTVADVMKMVKENEVKFVDFRFTDTRGKEQHVTVPISHFDEDKFASGHAFDGSSVAGWKGIEASDMLLMPDPNTANIDPFFEETTMIMACDVVEPADGKAYDRDPRSIAKRAEAYLKASGMGDTAYFGPEPEFFIFDGVRWSTDPNHTFYEIEEYEAPWNTGAKLEGSNRGHRPTTKGGYFPVPPVDSTQDMRAEMSLILESLGIPVEVFHHEVAGAGQNEIGTRFSTLVERADWTMLQKYVIHNVANAYGKTATFMPKPYHGDNGSGMHVHQSVWKDGKNLFAGDGYAGLSDFALYYIGGIIKHARALNAITNPGTNSYKRLVPHFEAPVKLAYSAKNRSASIRIPFVANPKGRRVEARFPDPLMNPYLGFAALLMAGLDGVENKIHPGEAATKDLYHLPPEEDKLVPTVCHSLDQALEALDKDRAFLTKGGVFTDSMLDAYIELKMQEVTRFRMAVHPVEYDMYYSL

SEQ ID NO: 12790 - protein, 1090 aa, Arabidopsis thaliana
MAENTASHRRKPRSLNDRHYSILQDLSAPPRQPPSSSHGEDEETKKSMIKLAGRRRLCKALPKEDEADGYDDPDLVDFYSPVKGETSLDSAGIGNKFTSWDESKEANTELAGEPNFSIITDFCSPSPQLKQKEEMQGDGGRNEIMGILDDLTSKLGTMSIQKKKDSQSNDFDACGVKSQVDKFDFEDAKSSFSLLSDLSKSSPDVVTTYNAGVNSIKDKQGKSGFAIREEQTSKEFSREWEERISNVGKQNSYSGRHFDDNSEDNRQGYNLDRGKSQCKEVDQSMKTTRHIEVSEKIRTVGRSNAAKLRDLDEDDDDDDCLILSGKKAAEMKINKPARSYNAKRHGYDERSLEDEGSITLTGLNLSYTLPGKIATMLYPHQREGLNWLWSLHTQGKGGILGDDMGLGKTMQICSFLAGLFHSKLIKRALVVAPKTLLPHWMKELATVGLSQMTREYYGTSTKAREYDLHHILQGKGILLTTYDIVRNNTKALQGDDHYTDEDDEDGNKWDYMILDEGHLIKNPNTQRAKSLLEIPSSHRIIISGTPIQNNLKELWALFNFSCPGLLGDKNWFKQNYEHYILRGTDKNATDREQRIGSTVAKNLREHIQPFFLRRLKSEVFGDDGATSKLSKKDEIVVWLRLTACQRQLYEAFLNSEIVLSAFDGSPLAALTILKKICDHPLLLTKRAAEDVLEGMDSTLTQEEAGVAERLAMHIADNVDTDDFQTKNDSISCKLSFIMSLLENLIPEGHRVLIFSQTRKMLNLIQDSLTSNGYSFLRIDGTTKAPDRLKTVEEFQEGHVAPIFLLTSQVGGLGLTLTKADRVIVVDPAWNPSTDNQSVDRAYRIGQTKDVIVYRLMTSATVEEKIYRKQVYKGGLFKTATEHKEQIRYFSQQDLRELFSLPKGGFDVSPTQQQLYEEHYNQIKLDEKLESHVKFLETLGIAGVSHHSLLFSKTAPIQAIQKDEEEQIRRETALLLGRASASISQDTVINGADYAFKPKDVNLDKRINISPVDDKELSESVIKARLNRLTMLLQNKGTVSRLPDGGAKIQKQIAELTRELKDMKAAERINMPQVIDLEEDISRKMQKGLNL

SEQ ID NO: 12791 - protein, 381 aa, Phaeosphaeria nodorum
HFGGGNIGRGFVAEFLHNSGYEVVFVDVMDSIIEALQKQSSYTVTEIGDDGEREFTIDHYRALNSKHEMDKVVQEIASADVVTCAVGPNILKFVAEPVAKAIDARTLDYPIAVIACENAINATTTWRGFIEGKLSEDSKSNLDKKARFANSAIDRIVPVQDKDAGLNVKIEKFYEWCVEQKPFENGGKKPDVKGIHYVDDLEPYIERKLFTVNTSHATAAYYGHQAKKQYIHEVLQDKKLHDIVRDAVKETAHLIVSKHGVSVQEQNDYVDSIIKRISNPVLKDNVERVGRAPLRKLSRKERFVGPAAQLAERGEKVDALLGAIEQAYLFQNVEGDEESAELAKILKENSAEEVVTKVNGLDKSHPLFEKILPIVKKVQGG

SEQ ID NO: 12792 - protein, 583 aa, Alnus glutinosa; identical to SEQ ID NO: 2450

SEQ ID NO: 12793 - protein, 170 aa, Helicobacter pylori
GSGMHTHVSIWKNNENLFSGETYKGLSELALHFLGGVLHHARGLAAFTNASTNSYKRLIPGYEAPSILTYSANNRSASVRIPYGISKNSARFEFRFPDSSSNPYLAFAAILMAGMDGVKNKMDPGEAMDINLFKLTLDEIREKGIKQMPHTLRRSLEEMLADKQYLKEGQ

SEQ ID NO: 12794 - protein, 1067 aa, Prochlorococcus marinus str. MIT 9211
MSLLHATWLPAMRTGSSHNPGLLIWADSWRVAKPSIVSNQPVIHPFALSAADLRIWLLQKKLLPKESIECTALLTLPSKSIKNSLDKKLNGVTDSQNTSDQPQWSGLPLQAGEPVTKQCEWWPWQVEGIAIKPSEAASWLANLPLTKKDPELSEEILWWSHLERWSLSLIARGLWLPQVELNTIDNIGARARWSPLLNNENERKRLEEFSIRLPLVATCAIKREETSEENQNHILKTTPRETLDEYGLAVCRPINSRLQVAYLLEELVDGQLRKDFEESSEDLDPLLKAWQEALGSHNGVIRLPLEDCERLAKASKNWKENLSGNVKGARACLELFAPLEGEDLWDLQFSLQAEADPSLKVAAEAVWNADSAVLQIGDIQIAQPGEILLEGLGRALNIFQPIERGLENATPNNMQLTPAEAFVLVRTASKQLRDIGIGVILPRSLSGGLASRLGIAIKAELATSARGLTLRENLEWSWELMIGGSILSLKDLEQLASKRSPLVRYKDSWLELRPNDLKIAEKFCSNNPELSLDDALRLTATKGETLMKLPVHQFNAGPKLQGVLEQYHQHTSPEPLAAPDGFYGQLRPYQERGIGWLAFLHRFNQGACLADDMGLGKTIQVLAFIQHLKSNKDLKKPVLLIAPTSVLTNWKREAYSFTPELSVLEHYGPNRSSTSTLLKKILKKVDILITSYGLLHRDKQLLKTIDWQGVIIDEAQAIKNPNSKQSQTTREIVKGGKIIPFRIALTGTPIENRVSELWSLMDFLNPSVLGEKEFFDQRYKLPIERYGDISSLTDLKARVSPFILRRLKSDKSIISDLPSKVELKEWITLSQEQRALYNKTVDNTLQEIARSPIGQRHAKTLGLLTRLKQICNHPALALKEKNISDDFGIRSTKLQRLEELLDVIFATEDRALLFTQFAEWGHLLQAYLEKKWGHSILFLHGGTRKIDRQSMVDQFQEDPRGPKLFLLSLKAGGIGLNLTRANHVLHIDRWWNPAVENQATDRAYRIGQKNSVMVHKFIATGSVEEKIDQMITEKSKLAENIIGAGEDWLGKLGINELRELVSLEKES

SEQ ID NO: 12795 - protein, 366 aa, Dioscorea elephantipes; identical to SEQ ID NO: 9452

SEQ ID NO: 12796 - protein, 1025 aa, Ashbya gossypii ATCC 10895
MSADDELGELGLEVVPHSELEQQIESNAQTLLDQKQYKLEQDRLERYEEKLKVLRQQQSSLGRKLRAATRISVRKKLQEQLDRLEAEDLPPVLQDIRDIKRRLREIGQDQKTDEPRSGGVRQAGESEKDYLVRTGRLTAFGNRTEFTLADDSTRADNRQASHGEEDGADATPESVPFPYTDEEDNSDSDSSGASAEGTADAAEDDGNELHYQRRLSGWLEQRKRSRGHDPHPGIPEWEKPHPTLPDAKLYDDFKIPADIFDKLFSYQKTCVQWLYELHQQNCGGIVGDEMGLGKTIQIVSFLASLHHSGKLKGPVLVVCPATVMKQWCSEFQTWWPPFRAVILHSIGAGMITRKKMTEEQLEELLMRDESNEFSYEQYANLGRTKKQLEARRGIESLVQKVVDDGHILITTYLGLQIHSDLLLHVNWDYAVLDEGHKIRNPDAGISLTCKRLRTPHRIILSGTPIQNNLTELWSLFDFIFPGKLGTLPVFQQQFANPINAGGYANATNIQVQTGYKCAVALRDLISPYLLRRVKNDVAKDLPKKNEFVLFCKMTQFQKEKYLQFLNSEDMIKIKNGRRQVLYGIDILRKICNHPDLLERDFRKHEPSFGDPRRSGKMTVIKQLLLTWKKQGHKALLFTQSRQMLDILEAYISHKDPELAGLQYLRMDGTTNIAHRQALVDRFNNGPYHLFLLTTRVGGLGVNLTGANRIIIFDPDWNPSTDLQARERAWRIGQKRDVTIYLLMVAGSIEEKIYHRQIFKQFLTNKVLSDPKQKRFFKMNELHDLFSFGPGAASDSFASEIEQQTASLRRQPAAHGTDDYDSVQRFEGVSKLEGFFNAKDRADREKDEDARLMDGLLGGGSLATAVQHDSVVQAHATPSDDIIAREAALVARNALAALRKSRALTKNYDVSTPTWTGKFGQAGRVKKKRRQPATSSAAIITALGNPPPATTPASTMSEEHARSLAQMRDFLQAQPGYFSTSVALIEHTGLKILTKQDLTQTRALLRTIATFDKTRSGWILKEEFRD

SEQ ID NO: 12797 - protein, 463 aa, Dioscorea elephantipes; identical to SEQ ID NO: 9455

SEQ ID NO: 12798 - protein, 450 aa, Synechococcus sp. CC9311
MRAKKSSIKASQRRTWFVALGAGAVTAAVVVANPGLGLPSTSSSSITNSPKEVIDQVWQIVYRDFLDSSGGYDLDQWSILRKDLLSKSYAGTAESYEAIRGMLASLDDPYTRFLDPKEFKEMQIDTSGELTGVGIQISLDKDTKEIVVVSPIEGTPASKAGVQPKDVIVSIDGQLTKGMTTEDAVKLIRGTEGSKVVLGLRRKGSVIDVPLTRARIEIHAVDSQLNTSANGTKVGYIRLKQFNANASKEMRAAIRELEKQGSQGYVLDLRSNPGGLLEASVDIARQWLDEGTIVSTKTREGIQDVRRATGNALTDRPVVVLVNEGSASASEILSGALQDNERGLLVGQKTFGKGLVQSVRGLSDGSGMTVTIAKYLTPKGTDIHKNGIRPDVPVEMSEKEIKTLTVEQLGTNKDGQYRVAETTLLKALQAPKTGKTYQPGEANLQSALQR

SEQ ID NO: 12799 - protein, 149 aa, Brassica napus
  misc_feature (137)..(137): Xaa can be any naturally occurring amino acid
WVRSLGLAKYEDVFLREEIDWDTLQSLTEEDLLSIGITSLGPRKKIANALSALREEACASSAEPQAQSLSNVTERQRERSTTRKASEPRKPTANKLITEFFPGQATDGIRKLPKEPVAEKSAADSGCRRAAVRRNGXNGKSKVVPQWNC

SEQ ID NO: 12800 - protein, 1438 aa, Oryza sativa
MPRRKGKGKGVEDEVEVYEPASPPERVLIILDSSEDDLDLQEVRRSLMITGRGRARAAERVGEEAPRGSGRRAAPVVASRRRRRRSRSRSRSPRAARPRAESSRRPTARRARARARSPSLEIIDVDSGSDRGVVRVKEEPRSGSDSDYNGARGRARARARAPVAATAAKKKKRKRGKEAPSRAQESREVVRVKEEPNSDGNGAGGRARARSPVAAAAKQRKRGGREAPSRAQESRVPVQIKEEPYSGSDSDGNVAGGRAVVPAADAKQGKRGKKTPSRGKGRRVVVRETSTPAAPSNGAPSVGRGKGRGPGRGRQRSKGAVRGRATPVNRVSTGVGSRTRSRLAEQGRAFAQEEEEQVEEREEEEEEEEQGRAFAQVKEEQVEEQEEDEEEGEEEMEMEVEVEVRSDDNDHGNGGIRGEGGGTDDVAEIEEEELGTDEDETSDDSDENFSDEEGDEEELEEEEEEEEEEDDDDDDEEEEEPGDAPDQPGEAGEESPPRSRIMAMPLMGKRMFEGFSFLQQVDTSTGRDIRARTRSNFKRKKLLDKKLLKRGTFAKPYCIDVSSSGSEEDVPQPEQSAYGGDCADDDGGSDGNEEHRAVKRRKLNRRQSAHSDSEEDTTFVCDVKEGSGSRRVQEGAPRRQVKKEGSNKKKDGSTPQCVRNNGPKVGRQTNGLNGQGGVSFKRNVKIAQRRKRRQATADQEKYGHLLDPMFNEIESNQYEPVPEEQIDRRLPLVFAFGDDDKLEEKSKHDKLQDEDELWKEFDFALESINVCSHNCEEGEKEDEQEIPADKAASCIQGKHELIIDEQIGLRCKHCNFVDLEIRFVLPSMVKSCTERDMRKDHELDLFFDDILTSAGYEGPRDFGGKKTGLVWDLVPGVREDMFPHQQEGFEFMWRKLAGGTSIEQLRNNANTIEGGCVISHAPGTGKTRLAITFVQSYFAFFPECCPVIIAPRGMLATWEQEFRKWKVKVPFHVLNSKEINWKEDRTIKQLAIMDENLAQSLARNKLDHKFRRKLKLASWRKGSSIIGVSYTLFRKLANQSSMDGNMVRNLLLEMPDLLVLDEGHTPRNKKSLIWKVLEEVRTKKRIILSGTPFQNSFLELSNVLYLIRPKFARHFASKSFKKIGLEDYWTSLTLNNITEKKIDEIRQILDPIVHIHNGDILQKSLPGLRESVVILNPLPHQKEIITAMENTVTMGTLDAEYKISLASIHPFLVTCAKLSEKETSSVDVSLLKSLRPNPCVGVKTKFVLEIVRLCEAMKERVLVFSQYLEPLSLIMDQLSKMFNWTEGEEILLMSGNVLVQNREALMEAFNDMKSNAKVMLASTKACCEGITLIGASRVVLLDVVWNPSVGRQAIGRAYRIGQEKIVYTYNLITEGTKEKDKYDRQAKKDHMSKLLFSKEPHAAGFNLSQEVIFNDKILEAMTSHRELKDMFVKILHSH

SEQ ID NO: 12801 - protein, 187 aa, Ginkgo biloba; identical to SEQ ID NO: 9458

SEQ ID NO: 12802 - protein, 466 aa, Hedyosmum sp. SM-2000; identical to SEQ ID NO: 9456

SEQ ID NO: 12803 - protein, 1098 aa, Spiroplasma citri
MKSFSLEYIRSLTRLATFNNAEQLYQTKKITLLKIDEQQTSDDEKELMIYCQVATKHSGDYYDVNVVFALSNNLTFLTRQNCSCIDYNFQHQICQHIIAVLLFAFYESNNNLLTWRLFFTATDQLLTTFINKNKQTYALKERIITCECNLIIDSTLQQPPAVQLKLGYEGEQLFVIKNIYHFLIFLTKHALDSDYIKGYKISQKFIFYPNKSTLSPFAEKVIKFLQQEFINVSSFLQTQKMDFYGVSITKSFGFSSSQTDQFLSHIKGETIKLIIDGEEYSDVKISVEQYQPSLSIQQKDNVIQIINKKENPIILTSSQQSLFDAKQIFLLNHKDTFLLGPIYQTMVLTKHNKIIFTPQQTNDVIKEIVALLDYPDNTIQIDPIILNSLEKTPLVIESYFDFKNKEIMLRPLFRYGAITFDLLNKSNNDNKIVLRNVYHEQEYLTFCKQLGFVQKGHYFILNELEHVLKLLSKDILTLEKLSQIFYTDNFKNVRLIDFKVTSSTINVNQNNDWLEFDFKLSKLDYSDLGEILNAINHNQKYYQLTNGSIIDLQEQTLQKFATLINQFNFKQEQFAQGKLQVSKYHALTVYNNLDLWAEFNCHFNLDFDHLITKIKHLEQNEFSVPTPLTSMMFDFQKKGYFWLKTLASLGFGGILADEMGLGKTLQTISFILKEYELNQQMAPVLIIVPAALIYNWKTEIDRFAPMLQTLVIAGERKKREMLFTKITQGQVVITSYPLLRRDIHYYQQIFFQYCFLDEAQHIKNPHSINAKLVNTLKTGIRFALTGTPIENNLTELWSIFNFILPGFLLQHQQFQKRYEIPIIREQNEAVKKELLQKIAPFILRRLKQGVMSELPPKIENKILVEMTVRQKKIYAAYANAAREEINKILTAGQYQQNRLKIFATLTKLRQICCDPSILDKKYQNESAKLDALRDIFDDLAGSGHKILIFSQFTTVLKRIKAIVEEIGLQYFYLDGKTRSESRVLMTEKFNEDKIINVFLISLKAGGVGLNLTAADVVIHFDPWWNPSVENQATDRAHRFGQQNTVQVIKLIAKGTIEEKILTIQNNKQEVINAVLNNNSESANFTKFSEAELRNILEL

SEQ ID NO: 12804 - protein, 170 aa, Helicobacter pylori
GSGMHTHVSVWKNNENLFSGETYKGLSELALHFLGGVLRHARGLAAFTNASTNSYKRLIPGYEAPSILTYSANNRSASVRIPYGISKNSARFEFRFPDSSSNPYLAFAAILMAGMDGVKNKMDPGEAMDINLFKLTLDEIREKGIKQMPHTLRRSLEEMLADKQYLKEGH

SEQ ID NO: 12805 - protein, 704 aa, Lactobacillus sakei subsp. sakei 23K
MAIIEAVILLVMLLIVANIIGHYVPRLPVSLIEIGLGLLVALLFSVEIPLKTDWFMLVFVAPLLFNDGRRFPKRELWALRGPIIGNAIFLVFVTTLIGGLAIHLLVPKLPLAASFALAAILSPTDPMAVQSISEQADLPPRVLHLVSGESLINDASGLISFKYGIAAAVTGYFSIQQAAGDFLYISIVGAIAGMLLMYAIHFIRLFMLQQGIEDVVFHTVLQLITPFVIYLVVEDLLHASGVIAVVVAGIISHASRNIYLDYLPELKLVTEQTWSIGVYLLNGLVFLILGIELPVAMRGTVHSPLINTGEEILLVLAVWGILILIRTCWTLSYLLYTNKSNPKQLKDNLKISVLSGLSGVRGAITMAGVLSVPTVLADGSPFPERGLMLFIAAGVIIVSLVMAIIFIPILTKVRTPIELRGTAHEDTNDETGLVPVDDQLLSEFDAKIYMYRVAVGTVESLRHIENNRAALDLIAEYQLMMRRFENQQNEQTEGDELPPLIAEELILRQVAFEGERQKLETLRSDGEITAKTYRRGKRKLRQKQIALSVIGSNFSWRHIQLMFYRGLTMLKRLIARLKTSQKSTAALTEWRTTEKEMAKAGIKQLSYFLKQPENRQHHYNRQVIYQIIIRYRNQIENMKNIGHTKTDIYEQQLQKLRIKALTSERLAIQELLEQHKISWELADELRKDINYAENALILADTDTE

SEQ ID NO: 12806 - protein, 205 aa, Xanthomonas oryzae pv. oryzae KACC10331
MNQTLYDIPVTRIEGGPATLADYRGKVLLVVNVASKCGLTPQYEGLEALYRDKRAQGLEVLAFPANDFNGQEPGSEAEIAQFCRLTYDVTFPMFAKIAVTGEQAHPLYQALTSTHPHTTGDGPMREKLAGYGIAPNPRARRVVELRKIPDRPRRQDHRPLRPGYPRRRCTPASGNRHGVGGLNLAILLGVSSACIAGEIALRCLS

SEQ ID NO: 12807 - protein, 468 aa, Geobacillus kaustophilus HTA426
MNVIQRWAAALLLFAAPFLAWSPPAEAAPASTKVLEEVRELVRQYYVEPVSDRVLKASTPQDIVKQLDPYSAYMTKQEYEEFLKWIDMESVGIGVMVEEDEDGVHILSVLDNGPAARAGLQPGDVIRAVDGQPVTNETMEKVLSLIAGEEGTTVAVTVWRPSTEETVSVTIKREKIDWPNVEFKRLAGNIGYIQLYSFDETAPGEIERAIRSLSGVKGWIFDLRDNQGGYVETAQKIAGFFPNVKQAFQLRDRSNHPEVYAAVKQPVQMTGPIRLLVNASSASASEMLAAAVKEQKAAVLYGQRTFGKGSMQEMFELSDGSMLKLTVAHFFSPKGTPIHNVGVKPDVPTVVGKELYAAHRDLLIGQLKGYQSLGKLRNAPVDKTFVVRFSRPLANTAVSGVKLYQLGGQEVAVTAQIRRGTELLIKPAAKLAKGQSYLLVIPPVLKSKDGVAMKKGAYMEIQTAASTK

SEQ ID NO: 12808 - protein, 397 aa, Hedyosmum sp. SM-2000; identical to SEQ ID NO: 9460

SEQ ID NO: 12809 - protein, 474 aa, Tropheryma whipplei TW08/27
MFENAKEAAEYIKSNQIEVLDVRFCDFLGAQHHFAVPAHAVDDEFFQSPQVFDASSLRGYADINHSDMLLVADPSTSYIDPFRHHKTLAMIFDVHDPRTGDVYERDSRNVAKKAEKYLAGCRFADTAYFAAEAEFFIFDDVRFKISNHSSSYSVDSEEGIWNSSRRKGGGNLGNQLKHKGGYAPLPPADQHADLRDDIMNALTKVGLRVEKGHHEAGSAGQGEINYRFNTLVNAADDLLKFKYVVKNTAHEWGKSATFMPKPIAGDNGSGMHTHQSLWKNGKPLFYSETGYANLSDIALWYIGGLLKHGPALAAFTNPSTNSYKRLVAGFEAPTSLVYSAGNRSAAIRIPPTIGAEGSKRIEYRVPDSSSNPYLAFSALLMAGIDGIKNKIHPGSPVEQNMYELTKEQSRDLRYLPSSLSDALRALEQDCDFLLEGNVFTREFISAWIDYKRKNELNRIAQYPHPLEFGMYYGV

SEQ ID NO: 12810 - protein, 465 aa, Heuchera canadensis; identical to SEQ ID NO: 9461

SEQ ID NO: 12811 - protein, 81 aa, Glycine max
HEGILREISRHSSVEHIDICELDQMVIDVYSEFFPDIAVGYEDPRVHVHISDGKKLNHLLLTCITNHTCLNKLCSLYNEAL

SEQ ID NO: 12812 - protein, 488 aa, Haemophilus influenzae R2866
MKKLTALFNLPELKNDIELHNMVLDSRKVKAGDLFVAIKGHQVDGNQFIDSALHSGASAVVSETELSSEHLTVAFIGNVPVVKYYQLARHLSSLADVFYDSPSKNLTLVGVTGTNGKTTISQLLAQWAELLGHRAAVMGTIGNGLLGQIVEAKNTTGSAVEIQSSLSTFKHAGADFTSIEVSSHGLAQHRVEALHFKVAIFTNLTRDHLDYHQSMENYAAAKKRLFTELDTQIKVINADDEIGYQWLTELPDAIAVSMNADFKVGSHQWMKAINIHYHFKGADITFESSWGNGVLHSPLIGAFNVSNLLLVMTTLLSFGYPLENLLATAKSLKGVCGRMEMIQYPNKPTVIVDYAHTPDALEKALIAAREHCQGELWCIFGCGGDRDRGKRPLMAQVAEQFAEKIIVTKDNPRTEPQSQIEADIVAGFKNMEKVGIIPDRAQAIQFAIESAVENDVILIAGKGHEHYQIIGSEVVHFSDQEIALDFLK

SEQ ID NO: 12813 - protein, 477 aa, Corynebacterium glutamicum ATCC 13032
MAFETPEEIVKFIKDENVEFVDVRFTDLPGTEQHFSIPAASFDADTIEEGLAFDGSSIRGFTTIDESDMNLLPDLGTATLDPFRKAKTLNVKFFVHDPFTREAFSRDPRNVARKAEQYLASTGIADTCNFGAEAEFYLFDSVRYSTEMNSGFYEVDTEEGWWNRGKETNLDGTPNLGAKNRVKGGYFPVAPYDQTVDVRDDMVRNLAASGFALERFHHEVGGGQQEINYRFNTMLHAADDIQTFKYIIKNTARLHGKAATFMPKPLAGDNGSGMHAHQSLWKDGKPLFHDESGYAGLSDIARYYIGGILHHAGAVLAFTNATLNSYHRLVPGFEAPINLVYSQRNRSAAVRIPITGSNPKAKRIEFRAPDPSGNPYLGFAAMMMAGLDGIKNRIEPHAPVDKDLYELPPEEAASIPQAPTSLEASLKALQEDTDFLTESDVFTEDLIEAYIQYKYDNEISPVRLRPTPQEFELYFDC

SEQ ID NO: 12814 - protein, 668 aa, Vibrio parahaemolyticus RIMD 2210633
MNCRSKVTLIAASLWLAASAQALEAKLHKDDLPVLAPEVQHETASKRVTSRFTRSHYKHFNLNDDFSKAIFERYVEMLDYNRNIFTQADIDSFKDWSIELDDQLKAGNNKIAFDVYNLSMQKRFERFAYAMTLLDKEIKFDNADEIELDRSEAAWPKDEAELNELWRKRVKYDALNLKLTGKEWPEIKEVLEKRYNNAMKRITQTNNEDAFQLYMNAFARQVDPHTSYLSPRNAEQFQSEMNLSLEGIGAVLQLTDDYTVIRSLVAGGPASKSKQLGEGDRIIGVGQDGEEIVDIIGWRLDDVVQLIKGPKGTKVNLQILPEGAGAKSYVVTIVRDKVRLEDRAVKSEIIEKDGKKIGVLEVPSFYVGLSQDTDKLLNDLKAKNVDGIIVDLRNNGGGALTEATALTGLFIKEGPVVQVRDSYGRIKVNADTDGLVSYDGPLTVLINRYSASASEIFAAAMQDYNRAVILGENSFGKGTVQQHRSLNHIYDLFDKELGYVQYTIQKFYRIDGGSTQNRGVAPDIAYPTPIDPSETGESVEDNALPWDSIDKATYQTFPDNDKLIANLTELHNKRIADEMEFRFINEDIEKYRKEKDDNMLSLNEKVRKDESDKAEALRLKRINERQTALGKKTFKSLDDVPKDYEAPDVYLDESVAIMVDMLKAPKQS

SEQ ID NO: 12815 - protein, 633 aa, Vibrio salmonicida LFI1238
MGKIIGIDLGTTNSCVAVLDGDTPRILENAEGERTTASVVAYTDGETLVGQPAKRQAITNPQNTLFAIKRLIGRRFEDEEVQRDIEIMPYKIIKADNGDAWVEARGQKMAAPQVSAEILKKMKKTAEDFLGEEVTGAVVTVPAYFNDAQRQATKDAGRIAGLDVKRIINEPTAAALAYGLDKKGGDRTIAVYDLGGGTFDISIIEIDNVDGEQTFEVLATNGDTHLGGEDFDNRMINFLVDEFKKEQGINLKTDPLAMQRVKEAAEKAKIELSSAQQTDVNLPYVTADATGPKHMNVKVTRAKLESLVEDLVVRTLEPLKVALADADLSVNEITDVILVGGQTRMPMVQAKVAEFFGKEARRDVNPDEAVAMGAAVQGGVLSGDVKDVLLLDVTPLSFGIETMGGVMTKLIEKNTTIPTKADQTFSTAEDNQSAVTIHVLQGERKQATYNKSLGQFNLEGIQAAPRGMPQIEVTFDLDADGILNVSAKDKSTGKEQKITIQASGGLTPEEIEAMVQEAEANKDADKKFEELVVARNQADQMIHGTKKQIEEAGDALPADEKEKIEAAIKALEDVKSGDDKEVIDAKTQELMQAAQKLMEIAQQKAQAQGADAGEQPKQEDDVVDAEFEEVKDK

SEQ ID NO: 12816 - protein, 973 aa, Schizosaccharomyces pombe
MSVNEDLSHLGVFSVDQENLERDVTNTASEYIAHESREIEKKRLQKVRKEISSVKEKIRRLDERIDSRLTKISVKENFRKQLSKFRDTLQSLQSDENDIKRRLNNEDSANAPGIGAFSTEELERQELIRTGKVTPFRNLSGLQKEVDFDDESSIREAVIKSEGTYYETAPHLSSEPSNIDHGIIPRDEKDEYVTVDAVTEKVVTAAIDDGDDLVYRQRLNAWCANRKELRDQASASENNKDRGEFEGKDEWLLPHPSKKGQTFEGGFTIPGDIRPHLFRYQVTCVQWLWELYCQEAGGIIGDEMGLGKTIQIVSFLSSLHHSGKFQKPALIVCPATLMKQWVNEFHTWWAPLRVVVLHATGSGQRASREKRQYESDASESEAEESKTSIKLRGASSSFHRYAKNLVESVFTRGHILITTYAGLRIYGDLILPREWGYCVLDEGHKIRNPDSEISISCKQIRTVNRIILSGTPIQNNLTELWNLFDFVFPGRLGTLPVFQNQFALPINIGGYANASNVQVQTAYKCACMLRDLISPYLLRRMKLDVAADLPKKSEQVLFCKLTPLQRKAYQDFLQGSDMQKILNGKRQMLYGIDILRKICNHPDLVTREYLLHKEDYNYGDPEKSGKLKVIRALLTLWKKQGHRTLLFSQTRQMLDILEIGLKDLPDVHYCRMDGSTSIALRQDLVDNFNKNEYFDVFLLTTRVGGLGVNLTGADRVILFDPDWNPSTDAQARERAWRLGQKKDVVVYRLMTAGTIEEKIYHRQIFKQFLTNKILKDPKQRRFFKMTDLHDLFTLGDNKTEGTETGSMFLGSERVLRKDNSSRNGNEAEDIPARDRKKHKIHDKGKKVNSSKVFEKMGIASMEKYKPPQESNVTKTNSDSTLGDDSVLDDIFASAGIQSTLKHDDIMEASQTESILVEKEATRVANEALRAVSSFRRPPRQLIPPQQSTNVPGTSKPSGPITSSTLLARLKQRR

SEQ ID NO: 12817 - protein, 471 aa, Fremyella diplosiphon
MTTPQEVLKLIQDQKIQMIDLKFIDTPGTWQHLTVYYNQIDESSFTDGVPFDGSSIRGWKGIEESDMTMVLDPNTAWIDPFMKEPTLSIICSIKEPRTGEWYNRCPRVIAQKAIDYLVSTGLGDTAFFGPEAEFFIFDDARFDQTANSGYYYVDSVEGRWNSGKDEGPNLAYKPRFKEGYFPVAPTDTFQDMRTEMLLTMAACGVPIEKQHHEVATGGQCELGFRFGKLIEAADWLMTYKYVIKNVAKKYGRTVTFMPKPIFGDNGSGMHCHQSIWKDGKPLFGGDKYAGLSDMALYYIGGILKHAPALLGITNPTTNSYKRLVPGYEAPVNLAYSQGNRSASVRIPLSGTNPKAKRLEFRCPDATSNPYLAFAAMLCAGIDGIKNKIHPGEPLDRNIYELSPEELAKVPSTPGSLELALEALENDHAFLTESGVFTEDFIQNWIEYKLVNEVKQLQLRPHPYEFYLYYDC

SEQ ID NO: 12818 - protein, 1164 aa, Arabidopsis thaliana; identical to SEQ ID NO: 8224

SEQ ID NO: 12819 - protein, 687 aa, Oryza sativa Japonica Group
MARPRRASTATTMQLGLLLAALLLFTSSLAGSVAAAAPPPPAGAKGGGAKSGGGGGTVIGIDLGTTYSCVGVYRNDRVEIIANDQGNRITPSWVAFTDGGERLIGEAAKNQAAANPERTIYDAKRLIGRQFSDAEVQRDMKLLPFAVVDRNGKPHVRVEVKDGDVRVFSPEEVSAMVLTRMKETAEAYLGEKVTRAVVTVPAYFNDAQRQATKDAGVIAGLTVDRIINEPTAAAIAYGIDKKGAEKNVLVFDLGGGTFDVSILAIDNGVFEVLATNGDTHLGGEDFDQRLMDHFVKVIRRKHGRDIAGDARALGKLRRECERAKRALSNQHQVRVEIESLFDGVDFSEPLSRARFEELNGDLFKKTMVPVRKAMADAGLGKGDIDEIVLVGGSTRIPKVQQLLKDYFGGKEPNRGVNPDEAVAYGAAVQASIISGHVDENTESMILLDVAPLTLGLETAGGVMTKLIPRNTVVPTKKTQVFTTYKDRQTTVTIQVFEGERSMTRDNRLLGKFDLTGIAPAPRGAPQIAVTFEVDANGILSVLAADKATGRSEKITISGDDRKISQEEIDRMVREAEEFADEDRRHREQVDARNSLEAYVYNVKSTLGGKMADAMEGEEKEKVEEAVREAHEWLDGNPDAGKEEYEEKLRELEDVCNPVMSAVYQRSGGGGGAPEDGNVDDEDDHDEL

SEQ ID NO: 12820 - protein, 171 aa, Gibberella zeae PH-1
MASATSFYDFKPLDKRGQEVPLADYKGKVVLIVNTASKCGFTPQYAGLEKLWTDLKGKYPDDFVILGFPCNQFGGQEPGTDDDIQEFCQLNYGVTFPIMQKTEVNGDGTNPLWVWLKDQQSGLLGLKRIKWNFEKFLVGRDGKVKGRWASTTKPESLEKPILEALAEKPAA

SEQ ID NO: 12821 - protein, 171 aa, Glycine max
MADGPASPGGGSHESGDHSPRSNVREQDRYLPIANISRIMKKALPANGKIAKDAKETVQECVSEFISFITSEASDKCQREKRKTINGDDLLWAMATLGFEDYMDPLKIYLTRYREMEGDTKGSAKGGDSSAKRDVQPSPNAQLAHQGSFSQNVTYPNSQGRHMMVPMQGPE

SEQ ID NO: 12822 - protein, 508 aa, Borrelia burgdorferi B31
MNKKLNEVLLKLDQDLIKCVKGSLDLEISGVTYSSKLVLPRFVFFALPGIHFDGHDFIEIAIQKGSNVVVCSRDVDFYSPNVTYIKVDDFNIRKFMSNFSNIFYDEPSKKLKVIGVTGTDGKSSVCYYIYLLFKKKGVKVGFISTVFFDDGSGSLIKNPYRQSTPESTEIHSFLSTMVKNEAQYAILESTSHGLDLETARLIDVNYFAVVFTNIGHEHLEFHGTIQNYLNVKLGLFRSVSDDAGFGVINLDDLYSSDFKNAVKKSFTYSLKSSKADFFVSFIDEKTDSTRFEFYHKGVKYLANVSLLGSFNVENVMAALILVSQILNIDIQDIVDKLNCIKSLDGRMDSINLGQNFSVIIDYAHTPGAFSKLFPIFKRFATNRLISVFGSAGERDVEKRFLQGQIADIYSDLIILCDEDPRGENSMCIIKDIAKGIVNKVENKDLFFIADRKQAIEKAISLAKAGDLVVALGKGHESSIIYKNREVFWNEQEVVKNAILSLEKSEKEK

SEQ ID NO: 12823 - protein, 116 aa, Avena fatua
SQVYQKYKDQGLEILAFPCNQFGGQEPGTNEEIVEFACTRFKAEYPIFDKVDVNGKEVSPLYKFLKSSKGGLFGDSIKWNFSKFLVDKEGRVVDRYAPTTSPLSIEKDIKKLLGTS

SEQ ID NO: 12824 - protein, 918 aa, Bacillus cereus E33L
MINQTEVTIRLQHVSHGWFLWGEDDSGTPLSVTSWKRNAFTWHSTSFYGTFLKEATFEGKQGVMLTNAQAFEYIANKPMNSFARIQMNGPITALTKDANELWDAFTSGSFVPDMERWPKQPSWKVQHTPIEDDTLASLFSAAVNESILQDNRSNDGWEDAKRLYEHYDFTKRQLDAALHEEDWLRKIGYIEDDLPFTIGLRLQEPQEEFEMWKLETIITPKRGAHRIYVYESIDSLPKRWHDYEERILETQEGFSKLVPWLKDGDTFRSELFETEAWNFLTEASNELLAAGITILLPSWWQNLKATKPKLRVQLKQNATQTQSFFGMNTLVNFDWRISTNGIDLSESEFFELVEQNKRLFNINGQWMRLDPAFIEEVRKLMNRADKYGLEMKDVLQQHLSNTAETEIVEEDSPFTDIEIELDGYYEDLFQKLLHIGDIPKVDVPSSLNATLRPYQQHGIEWLLYLRKLGFGALLADDMGLGKSIQTITYLLYIKENNLQTGPALIVAPTSVLGNWQKEFERFAPNLRVQLHYGSNRAKGESFKDFLQSADVVLTSYALAQLDEDELSTLCWDAVILDEAQNIKNPHTKQSKAVRNLQANHKIALTGTPMENRLAELWSIFDFINHGYLGSLGQFQRRFVSPIEKDRDEGKIQQVQRFISPFLLRRTKKDQTVALNLPDKQEQKAYCPLTGEQASLYEQLVQDTLQNVEGLSGIERRGFILLMLNKLKQICNHPALYLKETEPKDIIERSMKTSTLMELIENIKDQNESCLIFTQYIGMGNMLKNVLEEHFGQRVLFLNGSVPKKERDKMIEQFQNGTYDIFILSLKAGGTGLNLTAANHVIHYDRWWNPAVENQATDRAYRIGQKRFVHVHKLITTGTLEEKIDEMLERKQSLNNAVITSDSWMTELSTDELKELLGV

SEQ ID NO: 12825 - protein, 884 aa, Debaryomyces hansenii CBS767
MYKSGLRAAFKPPRRIDLSQSSLDAKSSSPAPINQCVDAKVSQDKEASPYRAASSELSRQAYKRPKIGSNVMKAEDSPSVLAPGPKDEESVRMYMVQWRKFTNKKNKTWDGDGLIVVSSSGITFKCDVKGNGNYKQMGKTSKTKTEGIIALGSYELEIDYEIADKTTLNNSQDVGQENKVPLHHIPAPPRNQFKKVVPLGISNAQSTARVSTSNRNPLYDPDAEHSLIMTRPPNKTREETIDVVVDPVLSRLLRPHQREAVSFVYECLMGFKNFKGNGALLADEMGLGKTLTTITLIWTLLKQTPYSEDISPICKKVLITCPVTLIGNWKKEFKKWLNINRIGVLTVNNKQNASKDKQEIKSFGKTRIYQVLIMSYEKVLSCQNELSTIDFDMLVCDEGHRLKNSSNKVLKVLNDMNISKKVLLTGTPIQNDLVEFYNIINFINPSVLGSFQSFQKDFIKPILRSREVNCINKDTIKRGEIKSNELIELTKEFTLRRTSSILSGYLTEKTDIILFCPPTELQIALFKFVLDSKKFNALLREDNNSLTLITLFKKICNSPSLLFQDKLFNSLIENEHDSTIDLTTLSKKTASSKVNILIPLLIEINQIGDKTVLISNYTQTLDLLETILHKLNISFLRLDGSTPNKLRDKLVNDFNKQPVLTNSVFLLSAKSGGVGLNLIGASRLILFDNDWNPSIDLQAMARIHRDGQTKPVFIYRIMTTGCIDEKIFQRQMMKNNLSDKFLDNKTDSKLNLFDMNDLKDLFTVNEETLSNTHDLLQCDCSGIGEDINPLSIDIDSDDADEETNNPGGWITALDYKQEDQKPKRQQASMINALIDYKHYNPVNVSEQLDCGDMVTKNIIQKSKERSMPIPITYMLTKVTNCTSV

SEQ ID NO: 12826 - protein, 348 aa, Populus trichocarpa
MNAVEASKDVSMSVNHMATEGSPLKNETKSESLARSRDEAKQGMGGSGNDSDEAEFSGGGGQDEPSMLEGNCRELSAKSLGSNKRKRNGQDAELDQAKGTPQSAEPAKGSPETQQKGDQKPTSTTSKDAGKQGKQGSLGSDQPKEEYIHVRARRGQATNSHSLAERVRREKISERMKFLQDLVPGCSKVTGKAVMLDEIINYVQSLQRQVEFLSMKLATVNPRLDLNIEGLLAKDVFDPKILQLHAVPPSSLAFSLEMPMAYPPSHPSQAGLIPTAFPGMNNHSDIICRTINSQLTPMTAGFKEPAQLPNVWDDELRNVVQMSYETSAPHDSQDVNKPLPPGHLKVEL

SEQ ID NO: 12827 - protein, 1403 aa, Nostoc punctiforme PCC 73102
MINLATDTTKLQIQLADKYFKLHPSIQKIIQLFSVIYAPIDKNSFVSCLSKIDALDENNKPWVTKTLSSQIDKLLKAGLLIQESRQGAECHPLLTEIATRHAVQTGQFETLVTAVEEKLPIRTHWNRDSRIFYNLRQCIREIRIGIYRQDLSFINQQIEAYQKYSDSEEKIVIEDIFEQIYNNPFDADWFNTLPQGLYESGISSILFNSALKLSASEDALMLLEEECSTPGKHCSDYLHLILTEQLLLQGCTQEAQESLGRISNEYQNNAAIFWGWLSFLRGDNEQAIKYYKDALKAIKKATGKRQIYFNTIGGLFFILALLKDGSAQSLREAEEYTSLMSRQSDHWLRFTYGRLKMVLQVHQGDITQKQFVVSGHISSVEEENSLQTLFCSLCLYWMDAESAKKRLLNLLEPLYRRSLASGYHWLAMETAELLSRLKPSSNYKQLAEALREDSNIQTIVDLIRPQEAWEMCLNALANLQKEPQTPGKPESELRLAWFITFYPSRCVLQPREQKVNAKGEWSKGRPIALKRLSSALSEFDYITPQDMRVCSCIEAYSDGYYGKVDYTFGEKAISALIGHPLVFWEDTLTIRVEIVKGEPELLVKKEKLGRLTLEFSPKLPESQNILHIKETPTRIKVIEITAEHRRIAEIIGIDNKLNVPAIAEKQVLAAINAVSGIVTVHSDIGGGSEGAEKVPAQTLPHIHLLPANAGLKISLLSRPFAQGGPYYRPGAGGETVIAEIDGKRLQTRRNLSEEKQLAKDAVAACATLTRTEEQDGEWIIEHLEDCLELLLELQELGNNVVIEWPQGEKLRVSHNADLKDFNLSIQRQQDWFAATGELKLNNDLVLDMQQLLELLEKTPSRFIPLGDGQFLALTQAFRKRLDELRMFSEKHSKGIRFHPLATLGLEDFVDEVGKVKADKHWKTHIQRLHEVKNLQPELPSTLQAELRDYQMEGFCWLARLAHWGVGACLADQMGLGKTLQALAVILRNAHEGPTLIIAPTSVCMNWVSEAQKFAPTLNIIQFSGANRQKLLDGLQPLDMLVCSYGLLQQEEVAQMLSQIQWQTIVLDEAQAIKNMTTKRSQAAMNLKSNFKLLTTGTPIENHLGELWNLFRFINPGLLGSFESFNQRFATPIEKYQDKLARNKLKKLIQPFLLRRTKNQVLEELPSRTEILLHVELSQEEKAFYEALRRQAISKLTESDAEAGKKHLQVLAEIMKLRRACCNPSLVMPGTELPSSKLQLFGEVLGELLENRHKALVFSQFVDHLHIIRDYLEQQGINYQYLDGSTSVAERKKRVDAFQAGSGDVFLISLKAGGTGLNLTAADYVIHTDPWWNPAVEDQASDRAHRIGQQRPVTIYRLVAKDTIEEKIVELHHHKRDLADSLLEGTEMSGKISTEALLQLISES

SEQ ID NO: 12828 - protein, 471 aa, Ralstonia eutropha JMP134
MAQSVADVMKLVKENDVKFVDFRFTDTKGKEQHVSVPTSHFDDDKFESGHAFDGSSIAGWKGIEASDMLLMPDSNTAFIDPFYEEPTLVLTCDVVEPSDGKGYDRDPRSIAKRAEAYLKSTGLGDTAFFGPEPEFFIFDGVTWNVDMQGCFVKVHSEEAPWSSGKEFEHGNSGHRPGKKGGYFPVAPIDTFQDMRSEMCLILESLGIPVEVHHHEVAGQGQNEIGTRFSTLVQRADWTQLQKYVIQNVAHTYGKTATFMPKPIVGDNGSGMHVHQSVWKDGQNLFAGNGYAGLSEFALYYIGGIIKHARALNAITNPGTNSYKRLVPGFEAPVKLAYSARNRSASIRIPYVANPKGRRIETRFPDPLMNPYLGFSALLMAGLDGVMNKIHPGEAADKNLYDLPPEEDAKIPTVCNSLDQSLEYLDNDREFLTRGGVFSNSMLDAYIELKMEEVTRFRMTTHPVEFEMYYSL

SEQ ID NO: 12829 - protein, 333 aa, Zea mays; identical to SEQ ID NO: 11657

SEQ ID NO: 12830 - protein, 493 aa, Aquifex aeolicus VF5
MSVSTALKLCIFFTGFAGIVAEYSLATLATYLLGNAVLQWSVVISIFLLSMGLGSHASRYIPDDKTPLAFVLAELFLSLLVPFSVPIAYHFANNFLHLQTVIYGLSFVIGSLIGLEIPLAVRINNMYEELKVNISSVLEKDYLGSVPAGLLYAYLFLPKLGLPLTAILAGFFNLISAFLLVKVLKPKKFLKFLAIFTFFLLATYAVGHKRITLYEEQKFYGEEIIHFEQTPYQKIVLTRFGKHYSLYLDGHLQFSTLDEKRYHETLVHVPASFLKRYEKALILGGGDGLALRELRKYPFGEIHLVDLDPKMIEFSKKNLVMRKINENSFYDTRLKVFSEDAFNFVKKTKEKYDFVIVDLIDPRTPSSARVYSLEFYMSLKNKLKEDGIFITQAGDTFYKREVFCSILKTIKKAGFYAYPLVVYIPTFGEWGMVIGSKEPLNFENFELKEKTEFLNRERALAFYTLGKSLECPNVEVNTLLKPVLIYYYYKIQN

SEQ ID NO: 12831 - protein, 349 aa, Oryza sativa Indica Group
MEGGGARNGSTTGAARTGGSGGDAAGGGGGGSAGNGKPLPPCCVKARAAAPESEAKCHATVVSGWFTEPRSRGGKTSKVQYYNNPMWPGEAHSLKVEKILYQGKSPYQEVLVFESSTYGKVLVLDGIVQLTDKDECAYQEMITHLPLCSIPSPKKVLVIGGGDGGVLREICRHGSVESIDICEIDQLVIDVCKDFFPDLSVGFKDPRVRLHVGDAVEFLRNAPEGTYDAIIVDSSDPIGPAQELVEKPFFDTIARALRPGGVLCNQAESMWLHTHLIQDMLSICRETFKGSVHYAWTSVPTYPSGVIGFLLCAKEGPPVNFLTPANPIEKLEGAMEAGRDIRFYNSEYY

SEQ ID NO: 12832 - protein, 196 aa, Glycine max
MSASRAPPAANPPDQIMHSMKRQLPFSSMKPPFVAAGDYHRHDAAEAIVVKTPLLKRKSEVADFEADSGDRMTAGFTEAANSPFQTPVSGKTGKGGKSSRLTKGNRVGTQTPGSNIGSPAGSNLTPAGPCRYDSSLGLLTKKFINLIKQAEDGILDLNKAADTLEVQKMRIYDITNVLEGIGLIEKRLQDRIQWKG

SEQ ID NO: 12833 - protein, 489 aa, Candidatus Kuenenia stuttgartiensis
MKLSEICAVLEKYKCNSFTEKVVLGLTHDSRKVKEGYIFVAIKGYKSDGHDFISMAIEKGAIAVVAEKGVDYVINVPQIVVPNARRALSLLSEYFYGYPSSKMTIVGITGTNGKTTTSFFTKSIIESSGNKAGLIGTIYYQLGSRIIPANETTPESVDIQSHLSDMLNNNIRYAVIEASSHALSQHRLDGVHFRSAVFTNLSAEHLDYHENIKNYREEKIKLMRGLDENASAVLNADHTSSKYFAKSTVAQIVWYGIKDTSAHVRAEIINMGVNGTRFLLISPWGKEVIHLKLTGNHNVYNALAAATTGFCLGFDMEIIRKGLESLNNVPGRLEKLDYGQDFHVLIDYAHTHDALQVVLETLRGIAARRIILVFGCGGDRDKGKRAKMGHIAEKYSDLFWITNDNPRSEDPLNIIREIQRGIKRDSCYKVQLDRKVAIEEALLEAKKGDVVVIAGKGHERCQILKDKSIPFDDCEVVKQVLSGTMVSQN

SEQ ID NO: 12834 - protein, 966 aa, Oryza sativa
MPANPKLAAKPSPSPPTAAAAASRPKATAKPPLGAGYRDNDDDDDDFQSPPRASSRAARALKPSGNGAASRRPSKRLKPSSSCCSGKENRPAAAGSGRAPAGRAASKGAGVGETLGVVSRVSSGVPGGDKARGGGICGLLRCGSDDFSSVSNGKKGLDRYWRRDGGLHSRPNPMDSTVSMPDATCDLENGGSQVAQMLSSNDRISVQLEGNAKVELGKSESDPTTMRKERNGSGACESDHPARLIEPRLLTLVTNCDFGGADSMDSKELGSAIHPSVSKDRNVENESGGASVCTFALHNRNCHSSCVESELEMLNAKYDLGPRDCKESQEGPGLCSLISEERTVAAEGDATFTFEERGNTSSGLEACKGSHCLDPVEPKLMDSCATHALEGDGCDDFEIGTQLNELINLCMEDYTEGPLSNKVACLEGNGMDCGSFNSSCEVQCPLCGSNISDLSEELRLVHTNSCLDGDKPAKEPNSDNQNEPCGESNVEKRRVMEWLRNLGLSKYEEIFIKEEVDWETLQWLTEEDLLGMGITSLGPRKKIAHALCELRKKNNDANDLAADMLNLENTKKAKIPMNGNKLITEYFRCPSSDQRQKKACKVNTPSNLNSQKKSNAKATGGRRTVKGKVKDTPIWCCIPGTPFRVDAFRYLRGDCCHWFLTHFHVDHYQGLTKSFCHGKIYCSSVTANLVHYKIGIPWDRLHVLPLNEKITIAGVNLTCFDANHCPGAVIILFEPSNGKAVLHTGDFRFSSEMANNRVLQSSPIHTLILDTTYCNPRYDFPTQEIVIQFVIEAIQAEAFNPKTLFLIGSYTIGKERLYMEVARLLQKKIYVGAAKLQILKHLGLPQEIMHWFTANEAESHIHVVPMWTLASFKRMKYLSTQYADRFDLIVAFCPTGWSFGKGKKRTPGRKWQQGAIIRYEVPYSEHSSFTELREFVRFISPEHIIPSVNNDGPDSANAMLAQLLND

SEQ ID NO: 12835 - protein, 665 aa, Oryza sativa; identical to SEQ ID NO: 12025

SEQ ID NO: 12836 - protein, 606 aa, Physcomitrella patens subsp. patens
MALQWIQKPLLAQFSIHSSHASAVRERLSSQSGLANFSFSHKPCSIPLTPSGRLSGRVGRSRLKMGFGDSKLTDRSFSLKSSTHEEAVLDQTDRMTLRKLLNEARVSPLSTEGDLDVEITGIQQDSRLVAPGDLFVCVKGLKSDGHQFAIQAIEKGAVAIISLMEVSLTEGLKAAVIVEDTSVILSALAGVIYGHPSKKLSVVGITGTNGKTTTSYLLQSLYEAMGLQVGLLGTIQYYIGGKNKLEADHTTPEALNLQNLMASMVQNGTEVCIMEVSSHGLVLGRCEDIEFDVAVFTNLTRDHMDFHKTEEEYRRAKGLLFAKMVDPERQRKVVNIDDPNVSYFVSQGNQDVPVVTFGMGDKSADVYPLAVKLSLVESEVLVRTPQGDVEISSRLLGRHNVYNILTAVAVGIAVGAPLEDIVRGIEAVDAVPGRCELIDEGQTFAVLVDYAHTPDAVARLLDTVRECGPKRIITVLGCGGDRDKGKRPIMAKIAADKSDVCIITSDNPRTEKPLDIIDDMLAGVGWSMEQYCKWEEDSSYPLLPNGHRLFCQEIRSKAIRAAVAMAEEGDAVVIAGKGHETYQIIGEIKGHFDDREECREALRLRK

SEQ ID NO: 12837 - protein, 435 aa, Heuchera canadensis; identical to SEQ ID NO: 9484

SEQ ID NO: 12838 - protein, 886 aa, Magnaporthe grisea 70-15
MGAVTKTSKTPRSMAKTTPARQVFTSASKKKPAPNASILSFFKKTPAPEETLFVGNEVSAAAFVAEEDLNDVDDPTAERFNEVDVPVKRRKLSCDDREKDAPAHAVVKEEDPVKDPRAKSPTSQPARKPTKKGPFLDDDDSDDDSDDSHHTDHDNRPAKRKIESPKRIPETDQESKALQPKESLLPVSPSATHNQNTDLIQEEQEHDDFGDNPEGPEWGDIDDADEAGEEGLERRYMEYQARIEAQEFETAITNSSDEVSGPTDGAECCPICFSSLAGVTAEQASVHVNSCLDGKPTPLPNQPKSNIPAPKTTKNSPPSEQNKVVESSKMSRRFAPAAIARPGQANPITLDAPATSASIGNTSAFSKLMSGHAENNAWAAAAAAEQSSRGRQAYERTCPFYKIMPGLSICVDAFRYGAVQGCNAYFLSHFHSDHYIGLTANWTHGPIYCSKVTGSLIKSQLRTAAKYVVELEFEERFVVPGTEGVVVTMIPANHCPGSSLFLFEKTLGKGSSARAQRILHCGDFRACPAHIAHPQLMPEVIDSISGKIKKQKIDICYLDTTYLNPRYSFPPQEVVIRSCAELCAALHRGLQEKDESVWTKILRRREGVSDNDVSRFFINSDGSGQSPTKKGSSSACNNHPSALTALNPKSRLLVVCGTYSIGKERICKAIAQALRTKIFASAHKIRIIAQLGDPELTALMTSNPAEAQVHMQMLSEIRPETLSDYLATYRAHFGRIVGFRPSGWNYRPAGTAANANASPSSVAMTTLLHGGNWRPQYASKDLVPQRGSTNEAMCFGVPYSEHSSFRELAMFIMSLHIEKVVPTVNVGSEVGRKRMKGWTDRWLAERRRGGLTRLIQDGEGEEGQAAEQNSRTLWDGKSNQGGDLRW

SEQ ID NO: 12839 - protein, 155 aa, Parasponia andersonii
VNKVFTEEQEALVVKAWAVMKKNSAELGLQFLKIFEIAPSAKNLFSYLKDSPVPLEQNPKLKPHATTFVMTTESAVQLRKAGKVTVKESDLKRIGAIHFKTGVVNEHFEVTRFALLETIKEAVPEMWSPEMKNAWGVAYDQLVAAIKFEMKPSST

SEQ ID NO: 12840 - protein, 578 aa, Houttuynia cordata; identical to SEQ ID NO: 9488
  misc_feature (481)..(481): Xaa can be any naturally occurring amino acid
  misc_feature (504)..(504): Xaa can be any naturally occurring amino acid
  misc_feature (574)..(574): Xaa can be any naturally occurring amino acid

SEQ ID NO: 12841 - protein, 155 aa, Zea mays
MERSLDSYSSIKDVAYSCGYCGYALNLSSSARDTEGIGPKYRKQIRKGVVAFVAVDESRFTLAHELTCTPYFRSARSWGLFRRRSRLLCRRCGGHIGSAYGKEEEEDSSSSSLFGGDGSSDDTRPSSGSGRSSVASSQKSYVVSSWCAVFFFQPG

SEQ ID NO: 12842 - protein, 415 aa, Hypecoum imberbe; identical to SEQ ID NO: 9493

SEQ ID NO: 12843 - protein, 125 aa, Synechococcus sp. PCC 7002
MAGSEVKADYWINEYITPWDIYSHGITKILAYKQTQFQEMAIVESGAYGKALVLDGKWQSCTGDEFLYHEPLVHPAMIAHGAPKKVLILGAGEGATVREVLRWQSVEKVMMVDIDGEVVEACKEF

SEQ ID NO: 12844 - protein, 854 aa, Cryptococcus neoformans var. neoformans JEC21
MKRPRFRVRKAFRKPKMPTVAEARDTWQKLKCHFNFFRIHLLVFTFIPIIAACIFYAANGSASGNANSGLTGRQKVTFIDSLFLCFSAMTTTGLCTVNLSALHPFQQVILFFLFIVGDYSFVSLIMVLVRKHYFRTHCEQLLINDLFRRIPTISYDTGAQGGLNYSSKSFKSTIKKLRGKNIAISGPIDGHKMDNFAEDGLVTAGDQEQHMMTDSPVDMTFEERGRRERAEASEIPADNQTPGPRVPSTLGKSTAALLNPANAAPPPATSSAQAEDHRSPFVDPLFQARQRLRTQTRAKSISAAQHGRSTSDHRPTPPHVTSDVPNHMGGGAIPPKRKNNVHIKDYSHHDQSQHPHLHTAAQIVTHHTIDPTRGLPIPFGHKNTGYGGFPSLLHIFHHFLPERAKQRLYRPVRRVGIVMHPTYAHEFENGHAGHEESWSEAIRGSVAKWMPEGLQGLVIGRNSRFWTEELDDEELEQIGGVEYRALKLLSSIVSSYIFLYQMIPFAILSIYFAKVDYWNSALLETAGEQAGTVNKTWFSLFLSASAYTGCGMVLTDEGLVPFQTCYLMIYVLIVALLVGNHALPIMLRFIIWIGTKITRKGVKHESLHFLLDHPRRCFLYLFPSHQTWYLLFILLAFTVVELFSFLVLNIGLPVVDSLGGWERFSDGLLQSLSVRASGFGIITISDMAPSVLFLYILLPCLSDLQMCTKSGRSDCTNMMIPIRQVKMNRNLKVTVEKSSGGFDLPVCLCKGNVSDIGLTHSWFTIFRIIFECTSGYGTIGLTLGTPNNNYAFSGEFGTASKLVMIVIMLRGRHRQFCFLESIPASSNPPKAYNQRYLTPIHLPVHRMKMIDRDR

SEQ ID NO: 12845 - protein, 497 aa, Chlamydomonas reinhardtii
MGEAGAALLLGLVVGLIMKAAHVGHTLAESVEFRGEIFFYVLLPTIMFDAGYGLDAKVFLRNVGSVCSFAFLGTTISTFVVGLIMWGFGRQGWCYQMTLLENLTFGALISATDPVTVLAVFQRLGAQPDLYMNVFGESVLNDAVGLVLFQVITKFLEGKAVTGPNVMAGAGDITLFLGPQHYNVWSYTALCLIALAASRAANIYPLSLLCNLLRPIERRITQKEQFMMWWSGLRGAMAFALAVEASESYGEAGQVMKTVTFYLIFITVLWNGGSASYLLEGPDDPFAATAAIAIASPPPASTTAHGYAIPGRHVGGANGANGGRPLSASGAAGTGSMKRTGSLLQRLQSINDGHRILGGFDRVHSKLTKLLVHPRALHEHEAASPSALGHALAHAASAAPALSHAPSAPPPLSPAAGSAAAAAGGSPPPASGTGASGSSGSTSGGAALARQVSAPPVQLDGGPRSSGSPLGAAPAPAAAQPASLAPVHERASVPEDQ

SEQ ID NO: 12846 - protein, 392 aa, Hypecoum imberbe; identical to SEQ ID NO: 9497

SEQ ID NO: 12847 - protein, 449 aa, Hyphomonas neptunium ATCC 15444
MRSLLTGTALGGVLGALTVGFAAMAWPQGQDAPAPPEDPRVATYQQIELFAEIFARAQRDYVVPIDEREAMESAINGMLTSLDPHSSYMDPEDFRSLQVQTSGEYGGLGIEVTMEDGFVKVISPIDDTPAERAGIQPGDYITEINGQPIIGQTLNDAVKEMRGEKGTEIEITILREGVDPFQVTLVRDVVQQKSVTWKKEANDIAYIRVSTFNERTGTLLEEAVEGINREIGARPKGIVLDLRNNGGGLLDEAVKVSDFFLSGGEVVSTQGRRPIDVERRNATKAEVFKDVPLVVLINGGSASASEIVAGALQDRGRALVVGTTSFGKGSVQSVIPLGADRGAIRLTTARYYTPSGRSIQALGIEPDIMITPVRLTEEELAKIQRFSEADLPHALANESGIERAKLRMPDEQPPEGFEGEDFQLDRALQLLQEGRASASRLAMQEDKAG

SEQ ID NO: 12848 - protein, 459 aa, Illicium oligandrum; identical to SEQ ID NO: 9499

SEQ ID NO: 12849 - protein, 491 aa, Staphylococcus epidermidis ATCC 12228
MNDHQKNHATSQDDNTKSTPSKNSKHIKIKLWHFILVILGIILLTSIITVVSTILISHQKSGLNKEQRANLKKIEYVYQTLNKDYYKKQSSDKLTQSAIDGMVKELKDPYSEYMTAEETKQFNEGVSGDFVGIGAEMQKKNEQISVTSPMKDSPAEKAGIQPKDIVTQVNHHSVVGKPLDQVVKMVRGKKGTYVTLTIKRGSQEKDIKIKRDTIHVKSVEYEKKGNVGVLTINKFQSNTSGELKSAIIKAHKQGIRHIILDLRNNPGGLLDEAVKMANIFIDKGNTVVQLEKGKDKEELKTSNQALKQAKDMKVSILVNEGSASASEVFTGAMKDYHKAKVYGSKTFGKGIVQTTREFSDGSLIKYTEMKWLTPDGHYIHGKGIRPDVSISTPKYQSLNVIPDNKTYHQGEKDKNVKTMKIGLKALGYPIDNETNIFDEQLESAIKTFQQDNNLKVNGNFDKKTNDKFTEKLVEKANKKDTVLNDLLNKLK

SEQ ID NO: 12850 - protein, 542 aa, Ipomoea nil
MAFGLSSLLQNSDLFTSDHASVVSMNLFVALLCACIVLGHLLEENRWVNESITALIIGLCTGVVILLLSGGKSSHLLVFSEDLFFIYLLPPIIFNAGFQVKKKQFFVNFMTIMLFGAIGTLISCSIISFGAVKIFKHLDIDFLDFGDYLAIGAIFAATDSVCTLQVLSQDETPLLYSLVFGEGVVNDATSVVLFNAIQSFDMTSFDPKIGLHFIGNFLYLFLSSTFLGVGIGLLCAYIIKKLYFGRHSTDREVALMMLMSYLSYIMAELFYLSGILTVFFCGIVMSHYTWHNVTESSRVTTRHSFATLSFVAETFIFLYVGMDALDIEKWKFVKNSQGLSVAVSSILVGLILVGRAAFVFPLSFLSNLAKKNSSDKISFRQQIIIWWAGLMRGAVSIALAYNKFTTSGHTSLHENAIMITSTVTVVLFSTVVFGLMTKPLINLLLPPHKQMPSGHSSMTTSEPSSPKHFTVPLLDNQPDSESDMITGPEVARPTALRMLLRTPTHTVHRYWRKFDDSFMRPVFGGRGFVPFVAGSPVEQSPR

SEQ ID NO: 12851 - protein, 125 aa, Brassica napus
  misc_feature (23)..(23): Xaa can be any naturally occurring amino acid
MGKKKCDLCDGVARIYCESDQAXLCWNCDGKVHGANFLVAKHTRCLLCTSCQSLTPWKATGLRLGPTFSVCESCVALKSAAAGGVGAGNGSENEEDRLGLIDDDAESYDDDEDEDEDEEYSDEDE

SEQ ID NO: 12852 - protein, 466 aa, Bacillus subtilis subsp. subtilis str. 168
MKRQLKLFFIVLITAVVASALTLFITGNSSILGQKSASTGDSKFDKLNKAYEQIKSDYYQKTDDDKLVDGAIKGMIQSLDDPYSTYMDQEQAKSFDETISASFEGIGAQVEEKDGEILIVSPIKGSPAEKAGIKPRDQIIKVNGKSVKGMNVNEAVALIRGKKGTKVKLELNRAGVGNIDLSIKRDTIPVETVYSEMKDNNIGEIQITSFSETTAKELTDAIDSLEKKGAKGYILDLRGNPGGLMEQAITMSNLFIDKGKNIMQVEYKNGSKEVMKAEKERKVTKPTVVLVNDGTASAAEIMAAALHESSNVPLIGETTFGKGTVQTAKEYDDGSTVKLTVAKWLTADGEWIHKKGIKPQVKAELPDYAKLPYLDADKTYKSGDTGTNVKVAQKMLKALGYKVKVNSMYDQDFVSVVKQFQKKEKLNETGILTGDTTTKLMIELQKKLSDNDTQMEKAIETLKKEM

SEQ ID NO: 12853 - protein, 162 aa, Zea mays
MDRSASVGIKDGGFGGNHLYSPSFSSSSSMRHVNYSCGSCGYELNLSSTNRITSSIGSKYGKSMKTGIISFFNIDEGRFSQVDEFQCMPHFSRYSWGLFRRKTKLLCRQCNNYIGNASYDKAPPEYALVTQNSSPRKGVTDTVTKYDIRIRALQPSSGVASL

SEQ ID NO: 12854 - protein, 478 aa, Mycobacterium marinum M
MTDKTPDDVFKLAKDESVEFVDVRFCDLPGVMQHFTIPISFFDEAVFEEGLAFDGSSIRGFQSIHESDMLLLPDPDTAIIDQFREAKTLNLNFFVHDPFTLEPYSRDPRNVARKAENYLISTGIADTAYFGAEAEFYIFDSVAFDSRTNGSFYEVDAISGWWNTGAANEADGGPNLGYKVRPKGGYFPVAPVDHYVDLRDKMLTNLINAGFSLEKGHHEVGTGGQAEINYKFNTLLHAADDMQLYKYIVKQTAWQAGKTVTFMPKPLFGDNGSGMHTHQSLWKDGSPMMYDETGYAGLSDTARHYIGGLLHHAPSLLAFTNPTVNSYKRLVPGYEAPINLVYSQRNRSACVRIPITGSNPKAKRLEFRCPDSSGNPYLAFAAMLMAGLDGIKNKIEPQAPVDKDLYELPPEEAANIPQAPTQLAAVIDRLEADHEYLTEGGVFTPDLIETWISFKRENEIEPVNLRPHPYEFALYYDC

SEQ ID NO: 12855 - protein, 492 aa, Bacillus cereus ATCC 10987
MKIEIMVSLAIYMAGMLYIGYWSYKKTSDLSDYMLGGRGLGPAVTALSAGASDMSGWMLMGLPGAMYATGLSSVWIAIGLLIGAYANYLILAPRLRTYTEVANDSITIPDFLENRFKDRTKILRFVSAIVILVFFTFYASAGLVSGGRLFENSFNLDYKIGLFVTVGVVVAYTLFGGFLAVSWTDFVQGCIMFIALVLVPIVAFTDVGGVTETYNTIKQVDASHLDMFKGTTILGIISFLAWGLGYFGQPHIIVRFMAITSIKDLKTSRRIGIGWMAISIIGAMLTGLVGIAYYAKNNGTLQDPEMVFVTFSNILFHPYITGFLLSAILASIMSSISSQLLVISSAVTEDFYKTFFRRNASDKELVFIGRLSVLVVAMIAVVLAYHPSDTILTLVGYAWAGFGSAFGPAILLSLYWKRTNKWGVLAGMIVGAVVVITWVQIPSLKATMYEMVPGFFCSLLAVIVVSLVTKEPVKAIHLEFNEMEAVLEEETK

SEQ ID NO: 12856 - protein, 1604 aa, Schizosaccharomyces pombe
MDPSRETFDGSTRDSYKPPNGAEMMGQSELNTQNRIPYNTSANNRNWQIPLYWQQRGNEFQASPPPPLGYVTPEYGATGTPVNANNASRVDYATTAANVPEEYANDYSSELAYIHNVNDMPHVDGLSNHSPATQPDLFETPAQSDPILFSSYPHAAQARVDPSISKDLYNMVPRPDANTVSPHAARSASSLPVPKEASETPFRDASTDLFDEHAHAAPMHSSISISTLLSDSDRYEPHVSLTENISPVMAPSIDARLSQTILRGLPPAQKLSPNSSQSQITHNRRKHKLPLNATTNNSVVLTPDTSPLLDSDEVVSDDDSNEQQTMMMKFNYLQHLRNKRDEAVHAEKRRLLDIRGSIHDRLVCRYENRYNKLHASEYNHHHDWAVRQAIREEVAAVEAAKIRADEEKKKKEREEQVRLLQESADKDAEMNEASTATSENEDLKDDLSLADLSSKKTANSQATENNNTPSKAKVKAESKVRSKAKSDKSRAKLSSDTNKDSEKNDNNDASLQSAGVASDGESSPETPLTKASKSKKAKASKLANDTSKNANGETKSTPKKSKKKTSKAQQEANSTTAEGKEKLSGDSTETGNSTNKEASTEDTKANATASAPNKKKKTVETLQQQVIKEIARKEIPRVYKIIQQNQYNRSTNARKTSQLCGREARRWQFRTIKNNKDMQTKAKRAMRETMVFWKRNERVERDLRKKAEREALDRAKKEEELRESRRQARKLDFLITQTELYSHFVGRKMDREQDLPSATNTASVSEINFDSDEEEDIRRLAVESAQEAVQKAREHSQLFDANRQQSPNNSSSDMNEGEMNFQNPTLVNAFEVKQPKMLMCKLKEYQLKGLNWLANLYEQGINGILADEMGLGKTVQSISVMAYLAETHNIWGPFLVIAPASTLHNWQQEITRFVPKLKCIPYWGSTKDRKILRKFWCRKNMTYDENSPFHVVVTSYQLVVLDAQYFQSVKWQYMILDEAQAIKSSSSSRWKSLLAFKCRNRLLLTGTPIQNTMQELWALLHFIMPSLFDSHNEFSEWFSKDIESHAQSNTQLNEQQLKRLHMILKPFMLRRVKKNVQSELGEKIEKEVYCDLTQRQKILYQALRRQISIAELLEKAILGGDDTVASIMNLVMQFRKVCNHPDLFEREDVRSPLSLATWSKSIYINREGNFLDVPYNTRNFITFSIPRLLYEQGGILSVPGLNTSRGFETKYLYNLMNIWNPEYTNDSIKSNPEGSPFSWLRFVDESPQTLFQTFQNPVVHYLDEAEASSSLKEEQLCRQEFCYGKDYSNVRKMLLLPKSITKVDVLGSDFKEDSPFYHLTHVLEESDSQLDLTLLDSVLVQRASAPPIDIYCPGSRQFTVLQSRFQRDHLWSHYLYQPLKGEEDLIINNQAVSKLPIPRKPLLPSFGIAKGSYSNVRIPSMLRFIADSGKLSKLDKLLVELKANDHRVLIYFQMTRMIDLMEEYLTFRQYKYLRLDGSSKISQRRDMVTEWQTRPELFVFLLSTRAGGLGINLTAADTVIFYDSDWNPSIDSQAMDRAHRIGQQKQVTVYRFITRGTIEERIVIRAKEKEEVQKVVISGGETRPTKQMDLKGNSREMVSWLLEE

SEQ ID NO: 12857 - protein, 246 aa, Physcomitrella patens subsp. patens
MIYVSCREVCLYVSETFVACLTKSNDPLQVVRRWNHPVQPLDVKNGKFPYCLVWVPLPIVAWLVPFVGHVGICREDGVILDFAGNINIDNLAFGSCAKYVRLSRHKCCFPHPRFGHTCKIADKHATAGMAYSWDDAVSRSVQVFGRKSYNFFTCNCHSFVANCMNRMAYGGHSNWNLVDVLLLALVQGEFVDFTGFLRAYVPFFAIMTFGLFMAGWAFFFFWAGFATLLLGWFTYGTYAFGGYIDC

SEQ ID NO: 12858 - protein, 182 aa, Burkholderia sp. 383
MSTIYDIPVNAIDGAQTTLRPYEGKVLLVVNVASKCGLTPQYEGLEALYEGKRAEGLEVLAFPANNFKGQEPGTDAEIQSFCTGTFGVKFPLFSKISVIGDDKHPLYRSLTQAQPQATGDGPFRTRLEGYGIQPNPAPEVLWNFEKFLVSRTGEVVARFSPDTTADDPKLVAAIDAELAKAA

SEQ ID NO: 12859 - protein, 328 aa, Mycoplasma mycoides subsp. mycoides SC str. PG1
MNLIHFGAGNIGCGFIAPILSSIVDHIYFVDNNIDIVNKINTQKLIKIHTSDSKKISITNISAWLLTDFINYKKTWNEVSLLTISIGIKNLKHIIYYVNQLIDYKIKNNQKLIIMCCENGIRVSSLFKSYFSNLNNNIYFVDVLVDRIVSNKNILNDYLECEDYYLWIVDKTQLPSDFKQVPNLTYTTSFDIQITKKIYMLNALHCSLAWFVFKNFSFNKYLYVYQALKNDKVVEFVNNYLNEVILVLNHKYNINLDELNNYKNQIIKRLNSNFIKDDLKRLARNTELKLSKNERILTILDYAKDNNLKHDILLLSYQNGLEYLKNNK

SEQ ID NO: 12860 - protein, 545 aa, Zea mays
PQPLAVVQLCYNQLTGSIPTQLGNLSRLTVLALQSNRLNGAIPASLGDLPLLARLDLSFNRLFGSIPVRLAQLPSLVALDVRNNSLTGSVPAELAAKLQAGFQYGNNSDLCGAGLPALRPCTPADLIDPDRPQPFSAGIAPQVRPSDGRAPSTRALAAVVVVAVALLAATGVGLLALSWRRWRRQRVAGGSPSTVSGGRCSTEAAPSAAKASSARKSASSALASLEYSNAWDPLADARGGLGLFSQDALAQSLRISTEEVESATRYFSELNLLGRRGKKAGGLAGTYRGTLRDGTSVAVKRLGKTCCRQEEADFLSGLRLLAELRHDNVVALRGFCCSRARGECFLVYDFVPNGSLSQFLDVDADNAGGGSGRVLQWSTRISIIKGIAKGIEYLHSTRTNKPALVHQNISADKVLLDYAYRPLISGCGLHKLLVDDLVFSTLKASAAMGYLAPEYTTVGRFSEKSDVYAFGVIVFQVLTGKSKVTTTHAQLPDNDVDELVDGNLQGDNYSAAEAAQLAKIGSACTSENPDQRPTMAELLQELSTV

SEQ ID NO: 12861 - protein, 464 aa, Lardizabala biternata; identical to SEQ ID NO: 9527

SEQ ID NO: 12862 - protein, 394 aa, Lardizabala biternata; identical to SEQ ID NO: 9530

SEQ ID NO: 12863 - protein, 708 aa, Rhodopirellula baltica SH 1
MSFRQILPVALLAVGCIGSTLIQLPATAQERTVERAAPEQAAPPQPSPQDKVIAKLIAQLMPSNHVSGKDLNDEISRRALDLFLESFDPMKLYFLQSDVDEFNRYSEVVDDQVRLGDLSLAYYIYGRFTQRVDERVAVVMELLDGDFDFTRDEQIIIDRDATQFARDADEARDRWRRQIKLALLDLRNEKTDDSESDEPEMSKDEIMADAKDQLRRRYARYARRWKQTSSDDLLELFLSSVTNGYDPHSTYMSPATLEDFAISMRLNLDGIGASLGEKDGTTVVRQVIPGGAADSHGKLKPDDVIVAVGQDAEGPMVDIVEMPLKEVVKLIRGRAGSVVRLAVRPGGTGNEEIFKIVRARIELEDSAARGEVIDHEMPGQGKVKLGYINLPSFYMDMEAARRNETDYRSSTRDVERILRDFKSQNVGGVVLDLTRNGGGSLTEAISLTGLFIDRGPVVQVKNSDGSVQQYSDDQSGTVWDGPLVVVTSKLSASASEIFAGAIKDYHRGIVVGDPATHGKGTVQTLMDIGQSLFRNNNANYGALKVTLQQFYLPDGESTQLKGVEADLVLPSMTSKLPVAEGDLEYALEFDKVPLAKHSLYAMTPDSLLNSLRINSANRVQQDKEFSELMRRIELYVREKDQKSISLNEEEFLRRRAERKAQTEAEEEELDEVLNNDEIFRDTYYNKEVMNVAHEYVTGLRSQNLAVAK

SEQ ID NO: 12864 - protein, 466 aa, Lilium superbum; identical to SEQ ID NO: 9533

SEQ ID NO: 12865 - protein, 394 aa, Lilium superbum; identical to SEQ ID NO: 9534

SEQ ID NO: 12866 - protein, 130 aa, Brassica napus
SMVLALSQADAIPHPDPQELQLLVPTLIALDAMDGKSSASLLVECSSSPDVNTRKALANALAAAPSMWTLGNAGMGALQSLAEASNPAIAAAASRAISALKKQWEVEEGHALRFTNPNDDEDGPSAHDEI

SEQ ID NO: 12867 - protein, 465 aa, Pachysandra americana; identical to SEQ ID NO: 9537
  misc_feature (232)..(232): Xaa can be any naturally occurring amino acid

SEQ ID NO: 12868 - protein, 335 aa, Glycine max
MADESVVESPVKRQRDDDEENEVSVSMDVEGGKDPLSNGLSSVIPGWFSEISSMWPGEAHSLKVEKILFQGKSEYQNVMVFQSSTYGKVLVLDGVIQLTERDECAYQEMITHLPLCSIPNPKKVLVIGGGDGGVIREVAHHSSVEKIDICEIDKMAVDVSKQYFPDVAVGYDDPRVTLHIGDGVAFLKEVPEGTYDAVIVDSSDPIGPAQELFEKPFFSSVAKALRPGGVVCTQAESIWLHMDIIEDIVANCRQIFKGSVNYAWTTVPTYPSGMIGFMLCSTEGPPVDFKHPVNPIDENESQKSVRPLKFYNSEIHTAAFCLPSFAKRKIGSKAN

SEQ ID NO: 12869 - protein, 446 aa, Corynebacterium glutamicum ATCC 13032
MNSEQEFVLSAIEERDIKFVRLWFTDILGHLKSVVVAPAELESALEEGIGFDGSAIEGYARISEADTIARPDPSTFQVLPLEAGISKLQAARLFCDVTMPDGQPSFSDPRQVLRRQVQLAADEGLTCMISPEIEFYLVQSLRTNGLPPVPTDNGGYFDQATFNEAPNFRRNAMVALEELGIPVEFSHHETAPGQQEIDLRHADALTMADNIMTFRYIMKQVARDQGVGASFMPKPFQEHAGSAMHTHMSLFEGDTNAFHDPDDSYMLSKTAKQFIAGILHHAPEFTAVTNQWVNSYKRIVYGNEAPTAATWGVSNRSALVRVPTYRLNKEESRRVEVRLPDTACNPYLAFSVMLGAGLKGIKEGYELDEPAEDDISNLSFRERRAMGYNDLPSSLDQALRQMEKSELVADILGEHVFEFFLRNKWREWRDYQEQITPWELRNNLDY

SEQ ID NO: 12870 - protein, 1070 aa, Shewanella oneidensis MR-1
MRARDYVMQGRVLSAKANADFRHIEGSVVGSETSPYRQDIRLVSVNHKLIMNGFCSCPATGHCKHMAAVLYSLLTDKTVEDQRIVQWLHLLDDADDPRLNDVESLYDDRVLYILSKDNNGVFIELRRGKLGKKGGYNKGSKIALSDVQYYMPAWIGAEDVLIINLIMSTRRHGASRLYLKAQLGAVALEKMLATERCFWEESRLALTAGDAITPQFSWQDIDSEHKQMRLVLPKRDNWELVPTEPAYYIELDYFQIGLIDTDISIEKLRLLSQMPPVPRTQVEVVSHKLIKHFSARTVPLPSAINFVELRDKLRVRLSLNMLSAASTQANATLPNTILPNTTQLKTTTLHAQAITISQPYVTLAFIYGDVVLSGNAAKEALTLVTQGGTTYQINRALDEEQVAVETLQTLGFSRFIFDIGSLSSHWRLGALPDGIREWLQFIEEDVPRLQAQGVEVLLAPEFSLKVVDTALTVELDDSKEGWFSLSLHADINGQRLPMLPLVATWLKQHGEPADDAELLLPSPNGEWLKIKASVIKPLMSIILELFEQHRGNSIALPKYRAHLLNELAQSDISLLNGERVRQLAAKLEQFTGVVAVTAPTQLQAELRPYQQQGLNWLCFLKEYQLGGILADDMGLGKTIQTLAFLLKQKQLKSAAGPHLPSLIICPTSLVGNWAKEAAKFAPSLTLAVIHGAQRGPLLARLSEFDVVVTTYPLMVRDNDYYQAQAFEHIVLDEAQQIKNAQAKVSQMIKALQSPFKLCLTGTPLENHLGELKSLMDFCLPGLLGTTAYFNKEFRNRIERYGDSEQVKVLSQRIAPFVLRRTKAEVVTELPPKTEIYQSLELEKDQRNLYESIRLSMEKKIRELFATQGVAGSHIEFLDALLKLRQACCDPRLVKLEQAQKVKNNAKLNWLSQNLPEMVQEGRKILIFSQFTSMLILIEELLQSLEIDYSKLTGQTRLRQVQIDKFQEGDTPVFLISLKAGGTGLNLTAADTVIHYDPWWNPAAERQATDRAHRIGQENPVFVYKLIAEGTVEEKIQEMQQHKQGLADSILEGKGNGAWQGSADELLSLFH

SEQ ID NO: 12871 - protein, 153 aa, Oryza sativa
GAFLKNAPGGSFDAVFGDSFDPIGPAQELFGKPFFQSVARALGPGGVVCPPAGGIGLHMHIFEDFVGNCPQVFKGSGNYVWAPVPTSPRGVIGFMLCPPGGPPVDFPPPFFTLGGKGFSPKWKGPLKFSNSGIPSASFCFPFFGKGVIGSKAH

SEQ ID NO: 12872 - protein, 446 aa, Mycobacterium marinum M
MDRQKEFVLRTLEERDIRFVRLWFTDVLGFLKSVAIAPAELEGAFEEGIGFDGSSIEGFARVSESDTVAHPDPSTFQVLPWVTDAGHHHSARIFCDITMPDGSPSWADPRHVLRRQLTKANELGFSCYVHPEIEFFLLNPGPEDGTEPVPIDNAGYFDQAVHVSASKFRRHAIDALEFMGISVEFSHHEGAPGQQEIDLRFADALSMADNVMTFRYVIKEVALEEGVRATFMPKPFGQHAGSAMHTHMSLFEGDVNAFHSPDDPLQLSEVGKSFIAGILEHASEISAVTNQWVNSYKRLILGGEAPTAASWGAANRSALVRVPMYTPHKTSSRRIEVRSPDSACNPYLAFAVLLAAGLRGVEKGYVLGPQAEDNVWDLTPEERRTMGYRELPTSLDSALRAMESSELVAEALGEHVFDFFLRNKRREWATYRSHVTPYELSTYLSL

SEQ ID NO: 12873 - protein, 78 aa, Physcomitrella patens subsp. patens
GEDESIDTKKPVTGRGSTAKRSRAAEVHNQSERRRRDRINEKMRALQELIPNSNKTDKASMLEEAIEYLKMLQLQLQV

SEQ ID NO: 12874 - protein, 535 aa, Oryza sativa Japonica Group
MGMEVAAARLGALYTTSDYASVVSINLFVALLCACIVLGHLLEENRWVNESITALIIGLCTGVVILLMTKGKSSHLFVFSEDLFFIYLLPPIIFNAGFQVKKKQFFRNFMTITLFGAVGTMISFFTISIAAIAIFSRMNIGTLDVGDFLAIGAIFSATDSVCTLQVLNQDETPFLYSLVFGEGVVNDATSIVLFNALQNFDLVHIDAAVVLKFLGNFFYLFLSSTFLGVFAGLLSAYIIKKLYIGRHSTDREVALMMLMAYLSYMLAELLDLSGILTVFFCGIVMSHYTWHNVTESSRVTTKHAFATLSFIAETFLFLYVGMDALDIEKWEFASDRPGKSIGISSILLGLVLIGRAAFVFPLSFLSNLTKKAPNEKITWRQQVVIWWAGLMRGAVSIALAYNKFTRSGHTQLHGNAIMITSTITVVLFSTMVFGMMTKPLIRLLLPASGHPVTSEPSSPKSLHSPLLTSMQGSDLESTTNIVRPSSLRMLLTKPTHTVHYYWRKFDDALMRPMFGGRGFVPFSPGSPTEQSHGGR

SEQ ID NO: 12875 - protein, 297 aa, Zea mays
MDPMDIVGKSKEDVSLPKSTMVKIIKEMLPPDVRVARDAQDLLVECCVEFINLLSSESNEVCSREEKKTIAPEHVIKALSDLGFREYIEEVYAAYEQHKLETLDSPKAGKFTRIEMTEEEAVAEQQRMFAEARARMNNGAPKPKEPEQEPPQLPQAQPQLQLHTEPQQPMQSQVQLHSQTQHSLQPQLQLHHQPQQLPQVQLHSQPQLQPQVHLHPQPQLPPQLQVHQQLQQSPQVQVHEQPQVQPQEAQLQSSAQQTSQPQPQVQLQSQGHSQAQLQAGLLGQLQTQAQTGPGMDS

SEQ ID NO: 12876 - protein, 510 aa, Hordeum vulgare
NAEYAGQVAGVGILLQISMLVLSFVLGHVLRRHRFYYLPEASASLLIGLVVGGLANISNTETNTRTWFNFHEEFFFLFLLPPIIFQSGFSLSPKPFFANFGAIVTFAILGTFIASIVTGMLVYLGGLTFLMYKLPLVECLMFGALISATDPVTVLSIFQELGSDVNLYALVFGESVLNDAMAISLYRTMSSVRSNAAGGENIFMMILQFLEIFVGSMSSGVGVGFISSLLFKYAGLDIDNLQNLECCLFVLFPYFSYMLAEGLGLSGIVSILFTGMVMKHYTYSNLSDNSQRFVSAFFHLLSSLAETFVFIYMGFDIAMEEHSWSHVGFIIFSIIFIIVARAANVFSCAYLVNISRPEHRRIPLNHQKALCFSGLRGAMAFALALQSVHELPEGHGKTILTATTAIVVLTVLLIGGSTGTMLEALDVIGDENTSIETYEDNNGYIPPTYEEGTSSGGGLRMKLKEFHKSTTSFTALDKNYLTPFFTSQTDDDADDFGDQPQNQRQGFYDQ

SEQ ID NO: 12877 - protein, 160 aa, Arabidopsis thaliana
MAGNYHSFQNPIPRYQNYNFGSSSSNHQHEHDGLVVVVEDQQQEESMMVKEQDRLLPIANVGRIMKNILPANAKVSKEAKETMQECVSEFISFVTGEASDKCHKEKRKTVNGDDICWAMANLGFDDYAAQLKKYLHRYRVLEGEKPNHHGKGGPKSSPDN

SEQ ID NO: 12878 - protein, 151 aa, Glycine max
MGAFTEKQEALVNSSFEAFKANLPHHSVVFFNSILEKAPAAKNMFSFLGDAVDPKNPKLAGHAEKLFGLVRDSAVQLQTKGLVVADATLGPIHTQKGVTDLQFAVVKEALLKTIKEAVGDKWSEELSNPWEVAYDEIAAAIKKAMAIGSLV

SEQ ID NO: 12879 - protein, 549 aa, Microcoleus chthonoplastes PCC 7420
MITNSITSLTLTNPGQWFSDRILLAVPVSEDKGNVAEVVSFLIILLLVATAVALVSRRFRIPYITGLVLAGLAITELLPSRIGLDSALIFNLFLPILLFEAAINTDISRLRSTIKPIALLAGPGVLLCSGITSVLLKVELGLDWIPATMVGVILSITDTALVIAVFKEVSVPHRLVTLVEGESLLNDDVALVLFSLILTIHETGALSALDVVQEFLFVLIGGALVGAALGYLSIGLLSQTDDPLGGLLLTVALALGAFQAGELLHVSGVVAVVIAGLIVGNFEHSQVTSASNQVTLFSFWEYAGFGVNTFIFLLIGLEINIITLWQTLPAILLAFIAYQVGRLLTVYPLLAFVRFFDKPIPIRWRHILFAGNIKGSLSTALALSLPADLPGRETLLAIVLGIVLFSLVGQGLSLPWVVRHLKLSYRSKSYQQIEELQAQLMTAKAAQDELDSLLKAGVLPKSIYEEMRASYQLRVATADRTLREIYNQRSEDSPENRSDRTKLETIRRQLLLAEKGALTDALRKRILSEAVVQERIKRIDELLLKLEDD

SEQ ID NO: 12880 - protein, 473 aa, Nostoc punctiforme PCC 73102
MTTPQELLKKIQDEKIQLIDLKFIDTVGTWQHLTLYQNQIDETAFTDGVPFDGSSIRGWKAINESDMTMVLDPNTAWIDPFMEVPTLSIICSIKDPRTGEPYNRCPRVIAQKAVDYLVASGIGDTVFFGPEAEFFLFDSARFAQTANEGYYFLDSEEGAWNSGKEGTAEKPNLGYKPRFKEGYFPVAPTDSFQDIRTEMLLTMAELGVPIEKHHHEVATGGQCELGFRFGKLIEAADWLMTYKYVIKNVAKKHNKTVTFMPKPIFGDNGSGMHCHQSIWKDGQPLFAGDKYAGLSDMALYYIGGLLKHAPALLAITNPSTNSYKRLVPGYEAPVNLAYSEGNRSASIRIPLSGKNPKAKRLEFRCPDATSNPYLAFAAMLCAGIDGIKNKIHPGEPLDKNIYELSPEELAKVPSTPSSLELALQALENDHGFLTESGVFTEDFIENWIDYKLNEAKQLQLRPHPYEFYLYYDA

SEQ ID NO: 12881 - protein, 173 aa, Picea sitchensis
MGGAQSSEKPKEQSIHEFSVKDITGQDVDLSTYKGKVLLVVNVASQCGFTKSNYSQLTELYNKYKDKDFEILAFPCNQFGSQEPGTNEEIKDFACTRYKAEFPIFDKVDVNGPNTATVYNFLKSNKGGFLGSRIKWNFTKFLVDKDGHVVSRYAPTTSPSAIEKDIKKTLGEG

SEQ ID NO: 12882 - protein, 532 aa, Coprinopsis cinerea okayama7#130
MTEFRNPIPLPHIPDDLTIPQFMLREITGRPRRPRNVPFFIEDATGRAIGYEEAHHRTYSIANALSLKWKIGRGDVVCVFSPNHIDYAPVVPSNPSYTVEELKYQLDATKAKLIVAHPLCFSTALSAADATHLSGTNSIVLFDPLPGESLPTLNELVEFGARRPENYCAVRFKPGEARSTVALLLVYSNFELFQAVAISHYSVIANVIQMATHYNVNDPNNPSKTLSPGDVAIAVLPFFHIYGLVVTMHFLLFASLTLVVVPKFNLDDYLRSIVQHSVTHLFVVPPQVVLLCKHPEVRKYDLSRVKFCFSGAAPLGGELMQQLTKILPNAVIGQGYGLTETCTTISMVPPNVKLGRIGSAGQILPGITARVVKEDGSLASEGEVGELVVTGPSMSLGYLNNPKATAETYVDGWVRTGDEVVIKDNEEIMKVRGFQVAPAELEAHLLLHPDVADACVVPKADEYSGEVPLAYVVLSRPATERIGNNPRKAEDLKKAIAKHVADVKVPYKRLAGGVEFIDAIPKNPSGKIVRVL

SEQ ID NO: 12883 - protein, 293 aa, Candida albicans SC5314; identical to SEQ ID NO: 249

SEQ ID NO: 12884 - protein, 682 aa, Listeria monocytogenes str. 1/2a F6854
MEIFLYVLALLVAIFISNLLNRFVPFVSVPLIQIGLGVLIAIMPITFNLQLNPELFLVMFIAPLLFNDGRQTDKAALWGMRMPILVLALGLVFATVVVIGYFVHWMIPTIPLAAAFALAAALAPTDAVAVSSLSGRINLPKRIMNLLEGEALINDASGLVAFQFAIAAMVTGVFSLMDASISFFVIAIGGILVGLILSWLKFRLLKWVRGLGMEDVTFHMLIQILTPFIIYLAAEEIHVSGILAVVAAGIMHSMEQKKMDPQLVKLNVVSQSTWSVIIFVLNGLVFLLLGTQLPAITEVVWNDSGSSNLQVMAYILSITAALILLRFLWVYISWSIGAKQRQKQNKKTQLPKFRPVVLTSLSGVRGAVTLASALAIPFFLDDGSLFPQRSLIIFIASGVILCTLVIATFILPLLAKSEEVTTEDERAEIATRIRILRNVIRELKEQTLPETKAATDEVIEDYRKRIYDLQQNNSSNRGMDERERAKRLEIIQWERENTQKMTDEGRIVATDSYRYQHYLNMMEQAIKQRFRTKVKTAWMFLYRLIMLVIHPKKWGRITHKVKKGISKDSERFKAIRQLREDNEILIISKLKEQLTKENADIIGPLITEHTIFLERVRKEHSPRGKRAKFEQKKREVQVVAFQLERDIIQNMFEKGGISRDLARDLRQNLNMIETYLYDDFLE

SEQ ID NO: 12885 - protein, 159 aa, Burkholderia thailandensis E264
MSKLYSFNAQALSGGEVPLEQYRGKVLLIVNTASECGFTPQYAGLQQLYDRFRERGLAVLGFPCNQFGKQEPGDASQIGAFCEKNYGVTFPMFAKIDVNGANAHPLYRYLTEESPGILGLKAIKWNFTKFLVNREGEIVKRYAPSTKPEDIAADVEKLL

SEQ ID NO: 12886 - protein, 68 aa, Populus trichocarpa
MTTSRRLADRKVNRFDKNISRRGAVPETTTKKGNDYPVGPLLLGFFIFVVIGSSLFQIIRTATDGGMA

SEQ ID NO: 12887 - protein, 834 aa, Neurospora crassa
MSASMVSTPKAASKDNSTNSLALTQRSKFPTPQSLDKLTKPFKCPGSATRTVAVDRPARKRRKIDYKGAGGEDDEDGADKPYTNADRLALANRDANKFPVFAVKDKSQVFRKAFSVPLINKNTTAYNPNRPPPTLGLRQGAVFVAKPLHDPCDEFAIVLYDPTVDDKPKDTAPEAIEEKKEEPEVKVDAPLVHKSLAEILGIKKKVEGEHPRVPVVIDPRLAKVLRPHQIEGVRFMYRCVTGMIDEKANGCIMADEMGLGKTLQCITLLWTLLKQSPDAGKSTIQKAIVACPSSLVRNWANELVKWLGADAITPFAIDGKASKEELTRQLRQWAIASGRSVTRPVIIVSYETLRLNVDELKGTPIGLMLCDEGHRLKNGDSQTFSALNSLNVSRRVILSGTPIQNDLSEYFALITVANPDLLGTRLEFRKRFEIPILRGRHADASEAERKRGDECLVELLAIVNKFIIRRTNDILSKYLPVKYEHVVFCNLAPFQLDLYNYFVASPDIQALLRGKGSQPLKAINILKKLCNHPDLLDLSADLPGCEQYWPEDYVPKEARGRDRDVKPWYSGKMQVLDRMLARIRADTNDKIVLISNYTQTLDLFERLCRNRQYGCLRLDGTMNVNKRQKLVDKFNDPEGDEFVFLLSSKAGGCGLNLIGANRLVLFDPDWNPAADQQALARVWRDGQKKDCFVYRFIATGTIEEKIFQRQSHKQSLSSCVVDSAEDVERHFSLDSRELFTYRPGTKSDTHDTFKCKRCKPDGRQYMKAQAMLYGDTSTWNHFVNHWEGEDAAGKSGKGGDPNGGSGGMKSIHDHLLRQEVGERDVSAVFQYISH

SEQ ID NO: 12888 - protein, 563 aa, Physcomitrella patens subsp. patens
MVTNDVLGVAHSLLLKTPDLRDDHMHVVSICLFVFLLCACIVFGHLLEENRWMNESITALLLGLCTGVVVLISSNGQSSHVLKFDEELFFIYLLPPIIFNAGFQVKKKEFFRNFIAIMLFGVIGVFISFAVISTGSWYLFPKLGLNLSMRDILAIGVIFSATDSVCTLQVLNQDETPLLYSLVFGEGVVNDATSVVLFRAVQSYNFDRFSPLEDLQIGCNFLYLFSSSCILGIASGLISAYIIKTMYFGRHSTDREIAIMILMAYLSYILAELFYLSGILSVFFCGIVMSHYTWHNVTENSRTTTRHSFATMSFIAETFIFLYVGMDALDLDKWKTTQSSFKESAGLFGSLMCLILLGRAAFVFPLSALSNYSTKSPGAKINLRQMIIIWWAGLMRGAVSIALAFNQFTQGGDAKTSKQATSMVTTINIVLFSTIVFGTATKPLISWLLPPHLRSNYGDSAGLSPKVSLDVDFHMPLLMDTEHDGNGTNDRTVISQILHGLPRPQSIGMLLTAPRSTIHYVWRKFDDAYMRPMFGGRGYVRLMSRRSMDIPEENEDLEDEDQN

SEQ ID NO: 12889 - protein, 483 aa, Shewanella sp. ANA-3
MTIETPILITFVGYLVLMMGIGFWAYRATDTVDDYILGGRKMGPAVTALSVGASDMSGWLLLGLPGAVYLGGLGEAWIGIGLVVGAWLNWLFVAKRLRIYTQLADNALTLPDFFEKRFHDKQGYLKLVSAVTILVFFTFYASSGMVGGAILFEKVFGLDYTVALVIGSAIIVGYTFIGGFFAVSWTDFFQGCLMLIALLIIPFAVFSHPESHAGIESIDPAMLALISDKTTVIGLLSLLAWGLGYFGQPHILSRFMAIGTADALPLSRRIAMSWMMLSLIGALATGLAGSLYFANQPLANAETVFIHLAQAAFNPWIGGLLIAAILSAIMSTIDSQLLVCSSVITEDFYRKWLRPQADDRELMMVGRMGVLAIAVIAGIIALNPESSVLSLVSYAWAGFGAAFGPVVLLSLFWKQYSRNGAIATIIVGALTVVIWKQLTGGIFDLYEILPGFVFAIIAGVVVSKMSRPAETITAEFEQFKSAL

SEQ ID NO: 12890 - protein, 238 aa, Arabidopsis thaliana
MERGAPFSHYQLPKSISELNLDQHSNNPTPMTSSVVVAGAGDKNNGIVVQQQPPCVAREQDQYMPIANVIRIMRKTLPSHAKISDDAKETIQECVSEYISFVTGEANERCQREQRKTITAEDILWAMSKLGFDNYVDPLTVFINRYREIETDRGSALRGEPPSLRQTYGGNGIGFHGPSHGLPPPGPYGYGMLDQSMVMGGGRYYQNGSSGQDESSVGGGSSSSINGMPAFDHYGQYK

SEQ ID NO: 12891 - protein, 282 aa, Zea mays
MDAQQQLDLVMRHQSMATVCESEVQDALGSSESDPARPARPRGKRSRAAEVHNLSEKRRRSRINEKMKALQTLIPNSSKTDKASMLDDAIEYLKHLQLQVQMLSMRNGLYLPPGNLSGAPETLAPLEMCAALNQSGAKASNSGVVVPPGNKIPVARLLLDPPNHDQRHENPLVLQSVPSSSTAVETRFLQQPAQPNLQSFQLAVPPEMIFDEADMMLKHRLASGRETTSLPVGHEAKPGRQEACMVNSDISNRGSLGKEVFMPYLHSLQSGDTEGGLRAGSN

SEQ ID NO: 12892 - protein, 412 aa, Pachysandra americana; identical to SEQ ID NO: 9552

SEQ ID NO: 12893 - protein, 541 aa, Allium cepa
MGSISMDQETIFRSKLPDIYIPDHLPLHSYCFQHIQEFSDKPCIIDGITEKVYTYADVELTSKRVAVGLRDLGIRKGHVIMILLPNSPEFAFSFLGASYLGAMSTTANPYYTPAEIKKQAMGSGVRVIITESCYVPKIKDLEHNVKIVVIDELVDEHSTCIPFSQLSSADERKLPEVEISPDDVVALPYSSGTTGLPKGVMLTHEGLITSVAQQVDGENPNLYFRSDDVLLCVLPLFHIYSLNSVLLCGLRAGSTILLMRKFDLTKVVELVGKYRVTIAPFVPPICIEIAKNDMVGMCNLLNIRMVMSGAAPMGKELEDKLKEKMPNAVLGQGYGMTEAGPVISMCPGFAKHPTQAKSGSCGTIVRNAELKVMDPETGFSLGRNLPGEICIRGPQIMKGYLNDPEATSSTIDLEGWLHTGDIGYVDDDDEVFIVDRVKELIKFKGFQVPPAELESLLVSHPCIADAAVIPQKDEVAGEVPVAFVVKASGSDITEDAVKEFISKQVVFYKRLQTVYFVHAIPKSPSGKILRKDLRARLSSFT

SEQ ID NO: 12894 - protein, 554 aa, Pleea tenuifolia; identical to SEQ ID NO: 9555
  misc_feature (346)..(346): Xaa can be any naturally occurring amino acid

SEQ ID NO: 12895 - protein, 467 aa, Pseudowintera axillaris; identical to SEQ ID NO: 9557

SEQ ID NO: 12896 - protein, 723 aa, Zea mays
  misc_feature (549)..(549): Xaa can be any naturally occurring amino acid
HSAPRHSTLVDVPGRELSRLRPILKPFMLRRVKIDVIAEMTKKKEEIVPCKLSSRQQVFYQAIKNKISLNELLAGSRGSLNDKKLLSLMNIVMQLRKVCNHPELFERNEGSSYFNFAEIPNSLLSPPFGELQDVHYAGKRNPIIFEIPKLVYEGIISNMENSGNICGFQNGYLNRLFNIFLPSNIYRSAIPEVSSSKESLLSSGAFGFTRLSNLCPVEASFLATASLFERLVFSVMQWNRNYTAEILDEFLDSEDTGIAFRQNDSTKVRAVALLLLSSTKAKPSLLRTKIGTGPIDGPYEALVLSHRDRLASNIRLLRSAYAFIPPARAPPINVWCADRNFAYKFTDEMYDPWAKKLFLGFARTSEFNGPRQPIAPHPLIQELNTDLPIIEPMLQLPYRIFGSSPPMSNFDPAKMLTDSGKLHTLDMLLRRLRAEGHRVLLFAQMTKMLDILEDYMNFRKFKYFRLDGSSAISDRRDMVRDFQNRNDIFVFLLSTRAGGLGINLTAADTVIFYEIDWNPTQDQQAMDRTHRLGQTKEVTVYRLICKDTXEEKILQRATLKNAVQELVMKGKHVQDDHLMRQEDVVSLLIDDTQIAHKLKEISMQAKDRQKRRRAKGIKVDKEGDLTLEDLDDATAEAVDQDKTTSKKKKSSHKKHTNTHDNDNIDKNGEADVGDHPGSSNTENEQMPESRPKRSKRLMKSITDDKELAAAADHEKPVNEAENH

SEQ ID NO: 12897 - protein, 526 aa, Chlamydomonas reinhardtii
TLQAIAALWTLLSDGVHGRRPTCVRPLVLCPASLVANWGKELEFWCGRVAPVVVDDTRGDKVRYSMPYLVVLVMGYQTFRSHRDAVVKKNIDIVLCDEAHFLKNVDSQLTKAVAGLPARMRLLLTGTPIQNKLQEFYTVMSTAVPGLLGELPAFRRTYELPIQRGSDADASDAEAALGMERMDAMLALCGTYMLRRSCNTMKKYLPPKVEQVVFCKMSTLQARLYNFFLNSPAVHVVLLRNILTSSSFSHCALAVKKMCCHPDLVSTGSCADGCKSGADGRPVVTGFEGCLPLFGEASVAPVYKPGSCQAYHSGKVAVLEMMLKAVRDSGSGDKVVLVSNYTEALDILEGMCRAHAWAFLRLDGGCDVKKRQPLVDCFNDPAHPSFLLLLSSKAGGVGLNIIGANRLVLFDPDWNPANDLQAMARVWRQGQKKKVWIYRLLTTGSIEEKVYQRQVAKQGLSAAIVDNSNDQSRTFSAEELRALFEVNTTTRCDTHGAIKCSCDGSQDHDGDTAEEGVVKVRGTVRG

SEQ ID NO: 12898 - protein, 395 aa, Pseudowintera axillaris; identical to SEQ ID NO: 9561
  misc_feature (154)..(154): Xaa can be any naturally occurring amino acid

SEQ ID NO: 12899 - protein, 1125 aa, Ceratodon purpureus; identical to SEQ ID NO: 9562
  misc_feature (299)..(299): Xaa can be any naturally occurring amino acid

SEQ ID NO: 12900 - protein, 989 aa, Symbiobacterium thermophilum IAM 14863
MITVHGSFVPSGASGFFFLWGLDGVAARDAAPPGRRRRGVPRHPCATEPEALYPALRGLPYLNTLSLVQWQPGPDGVSPARVPGIALSVPNAVQWLLDLPDHFRGTPLRPGHSLQLWCVASKLLLEFLGRGLMLPVLQAEAGVLSAGWALHLTDADDVRRLTRLAAGLPEACRALVPPDRTPNTYPLPVADGLVHQFMRTAAAGVIRLLLEEEPLPEAQSLQDTALRHWLAALTGAEARDLPPGLPGAQELYAALDRWSAPATGVLSHASLRTGVRLHLPGPETDGEWELELTLHAPDEGALPVTADAVWASLGAEVEIGGQRYQGAEQRLLADLPAMARLFPPLAPLLRDPAPSRMRIPADDVLALIQEGAMLLQQAGHPVLLPAALAKPAALRVGMRLSPAGGSPSMFGLHQIVNVRWDVALGGTPLTLDELRHLARQKRPLVQMQGRWVRVDERTLAAVLRRIEQHGGQMELGTALRLAPEADEATATGWIAELLERLQEPARMEPVPTPGGFAGTLRPYQQRGLAWLAFLRRWGLGACLADDMGLGKTVQLIALLLHEREAGWAAGPTLLVCPVSVLGNWCRELARFAPGLRVLVHHGPGRLGEPDFARQAGAHDVVLTTYSLLARDAALLGQVTWNGIVADEAQNLKNPDTQHARALRSLSGGYRIALTGTPVENHLGDLWSLFQFLNPGLLGSREEFERRYAVPIQRYQDEEAAARLRRQVGPFILRRQKNDPAIAPDLPDKLENTELVTLSVEQAALYEAIVQETLERAAQADGIQRQAAVLAGLTRLKQVCNHPAAATGDGPLVGRSGKIDRLVQLLQEVLAAGEQALLFTQFARFGGRLQAYLAETLGCEVLFLHGGTPQPERDRLVARFQAGEAPLFILSLKAGGLGLNLTAATHVFHVDRWWNPAVEDQATDRAYRIGQTRRVLVHRLITAGTLEERIDRLLAEKRALAGQVIISGESWLGQLSTEELRALIALDREV

SEQ ID NO: 12901 - protein, 527 aa, Synechococcus elongatus PCC 7942
MSLEVLATEPALEYGLERFFLALVVALSVATLPQVFSWFRQIPYTLLLVIAGLGLALFNVRLINLSPELILSIFLPPLLFEAAWNLKWNNLKKDWVPISLYAVIGVGISILGIAFGLSQTTSVPIVIALLIGASLATTDPVSVIAMFRELGVAERTRTLVEGESLFNDGVAVVTLSLLLALPLEVQGFEAKSLLADLIRYLGIGIGSGCLIGFGVSFLTQRLDLPLLEQSLTLVAAYGSYLLSEQLGGSGVIAVVPVGLILGNFGSRIGMSPRTRVIVTEFWEFLAFFVNSIVFLLIGDQVPLESLWQNRGAIAITVVAMLAARAIATFGLGWLSNRLSHSDLSWRELVVVWWGGIRGAVSIALALSIPTVLLQRDLITATVFGSVLFTLLVQGLTMKPLLGALGLLGDQALRQQYAEAIARQTALQRVLLRLQQAEPQAEIDPEFCREQIQLIEAKLKSLAQELTELCDRQPELQHYALESLQDELLAIEADTYAEFVRSGQLSQELSPILRETLSFPAQPPAIAD

SEQ ID NO: 12902 - protein, 441 aa, Pteridophyllum racemosum; identical to SEQ ID NO: 9563
  misc_feature (157)..(157): Xaa can be any naturally occurring amino acid

SEQ ID NO: 12903 - protein, 722 aa, Herminiimonas arsenicoxydans
MNNKTIEIIDVLSLRGPNIWTYRPVLEAWVDIGDLEDSPSNTIPGFYERLTAWLPSLVEHHCGVGVHGGFLMRLREGTWPGHIMEHVMIELQNLAGMQTGFGKARETGKRGVYKVVVRARHEEVSRAALFAARDLVMAAIEDQPYDVKSTVNNLRNILESVALGPSTGCIVEAATDRRIPSMRLNDGNLVQLGYGIKQRRIWTAETDQTSAIAETISSDKELTKTLLQSCGVPVPEGRIVNSAADAWEAAESIGLPVVIKPLDGNHGRGVSTNLNTAADIEAAFLLAEQESSDVIVERFIRGNEHRLLIVGGKLVAAARGEEATIVADGKSSIFELINSQLNSDPRRGSSEDCPLNLILIDEADDPRVVLLELARQGYTTESIPAAGEKILVQRNGNVAFDVTDQVHPTVAAAASLAARIVGLDIAGVDLVVEDISKPLTEQGGAIVEVNAGPGLLMHLKPADGPARPVGRAIVDHLFAADESGRIPIVGVTGSHGTTVVSRLIAWLLHLQGAYVGLACKDGLFLRQRPVLKKASDNWDAGRQVLMNRMVEAAVFENGSKAILSEGLAYDWCQVGVVTNIDPADTLPEFYIDDAEQMSRVLRTQIDVVLSTGVAVLNAADERVADMASLCDGSVIFFAASPTEAVMSAHLASGQRAVFMRDGNIVLATGKEEILIDNATPHAALTMENSLAAVAAAWALGIGPELIRAGIETFEATDAAIAA

SEQ ID NO: 12904 - protein, 856 aa, Herminiimonas arsenicoxydans
MSMEISRVRALRGPNLWSRHTSIEAIVSCNESEQDIAAIPGFEDRLRARFPEIKFIESARPKKAFSMADVLEFAALGLQAQAGCPVTFSRTIATVEKDTYQVVVEYTEEAVGRLAFELAQELCRAAVEDTPFDLATALASLRELDEDIRLGPSTGAIVDAAVLRGIPYRRLTEGSMVQFGWGSKQLRIQAAETSFTSAIAESIAQDKEMTKLLLSAAGVPVPDGRSVTTADDAWLAATEIGAAVVIKPRDGNQGKGVSVNLKTREEIEVGFAAAQVICDDVVIERYISGQDYRFLVVGKQLIAAARRTPPEVIGDGVQTIQQLIDQVNLDPLRGDGHASPLTKIKVDKTTLATLEKQSHTLESIPAKGVPVVLRNNANLSTGGIATDVTDDVHPELAARVVEAAQMIGLDIAGVDLVCENVHNTLEEQGGGIVEVNAAPGLRMHIKPSFGKGRPVGEAIVSTMFAEGDDGRIPVVAVAGTNGKTTTVRLIAHILQANKHRVGMTTTDGVYIENQRIDTGDCSGPRSARNVLMHPDVDAAVFETARGGVLREGLGFDRCNVAVVTNIGVGDHLGLNFISTVEDLAVVKRVIVQNVAPNGTAVLNAADPMVANMAASCPGSVTFFAKDGNHAVLATHRAKGHRVVFLDGTSIVASEGAFEHRIALADIAITHNGLIGFQIENAMAAIGAAWSLNLSWDIVLNGLRTFENSAATTPGRFNLFTHHGATVIADYGHNPDAIEALTHAVEAMPAKRRMVVISGAGDRRDDDLRRQTEILGDAFDDVILYEDQCQRGRADGEVLALLRQGLTKAKRAKSIKEIHGEFLAIDTALASLQAGDLCLILVDQVEEALAHIASRVA

SEQ ID NO: 12905 - protein, 416 aa, Cyanothece sp. PCC 7424
MKKRTIWVTLLVTLSLIFSLMTWTPVAHAYGGFSEEQKILLQSWRLVNQAYLDDTFNHQNWWQIRQNFLDRKLSKREDTYNAIDEMLATLDEPFTRLLRPEQYHNLQVSTAGELSGVGLQININPDTGNLEVVSPLSHSPAEEAGISAHDRILFIDGVDTSTLTLDEAAARMRGPKGTKVSLTILSQGKDAKNARIVELIRDNISLSAVYATLDKSAALPVGYIRLSQFSASATKEVSDAIADLEKQGADAYILDLRNNPGGLLQAGIEIARLWIDQGTIVYTVNRQGSLDSFTASGMALTGDPLIVLVNEGTASASEILAGALQDNGRGILLGEKTFGKGLIQSLFELPDGSGLAITVAKYETPNHKDIHKAGIVPDQVIQEDPITYQQIGTEADLQYQAALKVLTGNSVLADAG

SEQ ID NO: 12906 - protein, 1130 aa, Oryza sativa
  misc_feature (469)..(469): Xaa can be any naturally occurring amino acid
MHGDWPESPSQEVLYADEIAAVRAVLGAGLPEARVVAAISRCGGNAERAINALLDDATAGVEDKPEPKKGKGAKTAAPPVKAERDAGGAAPKPPPPPVKVEVLGDEPLGSQESNGCSARVKKEREDELLVKAPPPMPDRVKEEDGVAAKRGAATANAAGISLVPRPKKRSRVHDEADTIDLTATHPVPYLNPRPIRAVPPPEAMEMLESRRVRARPPPPSSDLRMVVAPPDAEFGEFPEERDWFLVGRSYVTGLSTNRGRRRLDAGELVHFSFPSLERTYGGIKVSNKKAAALAEIVRFSTNRAGEIGKLSTEWTKCLVPLVSSSKVKIQGKIVFPTVELRLMQEILLYVSFYIHRSVFTASGNNSSWDLLAPANVDYSTNPLYRLFRLLKLRAFTKADITPEELAAGKRSRNLRGDDNDEDEPMAIVGLENRRTAGQTFPEQGTDEQAISEAALNKIVGTAETYDLEXPPSTLVSVLKPYQKEALFWMSQLEKGIDGDQAKKTLHPCWSAYKIVDKRAPAVYVNVFTGEATTQFQSVTQSARGGILADAMGLGKTVMTIALILSNPRGELEQDKRGTRDRDTKAQTSRSSVRGGTLIICPMALLGQWKDELEAHSTPGALSVFVYYGGDRTTDLRFMAQHSVVLTTYGVLQSAHKNDGSSIFHRIDWYRVVLDEAHTIKSPRTKAARAAYELTSHCRWCLTGTPLQNNLEDLFSLLCFLHVEPWGDASWWNKLIQRPYENGDERGLKLVRAILRPLMLRRTKETKDKMGNPILVLPPANIEIVECEQSEDERDFYEALFRRSKVQFDKFVAQGSVLNNYANILELLLRLRQCCDHPFLVISRADTQKYTDLDELAQRFLDGVQRDSARRSAPPSQAYVEEVVEEIRQGATTECPICLESASDDPVLTPCAHRMCRECLLSSWRTPSGGPCPLCRSPITKSELITLPSQCRFQVDPENNWKDSCKVIKLIKILEGLQEKREKSIVFSQFTSFFDLLEVPFNQKGIKFLRFDGKLSQKHREKVLKEFSESKDKLVLLMSLKAGGVGLNLTAASNVFLMDPWWNPAVEEQAIMRIHRIGQKRAVQVRRFIVKDTVEERMQKVQACKQRMISGALTDDEVRSARIEQLKMLFT

SEQ ID NO: 12907 - protein, 1149 aa, Oryza sativa
  misc_feature (477)..(477): Xaa can be any naturally occurring amino acid
  misc_feature (488)..(488): Xaa can be any naturally occurring amino acid
MDNPEAEPDDAVLFVGVSLVLGIASRHLLRGTRVPYTVALLVLGVALGSLEFGTKHGMGKLGAGIRIWANINPDLLLAVFLPALLFESSFSMEIHQIKKCMAQMVLLAGPGVLISTFFLGSALKLTFPYNWNWKTSLLLGGLLSATDPVAVVALLKELGASKKLSTIIEGESLMNDGTAIVVYQLFYRMVLGRTFDAGSIIKFLSEVSLGAVALGLAFGIASVLWLGFIFNDTIIEIALTLAVSYIAFFTAQDALEVSGVLTVMTLGMFYAAFAKTAFKGDSQQSLHHFWEMVAYIANTLIFILSGVVIADGVLENNVHFERHGASWGFLLLLYVFVQISRILVVVILYPLLRHFGYGLDLKEATILVWAGLRGAVALSLSLSVKRASDAVQTHLKPVDGTMFVFFTGGIVFLTLIFNGSTTQFLLHLLGMDRLAATKLRILNYTKYEMLNKALEAFGDLRDDEELGPPADWVTVKXKYITCLNDLDXAPVHPHAVSDRNDRMHTMNLRDIRVRLLNGVQAAYWGMLEEGRITQTTANILMRSVDEAMDLVPTQELCDWKGLRSNVHFPNYYRFLQMSRLPRRLITYFTVERLESGCYICAAFLRAHRIARRQLHDFLGDSEVARIVIDESNAEGEEARKFLEDVRVTFPQVLRVLKTRQVTYSVLTHLSEYIQNLQKTGLLEEKEMAHLDDALQTDLKKFKRNPPLVKMPRVSDLLNTHPLVGALPAAMRDPLLSSTKETVKGHGTILYREGSRPTGIWLVSIGVVKWTSQRLSSRHSLDPILSHGSTLGLYEVLIGKPYICDMITDSVVHCFFIEAEKIEQLRQSDPSIEIFLWQESALVVARLLLPMMFEKMATHELRVLITERSTMNIYIKGEEIELEQNFIGILLEGFLKTKNQTLITPPGLLLPPNADLNLFGLESSAINRIDYCYTAPSYQVEARARILFVEIGRPEIEADLQRSASLISQTLELPRTQSKEHSGLLSWPESFRKSRGAQNGASLTEIRDHPASFSARALQLSMYGSMINDMKSGQGQGQRRQRHRHTKASSNKAHSSSYPRVPSRSSNTQRPLLSVQSEGANMTTARQAAAAGASLPPEPEEAGRRRRRQRKAIEEDEDNSSDESAGEEVIVRVDSPSMLTFRQPSSAADR

SEQ ID NO: 12908 - protein, 447 aa, Frankia sp. EAN1pec
MIPLSLGEIAAVVGGTVAGDGAVTVTAPAVLDGRQAEPGGLFVAFAGEHVDGHDYAGQAGRAGAVATLGSRPTPLPTVVVEDAQSALQALAAHVVARLRDGLTVVGLTGSQGKTSTKDLLAAVLSSAAPTIATIGSLNNELGVPLTMLRADPATRFLALEMGARHIGDIAELTGLVAPDIAVVLNVGQAHLGEFGSREAIARTKGELVQGLAPGGTAVLGADDPRVVAMRSLTDGPVLTFGRVEHADVRVLDLALDRLGRPSFTLRTADASAPVTLPLVGGHQALNASAAAAAGLAAGVPLDVAAAALATASLSQWRMELRDLACGATLLNDSYNANPDSTRAALDALAAIEGGRRIAVLGEMRELGDGSEAEHRAVGEYAASRADVVVAVGEAARPIADGAGERVVALADNNAAVDWLRGHLAAGEVVLVKASRGARLDEVAVALA

SEQ ID NO: 12909 - protein, 266 aa, Saccharomyces cerevisiae YJM789; identical to SEQ ID NO: 269

SEQ ID NO: 12910 - protein, 307 aa, Coprinopsis cinerea okayama7#130
MTIVVVPKFNFKDFLKSIVKYNVTHLYMVPPQIVLLCKVIHSHHPEAKKYDLSHVKFCMSGAAPLSGELMKQVIQVLPNSVIGQGYGLTETFSVSSIDPDVKIARVGSAGQLLPGIDAKIVKADGTLGKEGEHGELLVAGPCLALGYLNNPEANATTFVDGWFRTGDECVIKDGEIYVLERLKEILKVKGFQVAPAELEGHILLLPDIADACVVGLPDDYSGEVPLAFVVPSAKVKERIGNDPVKHKQLKDAVIKHVADAKSHYKWLTGGVEIVDVIPRNNSGKLLRRELRERAKAMAAAKPAKAKL

SEQ ID NO: 12911 - protein, 159 aa, Oryza sativa Japonica Group; identical to SEQ ID NO: 11223

SEQ ID NO: 12912 - protein, 635 aa, Treponema pallidum subsp. pallidum str. Nichols
MGKIIGIDLGTTNSCVAIMEGGEPVVIQNAEGGRTTPSIIGFTSDGGRVVGQPAKNQMVTNPEHTIYSIKRFIGSRFNELTGEAKKVPYKIVPQGDDVRVEVEGKLYSTQEISAFILQKMKKTAEDYLGEAVTEAVITVPAYFNDAQRQATKDAGKIAGLDVKRIINEPTAASLAFGFNKDSKREKIIAVYDLGGGTFDISILELGDGVFEVKSTNGDTHLGGDDFDARIVQWLEQGFKSDTGIDLGNDRMALQRLREAAEKAKIALSSSASTEINLPFITADANGPKHLQRTLSRSEFEKMTDDLFERTKEPCRKALKDAGISADRIDEILLVGGSTRMPKVAHVIKDVFGKEGSKGVNPDEAVAIGAAIQGGILGGDVKDVLLLDVTPLSLGIETMGGVFTPLISRNTTIPTRKSQVFSTAADGQTAVSIHVLQGERGMANQNRTLGNFDLVGIPPAPRGVPQIEVTFDIDANGIVHVSAKDLGTGKEQHIRIESSSGLSESEIDRMVKEAEANAESDKREREKIEARNVADSLIYQTEKTLKEAGDGVNAADRARIDEAIAELKTVLSGDDVASIKAKTEILQQASYKIAEEMYKRQAAAGAAAGKKSDAPSGNEAEGGDVDYEVVKDEDSK

SEQ ID NO: 12913 - protein, 727 aa, Xanthomonas oryzae pv. oryzae KACC10331
MTYNVPVSMKAGLLALVLTTPMALLARADTALPAAATPDQATATKLVYGLLSDSRYAYRPRVLDEAMSKDVFKRYLETLDGGKQFFTQADIDSFAPLQAGVGDALRGGNLEPAFQVFSLYKKRVDQRVKYALDLLKQDFDFSGNDKFEYDRKDVPWAADDKQLDVLWRQSVMNDWLRLKLAGKKPDDIRKTLDKRYVALADSVKQLKGEDVFQFFVNAYTNAVDPHTDYFTPRTAETFNQQMSLSLEGIGAQLQKQDDMVVIREVIPGGPAAVDGTLKPGDRIVGVGQTKTGAIEDVIGWRIDDVVAKIRGSKDTQVRLEYIPAESGIDGKHRTVTLTRQKVRLAEQAAKGETITLPATGTEPQRRIGIIKLPGFYQDFEGRRRNATDYASATRDVAKLLAGFKTDKVDGVVLDLRNNGGGSLDEAIELTGLFIEQGPVVQVRESGGRVTVNGDSDPKVAWDGPLGVLINRGSASASEIFAGAIQDYGRGLVIGETSFGKGTVQNIVDLDRWPAAEGQRYGQVKLTIAQFFRVSGSSTQHKGVVPDIVFPASVDATEFGESTYDNALPWTRIAAAPHTQYGNFAPLLPKLQALHTARIATDKEFQWWEEDVKQFRDEKAKKYISLNEAERVAERQKQDQQRKDRQQIRKQLGLPLDPLAEDSDDGLTGNERDIVKDTAREKAAEKRPDPLLHESAAILADALGLLSQDKPLSAQVLPKSTAPGRWAD

SEQ ID NO: 12914 - protein, 427 aa, Medicago truncatula
MALTANKVSSGPILTNRATLCRSHGSSSPRINRIQFSKGRLENGHLNNDSVLNERSTLSNDWFRFVNGRNPVSLISKTSSVSCKSTGANNTEEKECVTTYDDVSDLTRRHAEDEKNDRARSVRGLSEAYRFACNDAKFLSRGIMRMDERARQDVAFLGTEFLKLDARARKDTEKIDRGVKEKAKRLNRIATILKDIAQTRLKSAADEHWSDGALEADLRLADFRAKQRAMEDALMSLELIKNIHDMMVSKTYNFPIFRDKGSLSENNVRGRIMLEKNGRTTNSFPGDVTAERITALQEAYWSMASALSEADGIDYTDPEELELLITTLIDLDAMDGKQSVSLLAECSSSPDVSTRRALAKALAAAPSMWTLGNAGMGALQRLAEDSNPAIAAAASKAIYELKKQWEIEEGDSWRFMMGESTKEENET

SEQ ID NO: 12915 - protein, 531 aa, Streptomyces coelicolor A3(2)
MSSALDDRAVAAPPNPPADHHTRGARFLLLLAVFLCAACGLVYELALTALGSYLIGNSVLQTSVVISVMVFAMGVGSLAAKPLRHRPVVAFAVVEGVLALVGGLSVLMLYAAFAWLQLYMPAMIVVSLVVGLLIGAEIPLLMTLLQRIRTQEASSAVADMFAVDYIGALVGGLCFPLFLLPTFGQLKGALVVGVVNAVAGVIVVVFIFRRQTGRLVKAGLLAGVALVLAALGTTYVLADDLEVTARQHMYADPIIHSETTQYQDIVVTRSTAFTGEPDVRLFLNGDLQFSSVDEYRYHESLVHPALSGPHSNVLIMGGGDGLALREVLRHEGVRHVTLVELDPAMTRLARTFEPLRKLNQGSLDDPRAKVVNADAFTWLREARQQYDAVIIDFPDPDSASLAKLYSVEFYDLLRRVLAPDGQVMVQSGSPFFAPKTYWSIAKTIETAGYATTEFQIDVPSFGNWGFVLARPGTEAPPLRLARDTPKLRYLDAAVLKAATVFPVDRRRTDVRPSTLMDPAVLEYVQDEWRDY

SEQ ID NO: 12916 - protein, 401 aa, Bacillus anthracis str. Sterne
MKLKELANLLLVKETIGDMNVKITGLEMDSRKITNGNLFICVSGIDGFLEDRHQFVEDAVKNGAVALIVERDVNIEIPKIIVKDARYAMAVIASHFYGYPSNKMKLIGITGTNGKTTTSYLLEKILSDYGYHTGLMGNNGVKVGSKWYPTDINTQEPPTLQRNLQMMKNQNADYCVMEVTSQGLHMERVKGCNFKIAVFTNLTQDHLDYHGTFDEYKHVKSLLFARLGNNLSTIDKKIAVLNADDPSVEYFKKITSAEVITYGIHNGADVQAKNITLSPKGIRFLVSSFNGEIEVSLNLVGRFNVYNALAAITVALVEGIPLTNISDSLSNLKSIEGRMEIIDENQDFLVIVDYAHTPDALENVLSTIREFAKGKIITVFGCGGDRDAKKTIYNGWNCWKL

SEQ ID NO: 12917 - protein, 183 aa, Klebsiella pneumoniae subsp. pneumoniae MGH 78578
MQHDILNTEVTTIDGEKTTLASFAGKVLLIVNVASKCGLTPQYEQLEDLQKQFAAEGFSVLGFPCNQFLGQEPGSEEEIKTFCSTTYGVTFPLFSKIDVNGEHRAPLYQKLIAAAPKAVAPEGSGFYERMASKGRAPLYVDDILWNFEKFLINRQGNVIQRFSPDMTPDDPQLVAAIKGALAQ

SEQ ID NO: 12918 - protein, 562 aa, Streptomyces coelicolor A3(2)
MQTPTSSTYLAAELRLPTNWLDYTILGIYFVVVLGIGFAARRSVRTSLDFFLSGRSLPAWVTGLAFVAANLGATEILGMAANSAQYGVYTTHWYWIGAIPAMVFLGLVMMPFYYGSKVRSVPEFLLLRFDKASHLLSSALFAIAAILIAGVNLYALAIVVEALLGWPEWVAIVVAGFFVLAYITLGGLSSAIYNEVLQFFVILAGLIPITILGLKKVGGWDGLSDSLSKSHGSDFMTAWGGTGIGSENPLGANWLTIVLGLGFVLSFGYWTTNFAEVQRALSAKNLSAAQRTPLIAAFPKIFIVFVVMIPGLVAAVLVPKIGTPGSDLQYNDAIPYLMQQLLPNGVLGIAVTGLLAAFMAGMAANISSFNTVFTTDIWQKYVVKDREDGYYVRFGRLITVIGVLASIGTAFLASSFSNIMSYLQTLFSFFNVPMFVVFIIGMFWKRASMKSGFWGLIAGTTAAMVNYFVIYKQGIIDIPSDQGANFVSAIAGFVAGAVVMVAVSLFTAPKPTADLQGLVYGTTSPGMAEAPAKGDDAWYRKPALLGWGAVVLAAACYIPFSF

SEQ ID NO: 12919 - protein, 469 aa, Moritella sp. PE36
MSAESVLALIKEQDVKFVDLRFTDTKGKEQHVSLPHHQVNAGFFEEGKMFDGSSIEGWKGINESDMILMPDPATAVLDPFTEATTLNLRCDVLEPATMQGYSRDPRSVAKRALAYLRSTGIADDVFFGPEPEFFLFDDVKYKTDMSGSMYKIDAEEASWNSDKEYEGGNMGHRPSVKGGYFPVSPVDSAQDIRSAMCLIMEEMGLTVEAHHHEVATAGQNEIAALYNSIVEKADEVQITKYVIHNVAHAYGKTATFMPKPLVGDNGSGMHCHQSLQKNGENIFSGDLYGGLSETALYYIGGIIKHAKAINAFANPTTNSYKRLVPGFEAPVMLAYSARNRSASIRIPIVPSPKATRIEVRFPDPAANPYLAFSAMLMAGIDGIKNRIHPGDAMDKDLYNLPAEEAAEIPQVASSLEEALSALDTDRDFLTAGDVMADDTIDAYIAIKEQEVERLNMTTHPIEFEMYYSV

SEQ ID NO: 12920 - protein, 461 aa, Pteridophyllum racemosum; identical to SEQ ID NO: 9576

SEQ ID NO: 12921 - protein, 520 aa, Mycobacterium sp. MCS
MTTTEPAPPESATGRPSPRWRALLLAAVAACAACGLVYELALLTLSSTIHGGGIVATSLIVAGYVAALGAGALAVKPLLGHAAITFVAVETLLGVIGGLSAAALYVTFAFIGGSTWVLVVGTALIGGLVGAEVPLLMTLLQRGRTAGAADSGRVLANLNAADYFGALVGGLLWPFLLLPHLGMIRGAAATGVINLVAAAVVAVFLLRHIVSGRQLAVALGALSAALVLLVTLLIRADGIETTTRQRLYNDPIVAFARSPYQEIVVTRRGDDLRLYLDGGLQFSTRDEFRYTESLVHPALGQGARSVLVLGGGDGLAARELLRQNQIRDITQVELDPAVIDLARTTLREANRGALDDPRVTVVVDDAMTWLRGVDRTFDAVIVDLPDPDTPVLGRLYSTEFYALVTRALAPDGLMVVQAGSPYSTPTAFWRTVSTIESAGFAVTPYHVHVPTFGDWGFALARRGPTPPAPTVPEGVGPLRFLNQEVLDAATVFSADVARQRLEPSTLEHPRIVDDIRKGYR

SEQ ID NO: 12922 - protein, 647 aa, Saussurea medusa
MAGKGEGPAIGIDLGTTYSCVGVWQHDRVEIIANDQGNRTTPSYVAFTDSERLIGDAAKNQVAMNPTNTVFDAKRLIGRRFSDASVQSDIKLWPFKVTPGPAEKPMIAVMYKGEEKTFAAGEISSMVLIKMKEIAEAFLGSTVKNAVVTVPAYFNDSQRQATKDAGVISGLNVMRIINEPTAAATAYGLDKKATSVGEKNVLIFDLGGGTFDVSLLTIEEGIFEVKATAGDTHLGGEDFDNRMVNHFVQEFKRKHKKDITGNPRALRRLRTSCERAKRTLSSTAQTTIEIDSLYEGVDFYSTITRARFEELNMDLFRKCMEPVEKCLRDAKMDKSSIHDVVLVGGSTRIPKVQQLLQDFFNGKELCKSINPDEAVAYGAAVQAAILSGEGNEKVQDLLLLDVTPLSLGLETAGGVMTVLIPRNTTIPTKKEQVFSTYSDNQPGVLIQVYEGERTRTRDNNLLGKFELSGIPPAPRGVPQITVCFDIDANGILNVSAEDKTTGQKNKITITNDKGRLSKEEIEKMVQEAEKYKSEDEEHKKKVEAKNALENYAYNMRNTVKDEKIGEKLTPGDKKKIEDAIDEAISWLDSNQLAEADEFEDKMKELENVCNPIIAKMYQGGAGDAAGGMDEDAAPSGGGAGPKIEEVD

SEQ ID NO: 12923 - protein, 509 aa, Tropheryma whipplei TW08/27
MTLQGKPYRLSDLIKQTGVRLTDCSNQFSDRFVSGITQIAQSVERDDIFVAFQGKTRHGVEFLDQVQSCAAVLTDNKGRHIMQSDCLPTRSTPILVTDSPRSDLIVLAKRVYPIDDIRIFGITGTNGKTSTMHIAAKLLEMMGISCGISTTIGSSASESDSCLTTPELCQLYARIFTAKQARADFFALEASSHAINRGRLGDIVLEVAAFTNLTPEHMEEHKNMEAYYQAKKALFLNKRSNSAVINIDTPYGIRLFKETGCSASVISENTKYGLDHKLFWQASVRRVGLSFGFTLISPSGYRVESSISLLGKAFALNTCMAIVILCNLGIDIERIDSVLRKAGGLKMVLPGRMEVFQTGNSPRVIVDHGHTVDAVETALVAAKSITRGRLITIINADGQRDPSKRKHLGQLCGAYSDKLFITDGHSRFENPAEIRRMILDGVEGPRKQVEQIPSMTQAVLAAIDIAKSDDTVLCSGFGDDPYLDVLGKKIPYSLRDEVRRGLERFAQGT

SEQ ID NO: 12924 - protein, 464 aa, Sarcandra glabra; identical to SEQ ID NO: 9578

SEQ ID NO: 12925 - protein, 465 aa, Sarcandra glabra; identical to SEQ ID NO: 9579

SEQ ID NO: 12926 - protein, 207 aa, Daucus carota; identical to SEQ ID NO: 286

SEQ ID NO: 12927 - protein, 423 aa, Smilax rotundifolia; identical to SEQ ID NO: 9580

SEQ ID NO: 12928 - protein, 394 aa, Smilax rotundifolia; identical to SEQ ID NO: 9583

SEQ ID NO: 12929 - protein, 834 aa, Debaryomyces hansenii CBS767
MNLGPPDISLTFSELSLNEEKDESQRKHSKEKPKPSLNAQVKSNDRSKDKHKYKPKPQFPIAKSKYNNIENRTTKPDELKASTKQTIKPSLLERDEKKTSIRSADTRKSMSTLKSGKFSSLNNNKSFGTQVETNRVVTTFKSNIYASLGSHKKAATPRTEKIKPPTTKNSSREYFKVHDRWANYSKTKNPGLVVANSRNKESEVFGAKRTNDDESASNSLLANLANKYEHDFEEEEVKPEDCIVDGLNVSLLPHQVSGLRFLKRREAIKGSSQGGLLCDDMGLGKTIQTITLILENKGKCEHKTNLIVCPVSLTNQWKSEIESKASGLSVMIFHGPDRPKKYEELAEYDVVITTYATVSSEFHKSGSPSALYSPEFRWWRIILDEAHQIKNKNSKQAIAVFNLDADRRWCLTGTPLQNNLGELQSLFKFIRVSKYADDKIWLDTIQRSLQERDMYTALFELRDELSNLMLRRTKAILSSSHNTFKLPPKNVHKIMVEFSEFERSIYNNVKHIILSNLNNGPARDKKTEVVRDNAPTLKLKKEITQAKTGNVNYMSALVYLLRLRQLCCSWNLLFEDTEDSLNFEGKLTTSNDKDTSLDNLITSMGGLSVDSKNCEICMKRLDANNQSTDGTRFCKACGESVKVPKHHEDDYYVSSKIKQVLEILMTNRDRKTIIFSQFPSLFKVLGDTLSTKGFKILTYDGSMDIKARNFALNSLKNDPDMNVLLCSLKCGSVGLNLTCASQVILFDPWWNPQIQEQAIDRVYRIGQTKPVDIYELTVKNTVEDNILKLQKTKRQLANAVTSNSSKINANSISNNLTKKELLQLFGIEEPNNLS

SEQ ID NO: 12930 - protein, 385 aa, Triticum aestivum
MEGGDARNGLTGTSQTTGSGVESPAKPLPPCCVKARAAAPESEAKCHATVVSGWFTETRSRCGKASKLQYYNNPMWPGETHSLKVDKILYQGKSPYQEVLIFESLTYGKVLVLDGIVQLTDKDECAYQEMITHLPLCSIPSPKKVLVIGGGDGGVLREIARHGSVESIDICEIDQLVIDVCKDFFPDLSVGFEDPRVRLHVGDAVEFLRNSPEGTYDAIIVDSSDPIGPAQELVEKPFFETIARALRPGGVLCNQAESMWLHTHLIQDMLSICCETFKGSVHYAWASVPTYPSGAIGFLLCSKEGRPVNFLAPINPIEKIEGAMTAGRDIRFYNTEMHRAAFVLPTFAKRELEAYGGSTRGAQQEEKSAEPAKVAVAPHSEILTA

SEQ ID NO: 12931 - protein, 369 aa, Bacillus cereus E33L
MPKHRKQSKIKIYRITSYKKDKRSELDSNKFELEQQELENKQDKQGKQDKQDNQDNQDNQVQSENVVIVPTDSHNLDIWDEISLKEIQAGEHTSLFAEQSDYQNINLLQVSDIRLYLDKQLQFSSVDEQIYHEALVHPIMSKVIDPKRVLILGGGDGLALREVLKYETVLHVDLVDLDGLMIDMARNVPELVSLNKSAFFDNRVNTHVCDAKEFLSSPSSLYDVIIIDFPDPATELLSTLYTSELFARIATFLTEDGAFVCQSNSPADAPLVYWSIGNTIEHAGLTVKSYHTIVPSFGTDWGFHIAANSADVLNQIEQLYVVPTPRTLPSLLFPLFQFREEHLEQRNLALLNSESNLILHQCYKQEMEF

SEQ ID NO: 12932 - protein, 475 aa, Bartonella henselae str. Houston-1
MVVKNGKQIKSKGSKLVSDFLKNLRGVDNWEQVSQWLAFRNVEDIECITPDQAGVPRGKMMLSKKFTSKTSLALPSAVFMATISGDYPEDGHGFEYPKTDGDLRLEPDLSTLSIVPWEEAPTAQVICDLVYQNGEVVDYTPRNVLRTVIDFYTQMGLKPVVSPEIEFYLVQKNPDPDYPLVPPVGRSGRSIGGGQGYSIAGVNEFDDLIDDIYHFSEAQGLEIDTLIHEEGAGQFEINLRHGDPIELADQVFMFKRTIREAALKHNMYATFMAKPIQGQPGSAMHIHQSVVDKKTGMNIFTQKDGKESVCFRHFIGGLQKHMAGVFVMLAPYVNSYRRLVPDLSAPVNLRWGYDNRTTAFRVPRSAPKGRRVENRLPSSDANPYLALAASLVCGLIGLQQKLEPDEPTTKNVNADNIELPRGLIEAVNLFEQDTAVRAILGEVFVSTYAAIKRQEFETFMEVISPWEREYLLLNV

SEQ ID NO: 12933 - protein, 396 aa, Candida albicans SC5314
MDSPFWQKTFSARPRSTVPSYLITAFLICANVWPLSAIIGGSSHFLETDPSFPTYPRKMNQYEVDSGFVLPYVLKATIGNGGVGALLLIFYLAVTSTVSAQMVSVSSIVTFDIYKRYFKPDAQNKSMIRVSHITCIVFGFGIAGFSIMLHYVGINMTWYTYFYPILICPGVIPIILTVTWDRQTFWAAFISPLAGFAAGLAVWLSTAYHFYGEVTIASTGGQLPALYSSLTALLLPGVLSIIISLIKPKKFDWNQLKKADLLVKSDDSSQDEQVSETDREKVEKNDQVEVNVDSDRNSSLEQQEHPTKLTEKELDFWIKIATGAAIFILLITWLIWPMSVYRDWIFTPTYFKGYVTVGLIWLYVTLIVIGVIPFYTGRHSMAKVFKGVYNDYIKKK

SEQ ID NO: 12934 - protein, 141 aa, Brassica napus
MGEAVEIMFGNGFPEIHKDTSPIQTLLSNQQDCHWYEETIDDDLKWSFALNSVLHTGTSEYQEIALLDTKHFGKVLVIDGKMQSAERDEFIYHECLIHPALLFHPNPKTVFIMGGGEGSAAREILKHKTIEKVVMCDIDQE

SEQ ID NO: 12935 - protein, 232 aa, Candida albicans SC5314
MSESAVHLLDQAAGYGVLVGVGALFAGGMILTTFLLQRYLHENANSTETFAVANRSVGTFLSASAVYSSWSWSTEFLLVSSMTYNYGIQAGYYYGAGLAIQIAVMSVIGIHAKKKIPTAHTSLEAIELRYGKSAHLLYLTLSLICNICSCSAMILACASGISIIAGNLHIVASTLLIPFGVLLYTVVGGLKATFLTDFVHSSILLIILCYLNTSVLTSEQVGGLNGLYDQIA

SEQ ID NO: 12936 - protein, 876 aa, Gloeobacter violaceus PCC 7421
MRILQTHALRGPNYWSIRRHNLIVMQLDLEELEEKPTNLIPGFDDRLLALMPSLMQHGCSEGRDGAFMERVTEGTWMGHVIEHVALELQTLAGMDVAFGRTRQTSTYGVYNVVFSYVEEAAGRYAARAAVRICRTLVAGEPYTELEQDIQELKEIREEVRFGPSTASIVEEAQTRGIPHIRLSEKSLVQLGYGIHQKRIQATTTTNTSIIATELASDKTATKGMLASVGIPVPRGTTVRRLADLEEAIEELGGYPVVLKPLDANHGKGITVDVRDLKTAQSAYDAAREFSKEVIVEQYITGKDYRILVINHQVVAVAERVPAHITGDGRQSIHELIDQVNRDPRRGFGHENVLTLITIDEMTQRILDLRGHTLDTVLAEGEICYLKSTANLSTGGTAIDRTDLLHPNNAFLAERVSRNIGLDICGIDLICPDISQPINEVGGAVIEVNAAPGFRMHIAPSEGLPRNVAEPVVDMLFPPGAKTRIPIIAVTGTNGKTTTTRLIAHILRGIGLRVGFTTTDGVYIQNQMVMKGDMTGPFSAKLVLKDPTVEAAVMETARGGILREGLGFPVCDIAVVLNVTADHLGLKGVETLEDLARVKSVVPESVHPDGFVVLNADDELVADMAHDAKAPVSYFSLDPQSPLIQDHVSRGGIAAVFEEGHVSILKGAWKLRVERVVNIPLTLSGRAVFMIQNVLAATLAAFLHGIKIDDIRAGLGSFVPSPAQTPGRLNVFDVNGFEVIVDYAHNPAGYEAIQQVLERMDNPRKIGVIGGPGDRRDEDLRKLGYLAAGMFDAAIVKEDDDRRGRAPDEAASLIVEGIKQRNPEFPFQTILDEAEAVEHALRNAACSDLVVIFPADVQRTIQIISRVKEESDPVRLP

SEQ ID NO: 12937 - protein, 469 aa, Solibacter usitatus Ellin6076
MTPQEVLDYAKTNGAQQLDLRFTDIPSLQHHVSYPMNQVDESSFEEGFGMDGSSIRGWAAIHESDMLLIPDSTTAFMDPFAEVPTLVMYGDVKDPITKQRYERDPRWIAQKAELYLKNSGVADTSYFGAEAEFFIFDNVSFDQNQHSGFYYIDAEEGRWNSGRRENNLGYRPRYKEGYFPVPPTDHYQDLRSEMVRTMIECGLNIECHHHEVATGGQCEIDQKYDTLVRSADNMMLYKYVVRNVANQYGKTVTFMPKPIFGDNGSGMHCHQSLWREGKPLFAGDSYAGLSQMALHYIGGLLKHARALSAIIAPTTNSYKRLVPGYEAPVNLAYSRRNRSAAVRIPMYSASPKTKRVEFRPPDASANPYLAFAAMLMAGLDGVMNRINPGEPLDKDIYDLSPEEMKSVPSMPGSLDEALTCLEDDHGFLMRGDVFTEELLETFIDYKRKNEAEAVRLRPHPYEFALYYDI

SEQ ID NO: 12938 - protein, 541 aa, Zea mays; identical to SEQ ID NO: 12657

SEQ ID NO: 12939 - protein, 315 aa, Brassica napus
MISLTVTTPSLRMETEDMHSKSESGNQIVSEAHHHTSSTSINSLNPWLRAAASCNANSSVEEAGDKSIALENQTNLESSNGSKSPSNRDENGNKESQVTASPQQSAADYSEKSQELVHPGSTPPPHPQLVSHTVGWASSNPYQDSYYAGMMGAYPLTYVPHGGMPHSRMQLPPEMAQEPVYVNAKQYQAIMRRRQARAKAELEKKLIKSRKRYLHESRHQHAMRRPRGTGGRFAKKTNTEASQQKDGEKRNACATQSPTSSHSDQHEGCSDEYRTNQSDEMQSSAYKIREEADCSGQQWNNISSNHPSQPLLAIK

SEQ ID NO: 12940 - protein, 91 aa, Zea mays
MRRAVTENGKIARDARESIQECVSEFISFITSEASDKCVKERRKTINDDDIIWSLGTLGFEEYVEPLKIYLNNYQEGDIKGSKSSDQNGKK

SEQ ID NO: 12941 - protein, 458 aa, Triticum aestivum
PSKTQVILKCDFSAWQKAYYEQVASKGKVALGSGLKPKAVANLSMQLRKCCNHPYLFVEQYNMYQREEIVRASGKFELLDRLLPKLHRAGHRVLLFSQMTRLLNILEVYLQMYNFKYMRLDGSTKTEERGKLLADFNKKDSEYFIFLLSTRAGGLGLNLQTADTVIIFDSDWNPQMDQQAEDRAHRIGQKNEVRVFVLVSVGSIEEEILDRAKQKMGIDAKVIQAGLFNNTSTAQDRKALLQEILKRGTSTLGTDIPSEREINRLAARTEEEFWLFEKMDEERRRRENYKSRLMQGPEVPEWVFDISETLAEKLLAEEAKNPVINTKRRRKEVVYSDSYVDQWMKSDEVYEDIPKMTPRAKRSAYLSDIQEVDLHDRAKRLKYSDSADGAGNSTWTPEKGRAGVSSYSKDENEDDNDEDEVTAGGLQQGGSFTWNTLRRKRSSHSTNPSSDPKGRSAF

SEQ ID NO: 12942 - protein, 556 aa, Mesembryanthemum crystallinum
MAFDLSNLVSTKLQMLSTSDHASVVSMNLFVALLCGCIVIGHLLEENRWMNESITALAIGLATGVVILLFSGGKSSHLLVFSEDLFFIYLLPPIIFNAGFQVKKKQFFRNFITIIVFGALGTLVSFTIISLGAMEFFKKLDIGSLELGDYLAIGAIFAATDSVCTLQVLHQDETPLLYSLVFGEGVVNDATSVVLFNAIQNFDLTHIDHRIAFKFAGNFLYLFFTSTLLGAITGLLSAYIIKKLYFGRHSTDREVALMMLMAYLSYMLAELFYLSGILTVFFCGIVMSHYTWHNVTESSRVTTKHAFATLSFVAETFIFLYVGMDALDIEKWRFVSDSPGISVAVSAILLGLLMLGRAAFVFPLSFLMNFSKKSQSEKVSFRQQVIIWWAGLMRGAVSMALAYNQFTRAGHTQLRGNAIMITSTISVVLVSTVVFGLLTKPLILFLLPQPKHFNSTSTVSTDLGSPKSFTLPLLGDHQDSETDLGNHQDSTDRHIGRPTSLRMLLNAPTHTVHYYWRKFDDSFMRPVFGGRGFVPFVPGSPTEQSTNNLNHSTEST

SEQ ID NO: 12943 - protein, 479 aa, Physcomitrella patens subsp. patens
MSTSKRQQIDSLSILLQISMLGLAFVFGHILRRHKFYYLHEGSASLLIGLVVGALARFTYPQDRFSNWFNFHEGFFFLFLLPPIILYPSSNCFRILCGPFFSNFGAICTFAILGTLISAMVTGGFVYLGGRLSLVYKLPLLESCIFGSIISATDPVSVLAVFQELGTDVNLYALVLGESVLNDAVAVSLYRSLVSVRQNLSASYNVTIAIIRFFITFLGSLFSGIHNSPEKPKLAMHLFKFAGLHVHKLQHLECCLIVLFPYFAYMFAEGLGLSGIVAILLCGILMKHYTFPNLSESAQSFTAGFFHLIVSLAETFVFMYMGVDIANERHSNWLHISFILFSVKIHHVTLDDVYLIFRAINVYPLAYCINKLRSASRKIPIQHQNALWFSGLRGAMAFALALQSVHNFQDSHGQVIFTTTTTIVILTVLVIGGSTSTMLENLNLNKEKDEYSKVSVSENLNNPLIFFGKIGLHLRESFH

SEQ ID NO: 12944 - protein, 1134 aa, Selaginella martensii; identical to SEQ ID NO: 9600

SEQ ID NO: 12945 - protein, 225 aa, Pinus echinata
ANPFYKPGEIAKQAKAAGARIIVTLAAYVEKLADLQSHDVLVITIDDAPKEGCQHISVLTEADETQCPAVKIHPDDVVALPYSSGTTGLPKGVMLTHKGLVSSVAQQVDGENPNLYFHSDDVILCVLPLFHIYSLNSVLLCALRAGAATLIMQKFNLTTCLELIQKYKVTVAPIVPPIVLDITKSPIVSQYDVSSVRIIMSGAAPLGKELEDALRERFPKAIFGQ

SEQ ID NO: 12946 - protein, 312 aa, Burkholderia sp. 383
MFRHGFPSNRPPPIIQTSELPALSGPPVSTTLLFHPTPDAAYGFPNARRLARVASPHQQIEVWETPQLGRLFTLDGRPMTSVGDEYVYHECMTHPAALAHPAPRRALVLGGGDGGAARQLLKHACIERIVIAELDDEVVGMARRYLDDVHQGALDDPRVEVVIGDAAHFVESTVEHFDLVVFDLTPPDSPAAGLYTRAFYARLKRILTPCGAISMHLGSPVFHAARIAALLDDLRACFAVVDPLSAHVPLYGSQWLMAIASDTLDAAALFAHDIDERLAARRVQGLRYYDARLHASLFALPCALRDTLGVRR

SEQ ID NO: 12947 - protein, 159 aa, Burkholderia cenocepacia J2315
MSTLYSFSAETLAGAPVSLDAYRGKVLLIVNTASECGFTPQYAGLQKLYDLYAARGFFVLGFPCNQFGKQEPGDAAQIGAFCERNYGVTFPMFAKIDVKGDHAHPLYRYLTDAAPGILGLKAIKWNFTKFLIDREGRIVKRYAPSTKPDEIAADIDKLL

SEQ ID NO: 12948 - protein, 225 aa, Pinus ponderosa
ANPFYKPGEIAKQAKAAGARIIVTLAAYVEKLADLQSHDVLVITIDDAPKEGCQHISVLTEADEAQCPAVKIHPDDVVALPYSSGTTGLPKGVMLTHKGLVSSVAQQVDGENPNLYFHSDDVILCVLPLFHIYSLNSVLLCALRAGAATLIMQKFNLTTCLELIQKYKVTVAPIVPPIVLDITKSPIVSQYDVSSVRIIMSGAAPLGKELEDALRERFPKAIFGQ

SEQ ID NO: 12949 - protein, 392 aa, Spathiphyllum wallisii; identical to SEQ ID NO: 9603

SEQ ID NO: 12950 - protein, 168 aa, Rhodospirillum rubrum ATCC 11170
MSPLYDIEVTTLDGAPQTLADYAGKVLLIVNVASKCGFTPQYKGLEALQRRYRDRGFCVLGFPCNQFGHQEPGDAGEIKSFCTLTYDVSFPMFAKIDVNGPDAHPLYRLLKAEAKGLLGSEAIKWNFTKFLVSADGETISRFAPTDTPESLRARIEALLPAAQGPLGA

SEQ ID NO: 12951 - protein, 465 aa, Spathiphyllum wallisii; identical to SEQ ID NO: 9608

SEQ ID NO: 12952 - protein, 131 aa, Arabidopsis thaliana
MGKKCDLCNGVARMYCESDQASLCWDCDGKVHGANFLVAKHTRCLLCSACQSLTPWKATGLRLGPTFSVCESCVALKNAGGGRGNRVLSENRGQEEVNSLCSDDEIGSSSAQGSNYSRPLKRSAFKSTVVV

SEQ ID NO: 12953 - protein, 467 aa, Tacca chantieri; identical to SEQ ID NO: 9611

SEQ ID NO: 12954 - protein, 489 aa, Exiguobacterium sibiricum 255-15
MNLLDKHLSELIAPFHLTCEVNPSITGIATDSREVTKGCLYICVRGYTVDGHQYAEEAVANGAVAILAEEPIDGVEVPVVLLQDTKHAAGKVADLFYDHPSHKLKVYGITGTNGKTTTTKLTYDLFRAAGQKAGMISTIGAMIDGEMIDTPNTTPEAIILHRLLYQMVEQGVTDCVLEVSSHALMEGRVEGVKFHAAAFTNLTHDHLDYHASMEEYAQAKALVFKQVATSGGQAVILNEADPKSRVMEKAAEGVPVIWYATKALSEAPITVEWKEETVSVRIDGTVTEVPVFLLGDFNAANLAAAIGLMQAGNVNMYQLIRHIPELRLPKGRLEQIPFEGCEVYIDYAHTPDGLEKCLKALSVPGEPLYMVLSAAGERDRSKRAVMGRIAGQYCEGIIVTVHDPRREQPQQIIKELLVEIPPRKIITCHESRKEALQIAAKVALTGKRMVIVGKGHERFEQIGTEHVPFDEVKILTDELIRLSGQETAM

SEQ ID NO: 12955 - protein, 664 aa, Oryza sativa Japonica Group
MALELSLVSASPPGGLAASPPPPAAIPGKEQQVAGVGILLQISMLVLSFVLGHVLRRHRFYYLPEASASLLIGLVVGGLANISNTETNTRTQSGFSLSPKPFFANFGAIVTFAILGTFIASVVTGVLVYLGGLTFLMYKLPFVECLMFGALISATDPVTVLSIFQELGTDVNLYALVFGESVLNDAMAISLYRTMSLVRSQAAAGENFFMMVFQFLETFVGSLSSGCITAQNILNYFKGTFGIVVLELDLSLLLYPFPKFYMETLFAKHERLCMLSIDHVKLQYLCITIYHLLIACFTVNYFIYYLILCNLDHSVYLFKYAGLDIDKYMLAEGLGLSGIVSILFTGMVMKHYTFSNLSNNSQRFVSAFFHLLSSLAETFVAVNVFSCAYLVNMSRPEHRRIPLKHQKALWFSGLRGAMAFALALQSANELPGGHGKTIFTTTTAIVVLTVLLIGGSTGTMLEALDVIGDENRSIENYDDNNGYIPPTYEEGSSSGGGLRMKLKEFHKSTTSFTALDRNYLTPFFTSQTDEDDDVFVLRNTSSGCAAAAACADQYSAATPDNSSVTFGDDEADNESHSSEGYEPEAKCWKEDADNEGSSGGMGGGAGGKPVRKPRLVVHTLSDIDVNIDILDAGFRWRKYGQKVVKGNPNPRSYYKCTTVGCPVR

SEQ ID NO: 12956 - protein, 465 aa, Tetracentron sinense; identical to SEQ ID NO: 9612

SEQ ID NO: 12957 - protein, 228 aa, Arabidopsis thaliana
MAESQTGGGGGGSHESGGDQSPRSLNVREQDRFLPIANISRIMKRGLPLNGKIAKDAKETMQECVSEFISFVTSEASDKCQREKRKTINGDDLLWAMATLGFEDYIDPLKVYLMRYREMEGDTKGSGKGGESSAKRDGQPSQVSQFSQVPQQGSFSQGPYGNSQSLRFGNSIEHLEVLMSSTRTLFITIFRDSTMPVVSENLSDPLSIDMDCEAIYHHFIGLLILSCK

SEQ ID NO: 12958 - protein, 390 aa, Tetracentron sinense; identical to SEQ ID NO: 9614

SEQ ID NO: 12959 - protein, 535 aa, Cupriavidus taiwanensis
MRKTLKNISLVSVGLVAGVLATLQISATAQNSSGPLPLDQLRLMADIFGQIKREYVEPVDDKKLLTEAIKGMVASLDPHSSYLDEKDFKELQEGTRGRFAGLGIEISQEEGLVKVINPIEDTPAFRAGIQPGDLITRIDDKPVRGLPLEQAVKRMRGEPGTKVTLTIYRKSEERTFPVSITRAEIRVQSVKAKMLDNNIGWIRLTSFQERTISDLARKLTELSQKNPNMKGLVLDLRNNGGGVLQGAVGVAAAFLPEDATVVSTNGQVPDAKRVYKATYNNYRLSSLEDDPLKDLPALFKKIPMVVLTNAYSASASEIVAGALQDHHRAQIMGKTTFGKGSVQTVRPLTNDTGIKLTIAYYYTPSGKSIQAKGIRPDIPVDQNPEGDPDDALITREIDTERHLHNKQESEEPEMTEREQRRVEELRRLEEENAKKTPEEREKERRKKPVEFGSADDFMLQQAIAQLNGQPVKRSKSRLETNPPADNGKAAKPSGKSGAKGASVPAAKPAAPAPGKQPPASAPIGEPLGTPTGKAP

SEQ ID NO: 12960 - protein, 343 aa, Arabidopsis thaliana
MEGDVGIGLVCQNTMDGKASNGNGLEKTVPSCCLKAMACVPEDDAKCHSTVVSGWFSEPHPRSGEAHSLKVEKVLFKDKSDFQEVLVFESATYGKVLVLDGIVQLTEKDECAYQEMIAHLPLCSISSPKNVLVVGGGDGGVLREISRHSSVEVIDICEIDKMVIDVSKKFFPELAVGFDDPRVQLHIGDAAEFLRKSPEGKYDAIIVDSSDPVGPALALVEKPFFETLARALKPGGVLCNMAESMWLHTHLIEDMISICRQTFKSVHYAWSSVPTYPSGVIGFVLCSTEGPAVDFKNPINPIEKLDGAMTHKRELKFYNSDMHRAAFALPTFLRREVASLLAS

SEQ ID NO: 12961 - protein, 170 aa, Vitis vinifera
MGASQSGSEKSIHEFRVKDYKAKDVDLSVYKGKVLLVVNVASKCGLTDSNYTQLTELYNKYKDRGFEILAFPCNQFLKQEPGSSEQAQEFACTRYKAEYPIFHKVRVNGPDAAPVYKFLKAHKSGFLGSRIKWNFTKFLVDKEGTVLARYGPTTAPLTIEADIQKALGDK

SEQ ID NO: 12962 - protein, 517 aa, Burkholderia cenocepacia J2315
MRMNLKNIGLIAAGLATGVFATLQVSASAEQTATAPLPLDQLRLFAEVFGQIKREYVEPVDDKKLLTAAIKGMVSSLDPHSSFLDKTDYDELQEQTKGRFAGLGIEISQEDGLVKVISPIEDTPAFRAGIRPGDLITRINDKPVRGMTLDKAVKQMRGEPGTKVTLTIFRKSDDRTFPVTVTRAIIKVQSVKMKMLDPGYAYVRITSFQERTTPDLAQKLQDIARQQPNLKGLILDLRNNGGGLLQSAVGVAGAFLPPDSVVVSTNGQIPDSKQVYRDTYDNYRLPSFDGDPLKNLPPIFKTVPMIVLTNAYSASASEIVAGALQDSKRAQIMGKTTFGKGSVQTVRPMTADTALRLTTAYYYTPSGRSIQNKGITPDVPVDQYADGDPDDVLVTREVDYTNHLANTQDPNEKKEQEEREQRRMDQLRILEEQNDKKTPEQRQKDRDRKPIEFGSADDFMMQQALNKLEGKPVQESKSLLAESTTKSPAAKAATASKASGASAAKPASAPKPASAPK

SEQ ID NO: 12963 - protein, 654 aa, Oryza sativa Japonica Group
  misc_feature (561)..(561): Xaa can be any naturally occurring amino acid
MARPRRASTMQLGLFLAALLLLTPSPAGSVAAAKGGGAKSGGGGTVIGIDLGTTYSCVGVYRNGHVEIIANDQGNRITPSWVAFTDGGERLIGEAAKNQAAANPERTIYDAKRLIGRQFSDAEVQRDMKLLPFAVVDRNGKPHVRVEVKDGDVRVFSPEEVSAMVLTRMKETAEAYLGEKVTRAVVTVPAYFNDAQRQATKDAGVIAGLTVDRIINEPTAAAIAYGIDKKGAEKNVLVFDLGGGTFDVSILAIDNGVFEVLATNGDTHLGGEDFDQRLMDHFVKVIRRKHGRDITGDARALGKLRRECERAKRTLSNQHQVRVEVESLFDGVDLSEPLSRARFEELNSDLFKKTMVPVRKAMADARLSKGDIDEIVLVGGSTRIPKVQQLLKDYFGGKEPNRGVNPDEAVAYGAAVQASIISGHVDENTESMILLDVAPLTLGLETAGGVMAKLIPRNTVVPTKKTQVFTTYKDKQTTVTIQVFEGERSMTRDNRLLGRFDLAGIAPAPRGSPQIEVTFEVDANGILSVLAADKATGRSEKITISGRRPQDQPGGDRPDAXEAYVYNIKNTLGGKMADAMEGEEKDKVEEAVREAYEWLDGNPDAGKEEYEEKLRELEDVCNPVMSAVYQRSGGGGGGAPEDGNVDDEDDHDEL

SEQ ID NO: 12964 - protein, 454 aa, Gibberella zeae PH-1
MARKRTKKRTHLGASNPDVDSAGHASAKDPKSMVIRIGAGEVGSSVSQLAADVRKVMEPGTASRLKERRGNRLKDYAVMCGPLGVTHLMLFSRSETGNTNLRMALTPRGPTLNFRVEKYSLCKDVQRAQKHPKGGGKEFITPPLLVMNNFTRPDSDNKSKVPRHLESLATTVFQSLFPPINPQATPLKSIRRVLLLNRETSEEDDGTFIVNFRHYAITTKSTTVSKPLRRLNAAEQFVTSKTNRKGKMPNLGKLEDVADFLIGGEAGDGYMTDATSGSEMDTDAEVEILDSTTRKVLSAKARQAAAQNETEPEAEEENVERRAVKLVELGPRMRLRLTKVEEGLASGKVMWHEYIHKNKDEIKELEKRWEQRRQEKDARKKEQKANVERKKAAKTKDGNKGEDDDEEDEFEYDSDMDVDEFDSEGLAGDAEFKVNEKMEEDGEWEDEEEEIANS

SEQ ID NO: 12965 - protein, 622 aa, Cyanothece sp. PCC 7424
MSKSDYDSFYLSHFKYFLGPNPYLNTGALVFDFSISAPSKVLPLEDYHQEISQRFPQLESYPLTSYGELFAQTVAEVNQLEMDLHLNLYSIKDERIAVQSLDYQTSIEVVDLVWDWWEAITKDQRFNYQFRLKKAQETFRFSPYGGPSSYALIESAYKRKIPTFYLPEERLTQYGYGKYQIRGVSTTFNSDSHVDLDFTTVKDDCKGFLANCGFPVPQGYVVYSLREALNSAEDLGYPVVVKPVIGHKGIGVTANIENDKELEFAYDRAVDASPNQRGQIIVEKYIPGADFRLLCVGGKFVAALERRPSYVIGDGRSTIYDLIEDENESPARQDTPTSALSPILIDKSLENYLEQQGLSLDSILERDRLVYLRKVANISAGGVSINVTPTIHPDNIILAEEIAQYFHIVCFGIDVISTDLSRSWKEGDFGIIEINAAPGIFMHLKPAIGDSIDVPGKILDYLFVSESTSRMPIITFNYLPKQTLLEIVNLVLQSHPHWTVGSICQDGMWINKSPKPLPKDYNTGVLTLLRHPKLDLLIAEYSQDIFETEGMLYEGSDLIILDEPTETEKILARDLRKEGILITKQENQVLIQRAEEQENYQLDELTSLSNLYEKQIYHLFER

SEQ ID NO: 12966 - protein, 354 aa, Hordeum vulgare subsp. vulgare
RRSRPWSPELWMQRKQDILQGSIKSRSRAHDIITKMLASLGDPYTRFLSSSDFSKMSKYDMTGIGLNIREIPDDNGSLRLVVLGLILDGPANSAGVRQGDELLSVNGSDVRGKSAFDVSSMLQGPKETFVTIKVKHGNCGPVESMKVQRQMAARTPIFYRLEKRDNENSSVGYIHIKEFNAVAKKDLVSALKRLQNSGASYFVLDLRDNLGGLVQAGIEIAKLFLNKGDTVIYTTAGDRQVQNTIVADSGPLVTTPVMVLVNNRTASASEIVASALHDNCKSCVSSARRTFGKGLIQSVFELHDGSGIVVTVGKYVTPNHKDINGDGIKPDYRRLPDLNEARDYLLRCQSKKLS

SEQ ID NO: 12967 - protein, 186 aa, marine gamma proteobacterium HTCC2143
MNPTIMKLHKIALLLLSIFASTVSAAKCNTLLDYETRKLRSDDTINLCEAYKGKVIVMVNTASQCGFTPQFKSLEQLHQRYKEQGLVVLGFPSDDFKQEHKDESKTADVCYVNYGVTFQMLATSHVTGKNANPVFAQLAKQTGVAPRWNFNKFIVGKDGKAIKYFPSGELPMGGDLEKNVIDALGI

SEQ ID NO: 12968 - protein, 182 aa, Brassica napus
  misc_feature (8)..(8): Xaa can be any naturally occurring amino acid
  misc_feature (112)..(112): Xaa can be any naturally occurring amino acid
  misc_feature (126)..(126): Xaa can be any naturally occurring amino acid
  misc_feature (148)..(148): Xaa can be any naturally occurring amino acid
MASSMLSXAAVVTSPAQATMVAPFTGLKSSAAFPVTRKANNDITSIASNGGRVSCMKVWPPVGKKKFETLSYLPDLTEVELGKEVDYLLRNKWIPCVEFELEHGFVYREHGXTPGYYDGRYWTMWXKLPLFGCTDSAQVLKEVQECKXEYPNAFIRIIGFDNNRQVQCISFIAYKPPSFTGA

SEQ ID NO: 12969 - protein, 173 aa, Arabidopsis thaliana
MAESQAKSPGGCGSHESGGDQSPRSLHVREQDRFLPIANISRIMKRGLPANGKIAKDAKEIVQECVSEFISFVTSEASDKCQREKRKTINGDDLLWAMATLGFEDYMEPLKVYLMRYREMEGDTKGSAKGGDPNAKKDGQSSQNGQFSQLAHQGPYGNSQAQQHMMVPMPGTD

SEQ ID NO: 12970 - protein, 143 aa, Triticum aestivum
  misc_feature (106)..(106): Xaa can be any naturally occurring amino acid
  misc_feature (119)..(119): Xaa can be any naturally occurring amino acid
MAAGAAPQGAPTVEEQEEAAGVGILLQISMLVLAFVLSHLLRRRRVYYLPEVCASLLIGLIVGGLASPSNAQKSTRRWFNFREELFFLFLLPPIIFQSGFSLAPKXFFSNLGAIITFAXRLGTFIASIVTGGFIPTSAGLNTS

SEQ ID NO: 12971 - protein, 384 aa, Clostridium acetobutylicum ATCC 824
MKALHFGAGNIGRGFIGYLLYKSNYETTFVDIFDKVVDDINKYKRYTVITLSTSKNKEKVENVRAVNLKDSVALEKEVLEADLITTSLGLNNLKSTGELLRGFLKKRSEINDKPLDIIACENALFASDVLKKAILDGADEELKKYLEKSVGFPNCTVDRIVPNVDIEKELPIDVAVEDFYEWDIEKNKVKINNKIIGAEYVEKLDPYLERKLFLLNGAHATIAYLGYLKGYKYIHEAIKDKEINKIIVGFHSEAVQALSEKHKIDIQILKEYSNKLLKRFENEYLKDDVSRVGRDPMRKLSSNDRLITPLKLCCDLKIDFTNILFGVASGYLFNYKEDEKAQGIQNIITKEGIKKAISNVSQIKEGDYLNNMIAYKYEELKKQN

SEQ ID NO: 12972 - protein, 645 aa, Pirellula sp.
MAQGEKIIGIDLGTTNSVVAIMEGSEPKVIPNPEGNRLTPSVVAFTDKQETIVGEPARRQAVTNPKRTVYSAKRFMGRRHNEVQSEEKMVPYGITGGPGDYVKIQVGDSEYTPQEISAKVLRKLKESAESYLGHKVNKAVITVPAYFNDAQRQATKDAGQIAGLEVARIINEPTAAALAYGLDKKKDESIIVFDLGGGTFDVSVLEVADSGDEEQESRVFQVVSTSGDTHLGGDDFDEALINYVASEFQKDNGIDLRNDAMALQRLQEACEKAKKELSTLPETDINLPFITMDASGPKHLTMKITRSKFEELIDALVERCRGPVLQALKDAGMDPKDIDEVVLVGGSTRVPKVREVVKSIFGKDPHQGVNPDEVVAVGAAIQGSVLAGDRNDVLLLDVTPLTLGIETEGGVMTALVERNTTIPAEKKNVFSTAADNQTAVTVRVFQGERKMANANRLLAEFNLEDIPAAPRGVPQIEVKFDIDQNGILSVSAKELKTGKEANVEIKDSGALSDSDIEQMQKDAEANAEEDKRQFELVEARNKVNQQVYQLEKLMGENDDKLSDDDKAPMNAAIEKVKKAAEGDDLAEIKAASDELEAASQAFSKVLYEKTDAAGEAGADAAGAAGATAGGGDDDDAIDAEFEVKE

SEQ ID NO: 12973 - protein, 682 aa, Salmonella enterica subsp. arizonae serovar 62:z4,z23:--
MNTFFRLTALAGLLALAGQSFAVEDITRADQIPVLKEETQHATVSERVTSRFTRSHYRQFDLDQAFSAKIFDRYLNLLDYSHNVLLASDVEQFAKKKTVLGDELRTGKLDVFYDLYNLAQKRRFERYQYALKVLERPMDFTGNDTFNLDRSKAPWPKDEAELNALWDGKVKFDELSLKLTGKSDKEIRETLMRRYKFAIRRLAQTNSEDVFSLAMTAFAREIDPHTNYLSPRNTEQFNTEMSLSLEGIGAVLQMDDDYTVINSLVAGGPAAKSKSISVGDRIVGVGQTGKPMVDVIGWRLDDVVALIKGPKGSKVRLEILPAGKGMKTRIVTLTRERIRLEDRAVKMSVKTVGKEKVGVLDIPGFYVGLTDDVKVQLQKLEKQNVNSIVIDLRSNGGGALTEAVSLSGLFIPSGPIVQVRDNNGKVREDSDTDGVVYYKGPLVVLVDRFSASASEIFAAAMQDYGRALIVGEPTFGKGTVQQYRSLNRIYDQMLRPEWPALGSVQYTIQKFYRVNGGSTQRKGVTPDIIMPTGNEETETGEKYEDNALPWDSISAAKYTKSGDLTQFGPELLKEHNVRIAKDPEFQYIMKDIAHFNAIKGKRNIVSLNYAQREKENNEEDAMRLARINDRFKREGKPLLKKLDDLPKDYQEPDPYLDETVKIALDLAHLEQEKPAEQAAAGK

SEQ ID NO: 12974 - protein, 526 aa, Mesembryanthemum crystallinum
MEDQLISPADSRGSPAKEQQAAGVGILLQIMMLVLSFILGHVLRRHKFFYIPEVSASLLIGLVVGGLANISNTETSIRGWFNFHEEFFFLFLLPPIIFQSGFILSPKPFFSNFGAIVTFSILGTFIASVLTGLLVYLGGITFLMYKLPLIECMMFGALISSTDPVTVLAIFQELGTDVNLYALVFGESVLNDAVAISLYRTMSLLNSHMSTGQNIFTLVVGFLETFVGSLSSGVGVGFIPALLFKYAGLDIDNLQNLESCLFVLFPYFSYMLAEGLGLSGIVSILFTGIVMKHYTFSNLSEKSQQFVSEFFHLISSLAETFIFIYMGLDIVMEKHSWSHVGFIFFSIIFIVISRAVNVFSCGYLINLARPAHRKIPMKHQKAPWYSGLRGAMAFALALQSVHDLPEGHSQTIFTATTAIVVLTVLLIGGSTGTMLEALQVIGDSNEGHIGDGFNRSDGYVSPSQDEEESSSNRFKMRLKEFHRSAPSFSSLDKNYLTPFFTTQSGDEEEHETLMPSPRREVYLSRN

SEQ ID NO: 12975 - protein, 225 aa, Pinus radiata
ANPFYKPGEIAKLAKAAGARIIVTLAAYVEKLADLQSHDVLVITIDDAPKEGCQHISVLTEADETQCPAVTIHPDDVVALPYSSGTTGLPKGVMLTHKGLVSSVAQQVDGENPNLYFHSDDVILCVLPLFHIYSLNSVLLCALRAGAATLIMQKFNLTTCLELIQKYKVTVAPIVPPIVLDITKSPIASQYDVSSVRIIMSGAAPLGKELEDALRERFPKAIFGQ

SEQ ID NO: 12976 - protein, 225 aa, Pinus contorta
ANPFYKPGEIAKQAKAAGARTIVTLAAYVEKLADLQSHDVLVITIDEAPKEGCHHISVLTEADETQCPAVKIHPDDVVALPYSSGTTGLPKGVMLTHKGLVSSVAQQVDGENPNLYFHSDDVILCVLPLFHIYSLNSVLLCALRAGAATLIMQKFNLTTCLELIQKYKVTVAPIVPPIVLDITKSPIVSQYDVSSVRIIMSGAAPLGKELEDALRERFPKAIFGQ

SEQ ID NO: 12977 - protein, 70 aa, Photobacterium sp. SKA34
MTKIYDFDVKALSGEVRSFSDYEGKVLLVVNTASKCGFTPQYEALQTLYEKYRDQGLVILGFPCNQFGGQ

SEQ ID NO: 12978 - protein, 225 aa, Pinus merkusii
ANPFYKPGEIAKQAKAAGARIIVTLAAYVEKLADLQSHDVLVITIDDAPKEGCQHISVLTEADETQCPAVKIHPDDVVALPYSSGTTGLPKGVMLTHKGLVSSVAQQVDGENPNLYFHSEDVILCVLPLFHIYSLNSVLLCALRAGAATLIMQKFNLTTCLELIQKYKVTVAPIVPPIVLDITKSPIVSQYDVSSVRIIMSGAAPLGKELEDALRERFPKAIFGQ

SEQ ID NO: 12979 - protein, 225 aa, Pinus roxburghii
ANPFYKPGEIAKQAKAAGARIIVTLAAYVEKLADLQSHDVLIITIDDAPKEGCQHISVLTEADETQCPAVKIHPDDVVALPYSSGTTGLPKGVMLTHKSLVSSVAQQVDGENPNLYFHSEDVILCVLPLFHIYSLNSVLLCALRAGAATLIMQKFNLTTCLELIQKYKVTVAPIVPPIVLDITKSPIVSQYDVSSVRIIMSGAAPLGKELEDALRERFPKGIFGQ

SEQ ID NO: 12980 - protein, 327 aa, Arabidopsis thaliana
MIFSVVRSSLPYIFRFTSHQNHHLSQTLVPPLSHFSEIFTRAITMDAKETSATDLKRPREEDDNGGAATMETENGDQKKEPACFSTVIPGWFSEMSPMWPGEAHSLKVEKVLFQGKSDYQDVIVFQSATYGKVLVLDGVIQLTERDECAYQEMITHLPLCSIPNPKKVLVIGGGDGGVLREVARHASIEQIDMCEIDKMVVDVSKQFFPDVAIGYEDPRVNLVIGDGVAFLKNAAEGSYDAVIVDSSDPIGPAKELFEKPFFQSVARALRPGGVVCTQAESLWLHMDIIEDIVSNCREIFKGSVNYAWTSVPTYPRHWGHWIYALFN

SEQ ID NO: 12981 - protein, 515 aa, Synechococcus sp. WH 7803
MRVLLVTAMVSSAAGLTLELLLVAQASYLMGDATLATGVVVGTFLAAMGLGAWLTEFIGTKRQSLVRLLRALMLVELCLFPLCLLGPLALFWLFSRNAPLWLATVVLTVLVGLLGGMELPLITRMLETQDQLRRALARVLALDYLGSLVGALAFPLVLLPWLGLLPSAAALSLVPVGCSLALASVFPSLRRWRYPLLALFPLASVAGVLIAPLGDRIEDRFYGARVIERKQSRFQRIVLTRQGADLRLFLDGDLQFSSLDEYRYHEALVHPALAWHPAPRRILLMGAGDGLALREILRWPDVEKVDVVELDPEVVKLARRHPMLRRLNADSLQDPRVQVHLGDAYAHLRSLPNQYDVVIADFPDPDTLPVARLYSVGFYGTLRQRLNPGAVVVTQASTPFLAPRVLASIEAALREVGLLTRPYSVAIPSFGPWGFVMAHENNGSDRFRPIPFATRWLDADQLSALFAFPRDLRPEASDTVQPNRMTRPVLLDYLRNDRRRRLQQPRLLIPMTPGF

SEQ ID NO: 12982 - protein, 225 aa, Pinus chiapensis
ANPFYKPGEIAKQAKAAGARIIVTQAAYVEKLADLQSHDVLVITIDDAPKEGCKHISVLTEADETQCPVVKIHPDDVVALPYSSGTTGLPKGVMLTHKGLVSSVAQQVDGENPNLYFHSEDVILCVLPLFHIYSLNSVLLCALRAGAATLIMQKFNLTTCLELMQKYKVTVAPIVPPIVLDITKSPIVSQYDVSSVRIIMSGAAPLGKELEDALRERFPKAIFGQ

SEQ ID NO: 12983 - protein, 670 aa, Bacillus subtilis subsp. subtilis str. 168
MDIFLVVLVLLTIIAISNIVNRFIPFIPVPLIQVALGILAASFPQGLHFELNTELFFVLFIAPLLFNDGKRTPRAELWNLRAPILLLALGLVFATVIVGGYTIHWMIPAIPLAAAFGLAAILSPTDVVAVSALSGRVKMPKGILRLLEGEGLMNDASGLVAFKFAIAAAVTGAFSLAQAAVSFVFISLGGLLCGVVISFLIIRFRLFLRRLGMQDVTMHMLIQILTPFVIYLAAEEIGVSGILAVVAGGITHAVEQDRLESTMIKLQIVSSSTWNIILFILNGLVFVILGTQIPDVISVIFNDTAISNMKVIGYILVITFTLMLLRFLWVLFFWNGKWFFNKDQNIYKPGLRSTLLISISGVRGAVTLAGSFSIPYFLEDGTPFPERNLILFLAAGVILCTLVIATVVLPILTEKEEEDEERNKKLLTARRKLIKTALQTIKEDMNETNKTASLAVIAEYNEKMKNLRFQQYTSSNRIKKHERKVRAQGVKAEQEALMKMLERGDIPEETANVLQERFNELEILYANPFKVGLSKTRLKRLMYWIFFGEHKKPEMSILNEAGLIRATRVKTAKAAIEYLEKHKTDEHKEVFLSVITFYKQLIFRLEHSHHELKSSAHFENQKLEVKLKAVQAIRNEIQTLFEEREISRDISHELRQYINDVEAAMLEGGE

SEQ ID NO: 12984 - protein, 465 aa, Xanthorhiza simplicissima; identical to SEQ ID NO: 9627

SEQ ID NO: 12985 - protein, 391 aa, Xanthorhiza simplicissima; identical to SEQ ID NO: 9633

SEQ ID NO: 12986 - protein, 161 aa, Glycine max
MISYADMLKGSHGCQQLQLSSIVRDVNYSCGSCGYELNLNSSNRNTCSLIDSKSIKRGIISFFSVDESRFTQIQQLHWPSWMPFFNSKRQRTKLFCRSCGNHLGYAYTLPSQSQSWDGISDDSRIYDIKLTALLPSFCEEPSQKLEDMGKFETASSSTLVF

SEQ ID NO: 12987 - protein, 399 aa, Oryza sativa Japonica Group; identical to SEQ ID NO: 12351

SEQ ID NO: 12988 - protein, 286 aa, Salmonella enterica subsp. enterica serovar Paratyphi B str.
MAENTMWHETLHDQFGQYFAVDNVLYHEKTDHQDLIIFENAAFGRVMALDGVVQTTERDEFIYHEMMTHVPLLAHGHAKHVLIIGGGDGAMLREVTRHKNVETITMVEIDAGVVSFCRQYLPNHNAGSYDDPRFTLVIDDGVNFVNQTHQTFDVIISDCTDPIGPGESLFTSAFYEGCKRCLNPGGIFVAQNGVCFLQQDEALDSHRKLSHYFSDVGFYQAAIPTYYGGIMTFAWATNNDALRHLSSEIIQARFHAAGLKCRYYNPAIHAAAFALPQYLHDALSAQ

SEQ ID NO: 12989 - protein, 802 aa, Oryza sativa
TPSWVAFTDGGERLIGEAAKNQAAANPERTIYDAKRLIGRQFSDAEVQRDMKLLPFAVVDRNGKPHVRVEVKDGDVRVFSPEEVSAMVLTRMKETAEAYLGEKVTRAVVTVPAYFNDAQRQATKDAGVIAGLTVDRIINEPTAAAIAYGIDKKGAEKNVLVFDLGGGTFDVSILAIDNGVFEVLATNGDTHLGGEDFDQRLMDHFVKVIRRKHGRDITGDARALGKLRRECERAKRALSNQHQVRVEVESLFDGVDLSEPLSRARFEELNSDLFKKTMVPVRKAMADARLSKGDIDEIVLVGGSTRIPKVQQLLKDYFGGKEPNRGVNPDEAVAYGAAVQASIISGHVDENTESMILLDVAPLTLGLETAGGVMAKLIPRNTVVPTKKTQVFTTYKDKQTTVTIQVFEGERSMTRDNRLLGRFDLAGIAPAPRGAPQIEVTFEVDANGILSVLAADKATGRSEKITISGDDRKISQEEIDRMVREAEEFAEEDRRHREQVDARNSLEAYVYNIKNTLGGKMADAMEGEEKDKVEEAVREAYEWLDGNPDAGKEEYEEKLRELEDVCNPVMSAVYQRVLKPPQKNESSSTIVPVASARDPESSNKGAWWNGLMQHSDTRQLQVFEVAGDDGDMVEVREDLVVLMVGKLDHPGSPLDGGTDPRLDIPSGVILSFPIVVAHGAGQHSESVHRRGHLPLEQEAVGELGELPGWRTVDSAARDAEVDTGRGGPEVAPAAASTQVRATSHARRNDMTWCSSASGRALRRSSSPPPPPRAASPGLCIPSNRWPALHLPLNFHSIIACQG

SEQ ID NO: 12990 - protein, 1161 aa, Physcomitrella patens subsp. patens
MESMSTVAPAPSTAATEEVGPEVAILFVGVALFLGMVSRHLFKGSRIPYTVVLLLLGIGIGGLEYGVKNLGVLGDSIRMWSNIDPDLILFLFLPALLFESSFAMDFHQIKRCFFQMLLLAAPGVLISTFLLGVATVKVFPYNWNWSTGLLLGGLLSATDPVAVVALLKELGASKKLSTLIEGESLMNDGTAIVVFRLFLQMVLGKHFSAGDVVSFLSRVVFGAVALGLLFGIVSVIWVGRVFNDTVIEITLTLTASYMAFFVAEESASVSGVLTVMTVGIFFTAFARTAFTGESAQSMHHFWEMISYIANTLVFLLSGVVIAESILRSQDKIQGRDWGYLLLLYLFVQISRAMVVGLLYPGLKYFGYGINWKEAIVLIWAGLRGAVALSLSLSVAQVGQHDPTQNTYLSKLTEARFVFFTGGVVLLTLIINGSTTQFLLLFLKMDTITETKSRMLEFAKYEMYSKALEAFGELGDDEELGPADWNTIRKYVSCLSYEENKPTHPHGPPSFALPDGEYAKQQMTDTRTRFLNGKKLFASAGLQAAYWNMLDEGRITQTAALILMQSIDEALDKVKHHTALQDWEGLRPHIHFPGYLKYFSWRSTSVLPRRASTYFLIQQLELACYIAAAFLRAHRMTRNHLRDFIGESEVTEAVIQESEAQAQHARLFLEDVRLSFPQVLRAVKAKQVTHAILLHLTTYVESLENAGLFESKEAVHLHDAVQIDLKKLLRDPPIVEMPSAEQTLQNQPFIGAMPTSVQKPLLDVSKEYMKLQGSVIYREDMKSDGIWLITNGVVKWSKKAVGGQRLRQPTFSFGSTLGLYEVLTGKPYLCDVVADSVVHCFFVERSRILFIQKERADLEDFLWQESALAVAKIVLGPQFDMATLQDIRALVMEGSSMRIFLRGEVFELRHKEMGLLLEGFVRQENSTELITAPAGLTAKILLPSPTGSWSNISLQQPTVFHAEARSRVLLFESSKVGEILSQGSSQLLAVPRKTSRSMLRLSSKTSTNTRTKVDRHSSHNEIRIASDHSIPIAQAWGSGSSCVPDKYTAKALEISVFGSEVDVRDKRRADEIPLDAQSRFTQSHSNLVKRVSLMMQERFDNKQTSMPKRKIASQENMTVPMSLLPHQSEPKPDDSSDDSDKEEHIVRIDSPSFLFHNSRREL

SEQ ID NO: 12991 - protein, 483 aa, Shewanella sp. MR-7
MTIETPILITFVGYLVLMMGIGFWAYRATDTVDDYILGGRKMGPAVTALSVGASDMSGWLLLGLPGAVYLGGLGEAWIGIGLVVGAWLNWLFVAKRLRIYTQLADNALTLPDFFEKRFHDKQGYLKLVSAVTILVFFTFYASSGMVGGAILFEKVFGLDYNLALVIGSAIIVGYTFIGGFFAVSWTDFFQGCLMLIALLIIPFAVFSHPESHAGIESIDPAMLALISDKTTVIGLLSLLAWGLGYFGQPHILSRFMAIGSADALPLSRRIAMSWMMLSLIGALATGLAGSLYFANQPLANAETVFIHLAQAAFNPWIGGLLIAAILSAIMSTIDSQLLVCSSVITEDFYRKWLRPQADDRELMMVGRMGVLAIAVIAGIIALNPESSVLSLVSYAWAGFGAAFGPVVLLSLFWKQYSRNGAIATIIVGALTVVIWKQLSGGIFDLYEILPGFVFAIIAGVIVSKMSRPAEEITAEFEQFKSAL

SEQ ID NO: 12992 - protein, 638 aa, Pseudoalteromonas sp. SM9913
MGRIIGIDLGTTNSCVAVLDGDKARVIENAEGDRTTPSIIAYTQDGETLVGQPAKRQAVTNPTNTLFAIKRLIGRRFEDEEVQRDIGIMPFKIIKADNGDAWVEAGGEKRAAPQISAEVLKKMKKTAEDFLGEEVTEAVITVPAYFNDSQRQATKDAGRIAGLEVKRIINEPTAAALAYGMDKNRGENVVAVYDLGGGTFDLSIIEIDEVEGEHTFEVLATNGDTHLGGEDFDNRVINYLVAEFKKDQGIDLQNDPLAMQRVKEAAEKAKIELSSAQSTEVNLPYVTADASGPKHMNVKLTRAKLESLVEDLVTKSIEPLKRALADADLSVNDINDIILVGGQTRMPLVQRTVAEFFGKEPRKDVNPDEAVAVGAAIQGGVLAGDVKDVLLLDVSPLSLGIETMGSVMTALIEKNTTIPTKKSQTFSTAEDNQSAVTIHVLQGERKRSSDNKSLGQFNLEGIRPAQRGTPQIEVTFDVDADGILHVSAKDKDTGKEQKITIQASSGLSDEEVEKMVRDAEAHAEDDKKFEELVAARNQADALVHGTRKQIEEAGDALPSEDKDAIEAAVVDLEAAIKSDDKAEIEAKTQALAEKSQKLMEIAQAKAQQAGGDAGEQQQSAKQDDDVVDAEFEEVKDDK

SEQ ID NO: 12993 - protein, 634 aa, Pasteurella multocida subsp. multocida str. Pm70
MGKIIGIDLGTTNSCVAVMDGDKPRVIENAEGDRTTPSIIAYTQDNETLVGQPAKRQAVTNPKNTLFAIKRLIGRRFQDEEVQRDVSIMPFEIVAADNGDAWVGVKGEKMAPPQISAEVLKKMKKTAEDFLGEPVTEAVITVPAYFNDAQRQATKDAGRIAGLEVKRIINEPTAAALAYGLDKGQGNKTIAVYDLGGGTFDLSIIEIDEVGGEKTFEVLSTNGDTHLGGEDFDNRVINYLVDEFKKEQGVDLRNDPLAMQRLKEAGEKAKIELSSAQQTDVNLPYITADATGPKHLNIKLTRAKLESLVEDLVSRSLEPVKIALADAGLSVSQIDDVILVGGQTRMPLVQQKVEAFFGKAPRKDVNPDEAVAIGAAVQGGVLAGDVKDVLLLDVTPLSLGIETMGGVMTTLIEKNTTIPTKKSQVFSTAEDNQSAVTIHVLQGERKRAADNKSLGQFNLEGINPAPRGMPQIEVTFDIDADGIIHVSAKDKGTNKEQKITIKASSGLTDEEIQQMVRDAEANAEADRKFEELVQARNQADHLVHGTRKQLSEVGDKLSAEDKAPIEKAVADLEAAAKGEDKAEIETKVQALIQVSEKLMQAAQPQPEAQAQQAQSGKSNDDVVDAEFEEVKDNK

SEQ ID NO: 12994 - protein, 494 aa, Neisseria meningitidis MC58
MSKPVFKKIALYTLGAISGVAVSLAVQGFAAEKDRRDNEVLPVQSIRTMAEVYGQIKANYYQDKPDADLFEGAMKGMVAGLDPHSEYMDKKGYAEIKESTSGEFGGLGMEIGQEDGFVKVVSPIEDTPAERAGVKSGDFIVKIDNVSTRGMTVSEAVKKMRGKPGTKITLTLSRKNADKPIVVNLTRAIIKVKSVRHHLIEPDYGYIRVSQFQERTVESVNTAAKELVKENKGKPLKGLVLDLRDDPGGLLTGAVGVSAAFLPSEAVVVSTKGRDGKDRMVLKAIPEDYVYGMGGDSLAGIPAELKTIPMTVLVNSGSASASEIVAGALQDHKRAVIVGTQSFGKGSVQTLIPLSNGSAVKLTTALYYTPNDRSIQAQGIVPDVEVKDKERIFESREADLVGHIGNPLGGEDVNGETLAVPLEKDADKPAVKEKGKKKKDEDLSSRRIPNPAKDDQLRKALDLVKSPEQWQKSLGLAAKKPVSNKDKKDKKDKK

SEQ ID NO: 12995 - protein, 296 aa, Oryza sativa
MDPMDIVGKSKEDVSLPKSTMFKIIKEMLPPDVRVARDAQDLLVECCVEFINLLSSESNEVCSREDKKTIAPEHVLRALQDLGFREYIEEVQAAYEHHKHDTLDSPKASKFTGVEMTEEQAVAEQQRMFAEARARMNNGAAKPKEPEPEAQQQTQQPPQPQLHPQPQQPLQPQLQLHPQPQQQPSQLHPQQLLHPQSQQTPQPQPQVHPQPQQPPQLQPQPQLLQQPQLPQQLQPQSQLPPQPQQPPQLQLQSQLHPQPQQPPQLQPQPQLHQQPQPQAELQSQSQPQTEHGLDSS

SEQ ID NO: 12996 - protein, 261 aa, Pinus balfouriana
NPFYKPGEIAKQAKAAGARIIVTQAAYVEKLADLQSHDVLVITIDDAPKDGCKHISVLTEADETQCPAVKIHPDDVVALPYSSGTTGLPKGVMLTHKGLVSSVAQQVDGENPNLYFHSEDVVLCVLPLFHIYSLNSVLLCALRAGAATLIMQKFNLTTCLELMQKYKVTVAPIVPPIVLDITKSPIVSQYDVSSVRIIMSGAAPLGKELEDALRERFPKAIFGQGYGMTEAGPVLAMNLAFAKNPFPVKSGSCGTVVRNAQ

SEQ ID NO: 12997 - protein, 225 aa, Pinus flexilis
  misc_feature (18)..(18): Xaa can be any naturally occurring amino acid
  misc_feature (50)..(50): Xaa can be any naturally occurring amino acid
ANPFYKPGEIAKQAKAAXARIIVTQAAYVEKLADLQSHDVLVITIDDAPXEGCKHISVLTEADETQCPVVKIHPDDVVALPYSSGTTGLPKGVMLTHKGLVSSVAQQVDGENPNLYFHSEDVILCVLPLFHIYSLNSVLLCALRAGAATLIMQKFNLTTCLEPMQKYKVTVAPIVPPIVLDITKSPIVSQYDVSSVRIIMSGAAPLGKELEDALRERFPKAIFGQ

SEQ ID NO: 12998 - protein, 1507 aa, Arabidopsis thaliana
MDPSRRPPKDSPYANLFDLEPLMKFRIPKPEDEVDYYGSSSQDESRSTQGGVVANYSNGSKSRMNASSKKRKRWTEAEDAEDDDDLYNQHVTEEHYRSMLGEHVQKFKNRSKETQGNPPHLMGFPVLKSNVGSYRGRKPGNDYHGRFYDMDNSPNFAADVTPHRRGSYHDRDITPKIAYEPSYLDIGDGVIYKIPPSYDKLVASLNLPSFSDIHVEEFYLKGTLDLRSLAELMASDKRSGVRSRNGMGEPRPQYESLQARMKALSPSNSTPNFSLKVSEAAMNSAIPEGSAGSTARTILSEGGVLQVHYVKILEKGDTYEIVKRSLPKKLKAKNDPAVIEKTERDKIRKAWINIVRRDIAKHHRIFTTFHRKLSIDAKRFADGCQREVRMKVGRSYKIPRTAPIRTRKISRDMLLFWKRYDKQMAEERKKQEKEAAEAFKREQEQRESKRQQQRLNFLIKQTELYSHFMQNKTDSNPSEALPIGDENPIDEVLPETSAAEPSEVEDPEEAELKEKVLRAAQDAVSKQKQITDAFDTEYMKLRQTSEMEGPLNDISVSGSSNIDLHNPSTMPVTSTVQTPELFKGTLKEYQMKGLQWLVNCYEQGLNGILADEMGLGKTIQAMAFLAHLAEEKNIWGPFLVVAPASVLNNWADEISRFCPDLKTLPYWGGLQERTILRKNINPKRMYRRDAGFHILITSYQLLVTDEKYFRRVKWQYMVLDEAQAIKSSSSIRWKTLLSFNCRNRLLLTGTPIQNNMAELWALLHFIMPMLFDNHDQFNEWFSKGIENHAEHGGTLNEHQLNRLHAILKPFMLRRVKKDVVSELTTKTEVTVHCKLSSRQQAFYQAIKNKISLAELFDSNRGQFTDKKVLNLMNIVIQLRKVCNHPELFERNEGSSYLYFGVTSNSLLPHPFGELEDVHYSGGQNPIIYKIPKLLHQEVLQNSETFCSSVGRGISRESFLKHFNIYSPEYILKSIFPSDSGVDQVVSGSGAFGFSRLMDLSPSEVGYLALCSVAERLLFSILRWERQFLDELVNSLMESKDGDLSDNNIERVKTKAVTRMLLMPSKVETNFQKRRLSTGPTRPSFEALVISHQDRFLSSIKLLHSAYTYIPKARAPPVSIHCSDRNSAYRVTEELHQPWLKRLLIGFARTSEANGPRKPNSFPHPLIQEIDSELPVVQPALQLTHRIFGSCPPMQSFDPAKLLTDSGKLQTLDILLKRLRAGNHRVLLFAQMTKMLNILEDYMNYRKYKYLRLDGSSTIMDRRDMVRDFQHRSDIFVFLLSTRAGGLGINLTAADTVIFYESDWNPTLDLQAMDRAHRLGQTKDVTVYRLICKETVEEKILHRASQKNTVQQLVMTGGHVQGDDFLGAADVVSLLMDDAEAAQLEQKFRELPLQVKDRQKKKTKRIRIDAEGDATLEELEDVDRQDNGQEPLEEPEKPKSSNKKRRAASNPKARAPQKAKEEANGEDTPQRTKRVKRQTKSINESLEPVFSASVTESNKGFDPSSSAN

SEQ ID NO: 12999 - protein, 194 aa, Magnaporthe grisea 70-15; identical to SEQ ID NO: 351

SEQ ID NO: 13000 - protein, 225 aa, Pinus lambertiana
ANPFYKPGEIAKQAKAAGARIIVTQAAYVEKLADLQSHDVLVITIDDAPKEGCKHISVLTEADETQCPVVKIHPDDVVALPYSSGTTGLPKGVMLTHKSLVSSVAQQVDGENPNLYFHSEDVILCVLPLFHIYSLNSVLLCALRAGAATLIMQKFNLTTCLELMQKYKVTVAPIVPPIVLDITKSPIVSQYDVSSVRIIMSGAAPLGKELEDALRERFPKAIFGQ

SEQ ID NO: 13001 - protein, 339 aa, Sorghum bicolor
MITVAAPEAQRRWRRPAREETVFRSKLPDIDIASHLPLHEYCFARAAEVPDAPCLIAAATGRTYAVHETRLLCRKAAASLHGLGVGHGDRVMILLQNSVEFVLTFLGASFLGAVATAANPFCTPLEIHKQFRASGAKLIVTQSAYVDKLRHEAFPRIGGEDKDNALTVLTIDDVADTPEGCLAFWELVTPADDAALPEVSISPDDPVALPFSSGTTGLPKGVVLTHGGQVSNVAQQVDGANPNLYMREGDVALCVLPLFHIFSLNSVLLCALRAGAAVMLMPKFEMGAMLEGIQRRVTRGRRQRPPLALALAKNPAPEKYDLSSIRIALSGAAPIGKEL

SEQ ID NO: 13002 - protein, 225 aa, Pinus monticola
ANPFYKPGEIAKQAKAAGARIIVTQAAYVEKLADLQSHDVLVITIDDTPKEGCKHISVLTEADETQCPVVKIHPDDVVALPYSSGTTGLPKGVMLTHKGLVSSVAQQVDGENPNLYFHSEDVILCVLPLFHIYSLNSVLLCALRAGAATLIMQKFNLTTCLELMQKYKVTVAPIVPPIVLDITKSPIVSQYDVSSVRIIMSGAAPLGKELEDALRERFPKAIFGQ

SEQ ID NO: 13003 - protein, 544 aa, Oryza sativa
MGLDLGALVLKSGGLLVSDYDSIVAINIFVALLCSCIVIGHLLEGNRWVNESITALVMGLITGGVILLVSGGKNSHILVFSEDLFFIYLLPPIIFNAGFQVKKKQFFRNFMTIILFGAVGTLISFVIISLGAMTLFKKLDVGPLQLGDYLAIGAIFSATDSVCTLQVLNQDETPLLYSLVFGEGVVNDATSVVLFNAIEDIDIANFDSLVLLAFIGNFLYLFFTSTLLGVVAGLLSAYIIKKLCFARHSTDREVAIMILMAYLSYMLSMLLDLSGILTVFFSGIVMSHYTWHNVTESSRITTKHTFATLSFIAEIFLFLYVGMDALDIEKWKLASSSPKKPIALSATILGLVMVGRAAFVFPLSFLSNLSKKETRPKISFKQQVIIWWAGLMRGAVSIALAYHKFTASGHTELRINAIMITSTVIVVLFSTMVFGFFTKPLLNLLIPPRPDIAADLSSQSIIDPLLGSLLGSDFDVGQPSPQNNLQLLLTIQTRSVHRVWRKFDDRFMRPMFGGRGFVPFVPGSPVERSIHGSQLGTVTEAEHS

SEQ ID NO: 13004 - protein, 225 aa, Pinus strobus
ANPFYKPGEIAKQAKAAGARIIVTQAAYVEKLADLQSHDVLVITIDDAPKEGCKHISVLTEADETQCPVVKIHPDDVVALPYSSGTTGIPKGVMLTHKGLVSSVAQQVDGENPNLYFHSEDVILCVLPLFHIYSLNSVLLCALRAGAATLIMQKFNLTTCLELMQKYKVTVAPIVPPIVLDITKSPIVSQYDVSSVRIIMSGAAPLGKELEDALRERFPKAIFGQ

SEQ ID NO: 13005 - protein, 615 aa, Thermus thermophilus HB27
MAKAVGIDLGTTNSVIAVLEGGKPVVLENAEGERVTPSVVAFRDGETLVGRMAKRQAVLNPEGTIFEIKRFIGRRFEEVQEEAKRVPYKVVPGPDGGVRVEVKGKLYTPEEISAMILRKLVEDASKKLGEKITKAVITVPAYFNNAQREATANAGRIAGLEVLRIINEPTAAALAYGLDKKGNETVLVFDLGGGTFDVTVLEIGEGVFEVKATSGDTHLGGSDMDHAIVNWLAEEFKKEHGVDLKADRQALQRLIEAAEKAKIELSSTLETTISLPFIALDPASKTPLHLEKKLTRAKFEELIQPLLKRLRGPVEQALKDAGLTPAQIDEVILVGGATRVPAVQQVVRELLGKEPNRSVNPDEVVAMGAAIQAGVLMGEVRDVVLLDVTPLSLGVETKGGVMTVLIPRNTTIPTRKCEIFTTAEHNQTAVEIHVLQGERPMAQDNKSLGRFRLEGIPPMPAGVPQIEVCFDIDANGILHVTAKERSTGREASITIQNTTTLSEEEIQRIIEEAKRHAEEDRRRREHAELKNALDSARVQAERVLQERQGAPEARARLEAAIGKAKELVERDAPDPELKAATEELLKAVEEYEKGAQAASGKGPDDVIDADYKPAD

SEQ ID NO: 13006 - protein, 465 aa, Bacillus licheniformis ATCC 14580
MKQQLKLFLAVLITAVAASALTLYLVGKGSGGSVYSASDSEKFEKLMAAYDKIKSDYYQNADDEKLTDGAIKGMLGALDDPYSTYMDKKEAKSFEESITSSFEGIGAQVEEKNGQILIVAPIKGSPAEKAGLKPHDEIQKVDGKSVKGKTVNEATAMIRGKKGTNVKLVLNREGVGQIDVTIKRDTIPIETVYSKMIDGNIGEIQITSFSENTAKELTKAIDDLSEKGAERFVLDLRGNPGGLMDQAIMMSNMFVDKGKTIMQVESKNGKKEVYKAEKERKVNKPTVVLVNGGTASAAEIMAAALHQSSGIPIVGENTFGKGTVQNAESFSDGSTVKLTIAKWLTPNGDWIHEKGIKPQYKAELPSYAKLPYLDSKKEYKAGSTGDEVKAAQQMLQALGYKLNATGAFDAQTEAAVKAFQKDQKLKTTGILTGETTISLTSKLQDKLSDNDTQLDKAIEILKKEK

SEQ ID NO: 13007 - protein, 622 aa, Lactobacillus plantarum WCFS1
MASNKIIGIDLGTTNSAVAVLEGNEPKIITTPEGGRTVPSVVAFKDGETQVGEVAKRQAITNPNTVASIKRHMGEAGYKVSIEGKDYTPQQISAMILQYIKGFAEDYLGDTVEKAVVTVPAYFNDAQRQATKDAGKIAGLNIERIINEPTAAALAYGLDKTDKDEKILVYDLGGGTFDVSILELGDGVFEVLSTNGDTHLGGDDFDQKIIDWLVDGFKADNGVDLSKDKMALQRLKDAAEKAKKDLSGVSEAQISLPFISAGASGPLHLETTLTRAKFNELTADLVEKTRIPVENALKDADLSASDLDVVILNGGSTRIPAVQEAVEKWTGKESNHSINPDEAVALGAAVQGGVITGDVKDVVLLDVTPLSLGIETMGGVFTKLIDRNTTIPTSKSQVFSTAADNQPAVDIHVLQGERPMAADNKTLGRFQLTDIPAAPRGVPQIEVKFDIDKNGIVNVSAKDMGTNKEQKITIKSSSGLSDDEIDQMVKEAKENEEADKKRKEEVDLKNEVDQLIFTTDKTLKDLEGKVSEDEVKKAKDARDALKKAQDDNNIDEMKAKKDDLNKIVQDLSVKLYQQAQEAQGAQGGADSNAAGNANSAKGSDDNTVDGDFEDLDKDKDKK

SEQ ID NO: 13008 - protein, 225 aa, Pinus monophylla
ANPFYKPGEIAKQAKAAGARIIVTQAAYVEKLADLQSHDVLVITIDDAPKEGCKHISVLTEADETQCPAVKIHPDDVVALPYSSGTTGLPKGVMLAHKGLVSSVAQQVDGENPNLYFHSEDMILCVLPLFHIYSLNSVLLCALRAGAATLIMQKFNLTTCLELMQKYKVTVAPIVPPIVLDIAKSPIVSQYDVSSVRIIMSGAAPLGKELEDALRERFPRAIFGQ

SEQ ID NO: 13009 - protein, 1172 aa, Oryza sativa Indica Group
MDNDLHEEASTTDDDSENDSYEYLLRESDNEQTSESDAGEGDNEAPLTDEEVETLITEFLDAESKAAQAQESLEKESLEKIESEVRLELSESLQGNELESAVSTEMKQYKKEWESELDDLETHIAVLLEQLDAAGVELPSLYKSIESQVPNVCETEAWKNRAHWAGYQVPEEANKSIRKADEYLQSCRPVRRKHGRLLEEGASGFLAGKIPVGDDGSAQCHEKSWNAFNELTKSKEYAESSFGSSNWASVYLASTPQEAAALGLQFPGVDEVEEIAEVEGAVSDIKGVDEIELSEVQRRKYRKVPEEDDAKMTKRLQRHLKERRTRHLHKENIGLASSSNGCCELPPKKLKTYENGVSVELAKRTREDDVEFDNKRSKTVIIESDDDMQTDSKPDSAPSENADEIIDLDIFPSQSPKLGDKVRPKPFKCTICTEMLNVPEVHRHPVLDVIICGSCRFLVIEKNRLEDPVSGGYCTCKHKMKKRIRRIMDDEELGEETKLKIAMEKARQEHLKSMQEQSASKLKSNNIGISLEAPSEVSEYVGDGHIVNLAREEDEAPVRIPSSISAKLKPHQYRITITLVMISVQLYLYCYRKLKYIMIFQVSGIRFMWENVIQSVKKVKSGDKGFGCILAHNMGLGKTFQVITFLYTVMRCIQLGLRTALIVTPVNVLHNWKKEFIKWCPAELKPLRVYMLEDVPRCRANIQYLLKKWRIKGGVLLIGYSSFRNLSLGRSARDKTVANEITNALQMWVLIQSIYICHNQCGPDILVCDEAHIIKNRRADTTQALKQMVDFVREGYLGSSHEFRNRFQNPIENGQHTNSTSDDVKIMNQRSHILYEQLKGFVQRMDMNVVKNDLPEKKVFVVTVKLSQLQRKLYRRFLDVNGFSSSAASEKSFQRSGFFAKYQTLALIWNHPGLLQMAKQKGNLRQEDVESFLMDESSSDDNIENYLPNGEKLRSRNDQLSKKSSDVVNEESNWWENLLDENAYKEADYSGKMVLLLDILSSCSELGDKALVFSQSLSTLDLVEFYLSKLQVNGKEGKYWKQGKDWYRIDGSTPSSERQNLVERYGQTKPVYAYRLMAHATMEEKIYKRQVTKEGLAARVVDRQQVSRTISKEEMLHLFEFGDEELLEQSGSTMNGHSKVGTEKPPTPNSSETTEHLPLDRLMVNLLHDHSR

SEQ ID NO: 13010 - protein, 441 aa, Alkaliphilus metalliredigens QYMF
MNHKEALLKKAKELEVEFIHLQFTDILGVMKNVSITIEQLEKALDNEIMFDGSSIDGFVRIEESDMYLAPDLSTFIVLPWTDSPREARLICNVYKTDGTPFHGCPRNALKKVVKEALDMGYTINIGPECEFFLFHTDEKGEPSLQTHDNAGYFDLAPVDLGGNARKDMTMTLKQMGFEIEASHHEVAPGQHEIDFKYADALVTADRIMTFKMVVRIIAQRHGLHATFMPKPKFGINGSGMHINMSLETMDGKNAFYDDKDKLKLSKVAYHFLAGVLKQAKGFAAVTNPTVNSYKRLIPGYEAPVLIAWSASNRSPLVRIPAKRGNSTRIELRNPDPSANPYLALAAVLKSGIDGIKNEIDPPKPVDSNVYDMDELEMKEKGIEGLPANLYEAVKMLSTNEVVKEALGQHIFKKLTGAALYEWNEYSKDVSQWEINRYLRKY

SEQ ID NO: 13011 - protein, 159 aa, Streptococcus suis 89/1591
MSIYDFTVQKQDGTDQSMAEYQGQVLLIVNTAPGCGLAPQYKELQELYDSYRGQGFVVLDFPCNQFLNPAPGSAEDINQTCSLNYGTTFPRFAKIAVNGSEASPLYRYLKKEKSTLLGGRIEWNFTKFLVDRQGRVVKRYLPTTSPLKLKEDIELYLEK

SEQ ID NO: 13012 - protein, 155 aa, Brassica napus
MAQASRICHGVQQNPRAISNLSKSNHRKSPFSVSLKTHQQQRRAYQISSWGLKKSNNGSVIRPVKVMASVSTAEKASEIVLQPIREISGLIKLPGSKSLSNRILLLAALSEGTTVVDNLLNSDDINYMLDALNKLGLNVERDSENNRAVVEGCGG

SEQ ID NO: 13013 - protein, 495 aa, Yersinia pestis KIM
MADRNLRDLFAPWGLDVPERALREMTLDSRIAAAGDLFVAVVGHQTDGRRYIPQAIAQGVAAIVAEADGVAPDVSVAEIHGVPVIYLRNLNQHLSTLAGQFYHQPGAALRLVGVTGTNGKTTTTQLLAQWSQALGETSAVMGTVGNGLLGQVIPTENTTGSAVDIQHLLRNLVDQGATFAAMEVSSHGLIQDRVAALSFAAVVFTNLSRDHLDYHGNMTSYEAAKWLLFSTHQSEHKIINADDDVGRRWLSQLPQAVAVSMAGNVPKGWNGPWLSANKVIYHDNGASIAFDSSWGEGELESRLMGAFNVSNLLVALATLLVQGYPMAQLLAAAPHLQPVCGRMEVFNAPGKPTVVVDYAHTPDALEKALAAARLHCTGKLWCVFGCGGDRDKGKRPLMGGIAEQLADCVVVTDDNPRSEEPQAIVADILSGLLDAGRVQAIHGRAEAVTSAIMQAKEDDVVLIAGKGHEDYQLVGNRRLDYSDRVTVARLLGGQA

SEQ ID NO: 13014 - protein, 422 aa, Oryza sativa
GMGMEVAAARLGALYTTSDYASVVSINLFVALLCACIVLGHLLEENRWVNESITALIIGLCTGVVILLMTKGKSSHLFVYREDLFFIYLLPPIIFNAGFCLLEFYSWSIYSAAIAIFSRMNIGTLDVGDFLAIGAIFSATDSVCTLQVLNQDETPFLYSLVFGEGVVNDATSIVLFNALQNFDLVHIDAAVVLKFLGNFFYLFLSSTFLGVFAGLLSAYIIKKLYIGRHSTDREVALMMLMAYLSYMLAELLDLSGILTVFFCGIVMSHYTWHNVTESSRVTTKHAFATLSFIAETFLFLYVGMDALDIEKWEFASDRPGKSIGISSILLGLVLLGRAGWVFPLSFLSNLTKKAPNEKITWRQQVVIWWAGLMRGAVSIALAYNKFTRSGHTQLHGNAIMITSTITVVLFSTMVSHLAATYA

SEQ ID NO: 13015 - protein, 487 aa, unidentified eubacterium SCB49
MIVLKDILYKVTLDKVLGNTAVAIRNINFDSRQVGLDDVFVAIKGVQSDGHDYIKKAVDQGAIAIICETIPSEIINGITYIQVEDSQEALAIMADNYYGNPSAQIKLVGVTGTNGKTTIATLLYNLFMAAGYETGLLSTVKIMVGKQQYKATHTTPDSLTINRYLREMVDAGVSYCFMEVSSHGIHQKRTEGLTFAGGIFTNLSHDHLDYHKDFKEYRDVKKKFFDQLSKTAFALVNADDKNGMVMLQNTSAKKVTYALKSMADHKAQILENQLQGLLLKLDGQELWVKLIGNFNAYNVLAIYATAELLGLETIETLQLISTLESVDGRFQYFISNTKVTAVVDYAHTPDALKNVLETINTIRTGNEQLITVVGCGGDRDVTKRPIMGKIAAQLSTKAIFTSDNPRTEQPEAIIEQIEAGVEPIDFKKTLSITDRKQAIKTACQLANENDIILIAGKGHETYQEVQGERTDFDDYKIVKQLLTALNK

SEQ ID NO: 13016 - protein, 113 aa, Brassica napus
MSRRRHIIVINILVVGENKNKTKKVFFFLSLQLDRDHSVFFSGVIMTTSKGLADRKIEKFDKNITKRGFVPETTTKKGKDYPVGPILLGFFVFVVIGSSLFQIIRTATSGGMA

SEQ ID NO: 13017 - protein, 180 aa, Arabidopsis thaliana; identical to SEQ ID NO: 11879

SEQ ID NO: 13018 - protein, 438 aa, Coccidioides immitis RS
MAKRRTKTRTHIKPAPQGGTSNLKNGAASINRSPKSMVIRMGAGEVGPSVSQLVKDVRSMMEPDTASRLKERRGNKLKDYTVMTGPLGVTHLLLFSKSSTGNTNLRIALTPRGPTLHFRVESYSLCKDVTKAQKHPRVSSKSHMSPPLLVMNNFMTSQSEEDTSSKKIPKHLESLTTTVFQSLFPPISPQATPLSSIRRIMLLNRELPSASNGIDQDSYVLNLRHYAITTKRLDISKRIRRLDPREQRRKDKKDRTVPNLGKLNDVAEYLLDPSAAGYTSASETELDTDAEVEVMESTTRKVLNKKELQRMKAGEKKSKTIPSPNVEKRAVKLVELGPRMRLKLMKVEEGLCGGRVMWHALVNKTQAEADKLEETWEQRRKEKELRRQIQKENVEKKKKAKANDGQAADAEDKMDEAGDSEMWDSEDFSEHEEHDDED

SEQ ID NO: 13019 - protein, 275 aa, Bacillus halodurans C-125
MELWYTEKQTEHFGITAKIKRTLHTEKTDFQQLDVIETEEFGNMLVLDGMVMTTEKDEFVYHEMVAHVPLFTHPNPKHVLVVGGGDGGVIREVLKHPSVEKATLVEIDGKVIEYSKKYLPSIATALNDPRVDVQVDDGFLHIAKAESAYDVIMVDSTEPVGPAVKLFEKGFYQGIAKALKEDGIFVAQTDNPWFHGELIRKVYADVQEIFPITRLYTANIPTYPSGLWTFTIGSKTYDPLHVEPSRFYDIETKYFTKDLHKAAFALPRFVDDLIK

SEQ ID NO: 13020 - protein, 244 aa, Glycine max
  misc_feature (182)..(182): Xaa can be any naturally occurring amino acid
METDRPDGRTPNQLRPLAYSCSILHRAHGSASWAQGETKVLAAVYGPKAGTKKNENPEKASIEVIWKPKTGQIGKMEKEYEMILKRTLESICIRTIYPNTTTSVIVQVVHDDGALLPCAINAACAALVDAGIPLKHLAVAICCSVTDSGCIILDPTKDEEEKMKAFANLVFPNTIVSVLPEXRSLQVGSEPMENGIMTSVTQGAMSVNDYLHCLERGRAACASLSEFVRKNIGTKSTSEPSKAG

SEQ ID NO: 13021 - protein, 632 aa, Vibrio salmonicida LFI1238
MGKIIGIDLGTTNSCVAVLDGDTPRILENAEGERTTASVVAYTDGETLVGQPAKRQAITNPQNTLFAIKRLIGRRFEDEEVQRDIEIMPYKIVKADNGDAWVEARGQKMAAPQVSAEILKKMKKTAEDFLGEEVTGAVITVPAYFNDAQRQATKDAGRIAGLEVKRIINEPTAAALAYGLDKKGGDRTIAVYDLGGGTFDISIIEIDNVDGEQTFEVLATNGDTHLGGEDFDNRMINFLVDEFKKEQGINLKNDPLAMQRVKEAAEKAKIELSSAQQTDVNLPYVTADATGPKHMNVKVTRAKLESLVEDLVVRTLEPLKVALADAGLSIDGITDVILVGGQTRMPMVQAKVAEFFGKEARRDVNPDEAVAMGAAVQAGVLSGDVKDVLLLDVTPLSFGIETMGGVMTKLIEKNTTIPTKADQTFSTAEDNQSAVTIHVLQGERKQATYNKSLGQFNLEGIQAAPRGMAQIEVTFDLDADGILNVSAKDKTTGKEQKITIQASGGLTPEEIEAMVQEAEANKDADKKFEELVVARNQADQMIHGTKKQVEEAGDALPADEKEKIDAAIKALESVKSGDDKDAIDTKTQELGQAAQKLMEIAQQKAQAQQSAEAGAQPKQEDDVIDAEFEEVK

SEQ ID NO: 13022 - protein, 572 aa, Bacillus subtilis
MSKVIGIDLGTTNSCVAVLEGGEPKVIANAEGNRTTPSVVAFKNGERQVGEVAKRQSITNPNTIMSIKRHMGTDYKVEIEGKDYTPQEVSAIILQHLKSYAESYLGETVSKAVITVPAYFNDAERQATKDAGKIAGLEVERIINEPTAAALAYGLDKTDEDQTILVYDLGGGTFDVSILELGDGVFEVRSTAGDNRLGGDDFDQVIIDHLVSEFKKENGIDLSKDKMALQRLKDAAEKAKKDLSGVSSTQISLPFITAGEAGPLHLELTLTRAKFEELSSHLVERTMGPVRQALQDAGLSASEIDKVILVGGSTRIPAVQEAIKKETGKEAHKGVNPDEVVALGAAIQGGVITGDVKDVVLLDVTPLSLGIETMGGVFTKLIDRNTTIPTSKSQVFSTAADNQTAVDIHVLQGERPMSADNKTLGRFQLTDIPPAPRGVPQIEVSFDIDKNGIVNVRAKDLGTGKEQNITIKSSSGLSDEEIERMVKEAEENADADAKKKEEIEVRNEADQLVFQTEKTLKDLEGKVDEEQVKKANDAKDALKAAIEKNEFEEIKAKKDELQTIVQELSMKL

SEQ ID NO: 13023 - protein, 138 aa, Triticum aestivum
  misc_feature (85)..(85): Xaa can be any naturally occurring amino acid
  misc_feature (100)..(100): Xaa can be any naturally occurring amino acid
  misc_feature (119)..(119): Xaa can be any naturally occurring amino acid
APCSIALAYNQFTFSSVHTGMPVHATIITSTIVVVFFTTLVVFGFLTRPMISAMLPQHRHREPTGGRSTGSNSPKDDFPRPFPRXDEDASGSGSGFVQAXKRSISMMLERPIHTGAHLXWRKFDDRFMRPIFGGPRSY

SEQ ID NO: 13024 - protein, 1162 aa, Arabidopsis thaliana; identical to SEQ ID NO: 9667

SEQ ID NO: 13025 - protein, 469 aa, Bacillus cereus E33L
MVVAFLIGAGGMFAGMSLFGVNPAEVTQTISSGNVSTAQGNLAKINEAYALIDSRYVEDVKDEKLVEGAIQGMLSTLKDPYSTYMDKETAKQFSESLDPELEGIGAEVNKTDGKLIIVSPIKGSPAEKIGIKPNDQILSVDGNSVKDLSREEAVLKIRGKKGTTVAIEIKRAGVADPIVFKIKREKIPIFTVFSSVKQESGKDIGYMQITSFAENTAKEFKDQLKELEKKNIKGLVIDVRGNPGGYLNSVEEILGEIMTDKKPMLQVEQRNGEKKKFSTELKERKSYPISVLIDNGSASASEILAGALKEGEGYDLIGEKTFGKGTVQQAVPFKDGSNIKLTMFKWLTPDGNWIHKKGIKPTVEVKQPDYYHATPIQIEKTLSYNANDVQVKHAQEMLKSLGYVPGREDGYFSKETESALKAFQNANKMEATGQLDKKTAEAIQTKIIEKIRSGENDLQLQSALKLMAK

SEQ ID NO: 13026 - protein, 560 aa, Bacteroides fragilis NCTC 9343
MKKFLNRRNGVLLAAVLVAVAFFSFKSGDDRNFQIAKNLDTFNSIVKELDMFYVDTLDPNKTVREGIDYMLSSLDPYTEYYPEDDQAELQQMLNASFGGIGSLITYNQKLKRSMIAEPFEGTPAAKVGLKAGDILMEIDGKDLAGKNNQEVSQMLRGAVGTSFKLKVERPDEKGGTRPLEFDIVRQTIQTPMIPYDTIFNNVGYINLSTFSGTPSKDFKKTFLKLKKEGITSLVIDLRGNGGGRLEEAVEIANFFLPRGKVIVTTKGKTKQASNTYKTLREPLDLDIPITVLVNGATASASEILSGAFQDFDRAVIVGSRTFGKGLVQTTRPLPYGGVMKLTTSKYYIPSGRCVQAIDYKHRNEDGSVGTIPDSLTTVFHTAAGREVRDGGGVMPDIEVKQEKLPNILFYLVRDNLIFDYATQYCLKHPSIPSPQEFKVTDADYNDFKAMVKKADFKYDQQSEKIMKTLKEAAKFEGYLDEASEEIKALEKKLTHNLDRDLDYFSKDIRSMIADEIIKRYYYTRGGIIQQLKDDDGLQAALKILADPVKYKETLSAPVKK

SEQ ID NO: 13027 - protein, 528 aa, Heliobacillus mobilis
MHRQFSDDAPNLRELAVGGTIPMELSKVLANVEVREIRWTGETDDLQRLMQPKQEISGLAYDSRQVAPGFLFFCIPGQKTDGHNFAAQAVEGGAAVLVVERFVDLKVPQIRVTSTRESLALAAGAFYGHPSEHLLMIGVTGTNGKTTTTYMIEAVLKAKGYSVGVIGTIGNQLGEKRWPAAHTTPESSDLQKLLAEMRDDGADAVVMEVSSHSLDQHRVLGVNFDIAAFTNLTQDHLDYHHTLENYRAAKGKLFRELGQKESKKGIVKRAVINADDPSADYFLQVSSVPAVTYGVEEDAAIRAKDWDVTPQGARCTVQYPGGTVDMTLQLTGRFNISNSLAAFTVGWIVGMEPEQIVEALQSLRGVPGRFESVDQGQPFSVIVDYAHTPDGLVNVLNTAEALAEGKIVTVFGCGGDRDRTKRPIMGAVVAEMSDIAVVTSDNPRTENPHRIIEDILPGVQAVPGIEYKVEPDRKKAIALALSMANPGDLVMIAGKGHENYQIVGKEVLPFDDREVARQVLRGMGYDRS

SEQ ID NO: 13028 - protein, 1158 aa, Arabidopsis thaliana; identical to SEQ ID NO: 9669

SEQ ID NO: 13029 - protein, 144 aa, Glycine max
  misc_feature (27)..(27): Xaa can be any naturally occurring amino acid
MVDGPTSPGNGSHESGEHSPRSNVREXDRYLPIANISPIMKKALPTNGKIAKDAKETVQECLSEFLRSTFQTHVLRWMDYIQHKQEFVGLFEKILLQKPGFEPPVTHPVGVVEADLKSNNTEQSVKNVSKSEVDSSKDKNKVED

SEQ ID NO: 13030 - protein, 444 aa, Bacillus cereus ATCC 10987
MARYTKEDIFRLAKEENVKYIRLQFTDLLGVIKNVEIPVSQLTKALDNKMMFDGSSIEGFVRIEESDMYLYPDLDTWVIFPWTAEKGKVARLICDIYNADGTPFEGDPRNNLKRVLKEMEALGFSDFNLGPEPEFFLFKVDEKGNPTLELNDNGGYFDLAPMDLGENCRRDIVLELEEMGFEIEASHHEVAPGQHEIDFKYANAIRSCDDIQTFKLVVKTIARKHGLHATFMPKPLYGVNGSGMHCNLSLFKNGENVFYDQNGDLQLSDDARHFIAGILKHAPAFTAVANPTVNSYKRLVPGYEAPCYVAWSAQNRSPLVRIPASRGISTRVEVRSVDPAANPYLVMATLLAAGLDGIKNKLTPPAAVDRNIYVMTKEEREEAGIVDLPATLAQALVTLQANEVISNALGDHLLEHFIEAKEIEWDIFRTQVHQWERDQYMSLY

SEQ ID NO: 13031 - protein, 176 aa, Hevea brasiliensis
MASQSEPKSVYDFTVKDARGNDVDLSTYKGKVLLIVNVASQCGLTNSNYTELTQLYQKYKDQGLEILAFPCNQFGSQEPGTNEQIVEFACTRFKAEYPIFDKVDVNGNNAAPLYKFLKSSKGGIFGDNIKWNFSKFLVDKDGNVVDRYAPTTVPSQHREGCEETAGDCMSAQGRPN

SEQ ID NO: 13032 - protein, 1162 aa, Arabidopsis thaliana; identical to SEQ ID NO: 9670

SEQ ID NO: 13033 - protein, 340 aa, Arabidopsis thaliana
MSSTQEASVTDLPVKRPREAEEDNNGGAMETENGGGEIKEPSCMSSIIPGWFSEISPMWPGEAHSLKVEKILFQGKSDYQDVIVFQSATYGKVLVLDGVIQLTERDECAYQEMITHLPLCSISNPKKVLVIGGGDGGVLREVARHSSVEQIDICEIDKMVVDVAKQYFPNVAVGYEDPRVNLIIGDGVAFLKNAAEGTYDAVIVDSSDPIGPAKELFEKPFFESVNRALRPGGVVCTQAESLWLHMDIIEDIVSNCRDIFKGSVNYAWTSVPTYPSGVIGFMLCSSEGPQVDFKKPVSLIDTDESSIKSHCPLKYYNAEIHSAAFCLPSFAKKVIDSKAN

SEQ ID NO: 13034 - protein, 338 aa, Glycine max
MQSKSETANRLRSDPHSFQPGGVYSEPWWRGIGYNPMAQTMAGANASNSSSLECPNGDSESNEEGQSLSNSGMNEEDDDATKDSKPAAPNETGNYEQEQQGMQHTASSAPSMREECLTQTPQLELVGHSIACSTNPYQDPYYGGMMAAYGHQQLGYAPFIGMPHARMPLPLEMAQEPVYVNAKQYQGILRRRQARAKAELERKLIKSRKPYLHESRHQHAMRRARGTGGRFAKKTDGEGSNHSGKEKDNGTDSVLSSQSISSSGSEPLHSDSAETWNSPNMQQDARASKVHNRFKAPCYQNGSGSYHNHNGLQSSVYHSSSGERLEERDCSGQQLNHN

SEQ ID NO: 13035 - protein, 346 aa, Zea mays
MHGSSVNDVRDSLTRDDSEEEQPKQPALEKRGGYVSQSAVALRCRVMPPPCVKNPYLNTDPCIDAAVYGGRQCNSAVFSPSIGGNGLSRYRTDFHEIEKIGYGNFSVVFKVLNRIDGCLYAVKRSIKQLHNDMERRQAVKEVQAMAALGSHENIVRYFTSWFENEQLYIQMELCDRCLSMNRNQPVKRGEALELLYQICKGLDFMHERGIAHLDVKPDNIYVRNGIYKLGDFGCATLVNRSLAIEDGDSRYMPPEMLNDKYEHLDKVDIFSLGAAVYELIRGTPLPESGSHFTSIREGKIALLPGCPMQFQSLIKSMMDPDPVRRPSAKEILRHPSFDKLHKASSK

SEQ ID NO: 13036 - protein, 638 aa, Salmonella typhimurium LT2
MGKIIGIDLGTTNSCVAIMDGTQARVLENAEGDRTTPSIIAYTQDGETLVGQPAKRQAVTNPQNTLFAIKRLIGRRFQDEEVQRDVSIMPYKIIGADNGDAWLDVKGQKMAPPQISAEVLKKMKKTAEDYLGEPVTEAVITVPAYFNDAQRQATKDAGRIAGLEVKRIINEPTAAALAYGLDKEVGNRTIAVYDLGGGTFDISIIEIDEVDGEKTFEVLATNGDTHLGGEDFDTRLINYLVDEFKKDQGIDLRNDPLAMQRLKEAAEKAKIELSSAQQTDVNLPYITADATGPKHMNIKVTRAKLESLVEDLVNRSIEPLKVALQDAGLSVSDINDVILVGGQTRMPMVQKKVAEFFGKEPRKDVNPDEAVAIGAAVQGGVLTGDVKDVLLLDVTPLSLGIETMGGVMTPLITKNTTIPTKHSQVFSTAEDNQSAVTIHVLQGERKRASDNKSLGQFNLDGINPAPRGMPQIEVTFDIDADGILHVSAKDKNSGKEQKITIKASSGLNEEEIQKMVRDAEANAESDRKFEELVQTRNQGDHLLHSTRKQVEEAGDKLPADDKTAIESALNALETALKGEDKAAIEAKMQELAQVSQKLMEIAQQQHAQQQAGSADASANNAKDDDVVDAEFEEVKDKK

SEQ ID NO: 13037 - protein, 674 aa, Cryptococcus neoformans var. neoformans JEC21
MSSTVLPQGAGYGVVIGMGLFFSLLMVGIAKLQTRYTSHKTSSAEEFNSASRSVPPGLIAAGIVSAWTWAATLLQSSATAYKFGISGPWWYASGAAIQVLLFAMISSKLKQHAPFCHTYLEIIKARWGRAAHLVFLFFALATNIIVSTMLILGGSATVTDLTGMNTVAACFLIPLGVSIYVLTGGMRATLIADYSHTLVLYCILISFALVAYATSPIIGSPSKMWELLNYAAEANPISGNAQGSYLTMRSKSGLIFGVLNIVGNFGTVFNDQAYWQRAIASDPKTSVKAFLWGGIAWFGIPLGIATSLGLSAVALAHGTSTPIITLTPDEVSAGLPAVKAASALMGQSGATAMLILLFLAVTSACSAEQIAVSSILTYDIFGTYIRPNPSEKQILWVSHVCIFSYALFMGAIATAFNYIGVSMGYLYELMGCIIGSAVVPIALCITWRKCNGTGACVGAVLGFCAGVAGWLGITSTLNDGVINVTTTFGDYEMLTGNLLSIGVGGIITVAWSYIHPANFDWDITRSINNKEDFTLTENNEPSAEPLAYDDEKEKLDGEGEGFQGGAEPMRNTTHTTVEAQPTDMTKENEELQKAFRFAAIAALSLVVILIFVIPLPLFFTSHVYPVKGFTAWVCISLIWLFVGLGMVGVYPAWEAREGLMKVGKGIVRDITRQN

SEQ ID NO: 13038 - protein, 225 aa, Pinus remota
ANPFYKPGEIAKQAKAAGARIIVTQAAYVEKLADLQSHDVLVITIDDAPKEGCKHISVLTEADETQCPAVKIHPDDVVALPYSSGTTGLPVGVMLTHKGLVSSVAQQVDGENPNLYFHSEDVILCVLPLFHIYSLNSVLLCALRAGAATLIMQKFNLTTCLELMQKYKVTVAPIVPPIVLDITKSPIVSQYDVSSVRIIMSGAAPLGKELEDALRERFPKAIFGQ

SEQ ID NO: 13039 - protein, 130 aa, Arabidopsis thaliana
  misc_feature (96)..(96): Xaa can be any naturally occurring amino acid
  misc_feature (120)..(120): Xaa can be any naturally occurring amino acid
MGSCMLSSATMVASPTQVTMAAPFSGLKTSAAFPASRKANNDITSITSNGGRVNCMQVWTPIGKKKFETLSYLPDLNDSELAKEVDYLIRNKWIPXVEFELEHGFVYREHVNSPGYYDGXRYWNMWKACL

SEQ ID NO: 13040 - protein, 225 aa, Pinus longaeva
ANPFYKPGEIAKQAKAAGARIIVTQAAYVEKLADLQSHDVLVITIDDAPKEGCKHISVLTEADETQCPAVKIHPDDVVALPYSSGTTGLPKGVMLTHKGLVSSVAQQVDGENPNLYFHSEDVVLCVLPLFHIYSLNSVLLCALRAGAATLIMQKFNLTTCLELMQKYKVTVAPIVPPIVLDITKSPIVSQYDVSSVRIIMSGAAPLGKELEDALRERFPKAIFGQ

SEQ ID NO: 13041 - protein, 208 aa, Pinus nelsonii
ANPFYKPGEIAKQAKAADARIIVTQAAYVEKLADLQSHDVLVITIDDAPKEGCKHISVLTEADETQCPAVKIHPDDVVALPYSSGTTGLPKGVMLTHKGLVSSVAQQVDGENPNLYFHSEDVILCVLPLFHIYSLNSVLLCALRAGAATLIMQKFNLTTCLELMQKYKVTVAPIVPPIVLDITKSPIVSQYDVSSVRIIMSGAAPLGK

SEQ ID NO: 13042 - protein, 225 aa, Picea sitchensis
ANPFYKPAEIAKQAKAAGARIIVTQSAYVDKLTDLQSDDLIVITIDGAPKEGCKHISVLTEADETQCPSVEIHPDDVVALPYSSGTTGLPKGVMLTHKGLVSSVAQQVDGENPNLYFHSEDVILCVLPLFHIYSLNSVLLCALRAGAATLIMQKFNLTTCLELIQRYKVTVAPIVPPIVLDITKSPNFSQYDVSSVRIIMSGAAPLGKELEDALRERFPKAIFGQ

SEQ ID NO: 13043 - protein, 304 aa, Myxococcus xanthus DK 1622
MDMRGVTQRLLLMGLVVLACTASASRKVLYEKESPYTLISVTEDEEGRRYLGFDASGALQSVVRPGKPLDLVLPYTQVSMVGLAYVPAPKRILIVGLGGGAMPMFLRKVVPRAHIDVVDIDPDVVTVARRYFGFREDTHLRAHVGDGRRFIEAERPAYDLIFLDAYGPDSIPEHLATQEFLAVVRAKLSPQGAVVGNVWAFPPNRHYDAMVHTWQVAFTQLYEFIVPQSSNRILVGVGYEEKVAAKTLEARAEKLERTRGVPFDLSGLVDRGYTDATERQLRGKVLKDADLPKPESVTTPAQVR

SEQ ID NO: 13044 - protein, 167 aa, Oryza sativa
MLHMHHEHTHTDHPIDDNVFGGRQCKSSGFSPSVDGDGLSRYRTDFHEIEQIGRGNFSVVFKVLKRIDGCVYAVKRSIRQLHNDRERRQAVKEVQALAALWCHENIVGYFTSWFENKQLFIQMELCDRCLSMDRNQPLKCGEALELLYQICEGLDFIHERGFCHPDV

SEQ ID NO: 13045 - protein, 645 aa, Wigglesworthia glossinidia endosymbiont of Glossina brevipalpis
MEILMGNIIGIDLGTTNSCVAIIENGKVKVIENSEGDRTTPSIIAYTEENEILVGQPAKRQSVTNPKNTFFAIKRLIGRKFTDHEVQRDVNIMPYKIVSSENGDVWLNVKNQKVAPPQISAEILKKMKKTAEDYIGKSITEAVITVPAYFNDTQRQATKDAGKIAGLDVKRIINEPTAAALAYGLDKKTGNRIIAVYDLGGGTFDISIIEIDDVDGEKTFEVLSTNGDTHLGGEDFDSRLINYLVNEFKKEQGIDLRNDPLAMQRLKESSEKAKIELSSVHQTDVNLPYITADSSGPKHMNIKVTRAKLESLVEELIYKTLEPVKTSLKDAKLKIIDIKDVILVGGQTRMPLVQKKVSDFFGKEPRKDVNPDEAVAIGAAVQGGVLAGDVKDVLLLDVTPLSLGIETMGGVMTTLISKNTTIPTKHSQIFSTAEDNQSAVTIHVLQGERKRSIDNKSLGQFNLDGIAPAMRGMPQIEVTFDIDADGILHVSAKDKNSGREQKITIKASSGLSENEIDKMLKESEANAELDIKFEELVKTKNQADHLLHSTRKQIKEAKNLPLEKKTEIEKCINELELSIKGEDKKDIEIKIQSLIQISSCLVDFSKNKENLNKEDIIKTNKKENNNKTNDDVVDAEFEEIKDKKN

SEQ ID NO: 13046 - protein, 116 aa, Glycine max
  misc_feature (39)..(39): Xaa can be any naturally occurring amino acid
TLQVLLVGGGDGGILREISRHSSVEHIDICEIDKMVIDXIAFTNSVPEGTYDVIIVDAFQPMGPIAEVLADNCFLESVAKALRPGGVLSAPADSLWHKNFVVADTIANCKKIFKGS

SEQ ID NO: 13047 - protein, 234 aa, Glycine max
MSSMASSTAFFTPLHDFTQARTTPSPPLPFIKSSFASSKSTFFHPALSLQTSSNFPRLFGKPKFFSVHARAATEKTIYDFTVKDIDRKDVSLSKFKGKVLLIVNVASRCGLTSSNYSELSRLYEKYKNQGLEILAFPCNQFGMQEPGSNEDIKQFACTRYKAEFPIFDKVDVNGPFTTPVYQFLKSSAGGFLGDLIKWNFEKFLVDKNGKVIERYPPTTSPFQIEKDIQKLLAA

SEQ ID NO: 13048 - protein, 1261 aa, Arabidopsis thaliana; identical to SEQ ID NO: 12325

SEQ ID NO: 13049 - protein, 64 aa, Glycine max
VLHQDETPLLYSLVFGEGVVNDATSVVLFNAVQKLDVSSLSGKTFSVIGEFLYLFITSTGLGVI

SEQ ID NO: 13050 - protein, 469 aa, Brucella melitensis 16M
MTTANDILKQIKDNDVKFVDLRFTDPKGKLHHVTMDIGLVDEDMFVDGVMFDGSSIAGWKAINESDMVLMPDPETAHIDPFFAQSTLVILCDILEPLSGESYSRDPRTTAKKAEAYLKSLGIGDTVYVGPEAEFFVFDDVKFKADPFNTGFKLDSAELPSNDDTDYETGNLGHRPRVKGGYFPVPPIDSLQDMRSEMLTVLSEMGVTVEKHHHEVASAQHELGTKFDTLVRNADKMQIQKYVVHQVANAYGKTATFMPKPVFGDNGSGMHVHFSIWKDGKPTFAGNEYAGLSENCLYFIGGVIKHAKAVNAFTNPSTNSYKRLVPGYEAPVLLAYSARNRSASCRIPFGSSPKSKRLEFRFPDPSANPYLCFSALLMAGLDGIKNKIHPGQAMDKDLYDLPPKELKQIPTVCGSLREALQSLDKDREFLKAGGVFSDDQIDSFIELKMAEVMRFEMTPHPVEFDMYYSV

SEQ ID NO: 13051 - protein, 473 aa, Synechococcus sp. RS9917
MAKTAQDVLRQIKDDGIELIDLKFTDLHGKWQHLTVCADMVDDQAFSEGLAFDGSSIRGWKAINASDMAMVPDPNTAWIDPFYRHKTLSLICSIQDPRTGEPYDRCPRALAQKALAYLAGTGLADTAFFGPEPEFFLFDDVRYSSSEGGCFYSVDTIEAPWNSGRLEEGGNLAYKIQLKEGYFPVAPNDTAQDIRSEMLLMMGQLGIPIEKHHHEVAGAGQHELGMKFAELIQAADNVMTYKYVVRNVAKKYGKTATFMPKPVFNDNGSGMHVHQSLWKGGQPLFFGEGTYANLSQTARWYIGGILRHAPSFLAFTNPTTNSYKRLVPGFEAPVNLVYSEGNRSAAVRIPLTGPNPKAKRLEFRSGDALANPYLAFTAMMMAGIDGIKNQIDPGDGTDVDLFELPADELAQIATVPASLNGALEALNADKHYLMEGGVFSEDFINNWIDIKYEEVQQLRQRPHPHEFVMYYDA

SEQ ID NO: 13052 - protein, 1168 aa, Arabidopsis thaliana; identical to SEQ ID NO: 9686

SEQ ID NO: 13053 - protein, 535 aa, Arabidopsis thaliana
MSSELQISPAIHDPQGQEKQQQAAGVGILLQIMMLVLSFVLGHVLRRHKFYYLPEASASLLIGLSSSYSSFVSNTETSIRTWFNFHDEFFFLFLLPPIIFQSGFSLQPKPFFSNFGAIVTFSVLGTFVASMVTGLLVYLGGVMFLMYRLPFVECLMFGSLISATDPVTVLSIFQELGSDVNLYALVFGESVLNDAMAISLYRTMSLVRSHSSGQNFFMVIVRFLETFVGSMSAGVGVGFTSALLFKYAGLDVDNLQNLECCLFVLFPYFSYMLAEGLSLSGIVSILFTGIVMKHYTYSNLSANSQRFVSAFFHLISSLAETFVFIYMGFDIAMEKHSWSHLGFIFFSILFIVIARAANVFGCGYLVNLARPAHRKIPMTHQKALWYSGLRGAMAFALALQSVHDLPEGHGQTIFTATTAIVVLTVLLIGGSTGTMLEALEVVGDSHDTSLGDGFEVVNSRYMTSYDDEDTPPGSGFRTKLREFHKSAASFTELDRNYLTPFFTSNNGDYDDEGNMEQHHEERIPFTRRGNLNNRG

SEQ ID NO: 13054 - protein, 541 aa, Vitis vinifera
MGFELGSVVMKLGMVSTSDHSSVVSMNLFVALLCACIVVGHLLEEYRWMNESITALALGLCTGIIILLTTRGKSSHILVFSEDLFFIYLLPPIIFNAGFQVKKKQFFRNFMTIMLFGAIGTLISFGIISLGAIHFFKKMKIGSLDIGDYLALGAIFSATDSVCTLQVLNQDETPLLYSLVFGEGVVNDATSVVLFNAIQSFDLSHIDSSIALQFIGNFLYLFITSTMLGVFAGLLSAYIIKKLYFGRHSTDREVAIMILMAYLSYMLAELFYLSAILTVFFCGIVMSHYTWHNVTESSRVTTKHAFATLSFVAEIFIFLYVGMDALDIEKWRFVSDSPGKSIGVSSILLGLVLVGRAAFVFPLSFLSNLTKKSSSEKIHIKQQVTIWWAGLMRGAVSMALAYNQFTRAGHTQLRGNAIMITSTISVVLFSTVVFGLMTKPLVRLLLPSPKPFTSMISSEPSSPKYLVVPLIGNGEETETDQASQNVPRPTSLRMLLSTPSHTVHHYWRKFDDSFMRPVFGGRGFTPFIPGSPTEPNLGQWR

SEQ ID NO: 13055 - protein, 1168 aa, Arabidopsis thaliana; identical to SEQ ID NO: 9688

SEQ ID NO: 13056 - protein, 304 aa, Oryza sativa
MVCCCDDDDGSRVLEGGAGMADAGHDESGSPPRSGGVREQDRFLPIANISRIMKKAVPANGKIAKDAKETLQECVSEFISFVTSEASDKCQKEKRKTINGEDLLFAMGTLGFEEYVDPLKIYLHKYREMEGDSKLSSKAGDGSVKKDTIGPHSGASSSSAQGMVGAYTQGMGYMQPQSNFHILVVLQSFAFPYMYQVAQIYCNKYEVSREQIWDTPQIMELSPWIPYTINRIWKETHGSQDIRIQGRPREAANSALDWQWPSKHSSLASNFYGTRVVGGHHEYQRSTKKDTTHVNFASGLGDLG

SEQ ID NO: 13057 - protein, 280 aa, Zea mays
MDAQQQLDLVMRHQSMATVCESEDALGSSESDPARPARPRGKRSRAAEVHNLSEKRRRSRINEKMKALQTLIPNSSKTDKASMLDDAIEYLKHLQLQVQMLSMRNGLYLPPGNLSGAPETLAPLEMCAALNQSGAKASNSGVVVLPGNKIPVARLLLDPPNHDQRHENPLVLQSVPSSSTAVEPRFLQQPAQPNLQSFQLAVPPEMIFDEADMMLKHRLASGRETTSLPVGHEAKPGRQEACMVNSDISNRGSLGKEVFMPYLHSLQSGDTEGGLRAGSN

SEQ ID NO: 13058 - protein, 644 aa, Mannheimia succiniciproducens MBEL55E
MNLTRRIKMGKIIGIDLGTTNSCVAVMDGDKPRVIENAEGERTTPSIIAYTQDNEVLVGQPAKRQAVTNPKNTLFAIKRLIGRRFEDQEVQRDVNIMPFQIIKADNGDAWVDVKGDKLAPPQISAEVLKKMKKTAEDFLGETVTEAVITVPAYFNDAQRQATKDAGRIAGLEVKRIINEPTAAALAYGLDKGKGNQTIAVYDLGGGTFDLSIIEIDEVGGEKTFEVLATNGDTHLGGEDFDNRVINYLVDEFKKEQGVDLRNDPLAMQRLKEAGEKAKIELSSAQQTDVNLPYITADATGPKHLNIKLTRAKLEALVEDLVARSMEPVKVALSDAGLSVSQIDDVILVGGQTRMPLVQQKVAEFFGKEPRKDVNPDEAVAVGAAVQGGVLAGNVTDVLLLDVTPLSLGIETMGGVMTTLIEKNTTIPTKKSQVFSTAEDNQSAVTIHVLQGERKQASANKSLGQFNLEGINPAPRGMPQIEVTFDIDADGIIHVSAKDKGTGKEQQITIKASSGLSDEEIQQMVRDAEANAEADRKFEELVQARNQADALVHSTRKQLTEAGDKLSADDKAPIEKAVNELEAAAKGEDKAEIEAKIQALIQVSEKLMQAAQQQAQADAGAQQAQGNNGGDDVVDAEFEEVKDNK

SEQ ID NO: 13059 - protein, 493 aa, Oceanobacillus iheyensis HTE831
MELKKLLECLTFYNVNGEVENCEITSLEMDSRKITSGSAFVCITGFTVDGHDYVDQAVKNGASAIFTSKPLMKEYGVPIIQVEDTNRALAMLAVKYYDYPTKHFPLIGVTGTNGKTTVTYLLDKIFEYHQKKAGVIGTIQVKIGEETFPIVNTTPNALELQKTFHVMREKDVKQGIMEVSSHALDMGRVYGCDYDIAVFTNLSQDHLDYHQDIQDYLRAKSLLFAQLGNGYDSEKEKYAIINDDDSSSHLLKRSTAQHVITYSCKKEATIMAKDIELTASGIRFKLHSPLGNITIQSRLMGMFNVYNMLAASAAAIASKVPLNVIQQALESIEGVNGRFEPIVEGQNYSVIVDFAHTPDSLENVLQTIKDFAKRNVYVVVGCGGDRDRKKRPLMAEVALNYADHAVFTSDNPRTEDPQAILDDMTAELDANSGSYEVVVDRKEGIAKAIQSAQKDDIVLIAGKGHETYQIIGHTKYDFDDRDVARNAIKQKGE

SEQ ID NO: 13060 - protein, 478 aa, Bacillus anthracis str. Sterne
MKRRVAIIGMVVAFLIGAGGMFAGMSLFGVNPAEVTQTISSGNASTAQGNLAKINEAYALIDSRYVEDVKDEKLVEGAIQGMLSTLKDPYSTYMDKETAKQFSESLDPELEGIGAEVNKTDGKLIIVSPIKGSPAEKIGIKPNDQILSVDGNSVKDLSREEAVLKIRGKKGTTVAIEIKRAGVADPIVFKIKREKIPIFTVFSSVKQESGKDIGYMQITSFAENTAKEFKDQLKELEKKNIKGLVIDVRGNPGGYLNSVEEILGEIMTDKKPMLQVEQRNGEKKKFSTELKERKPYPISVLIDNGSASASEILAGALKEGEGYDLIGEKTFGKGTVQQAVPFKDGSNIKLTMFKWLTPDGNWIHKKGIKPTVEVKQPDYYHATPIQIEKTLSYNANDVQVKHAQEMLKSLGYVPGREDGYFSKETESALKAFQNANKMEATGQLDKKTAEAIQTKIIEKIRSGENDLQLQSALKLMAK

SEQ ID NO: 13061 - protein, 527 aa, Synechococcus elongatus PCC 6301
MSLEVLATEPALEYGLERFFLALVVALSVATLPQVFSWFRQIPYTLLLVIAGLGLALFNVRLINLSPELILSIFLPPLLFEAAWNLKWNNLKKDWVPISLYAVIGVGISILGIAFGLSQTTSVPIVIALLIGASLATTDPVSVIAMFRELGVAERTRTLVEGESLFNDGVAVVTLSLLLALPLEVQGFEAKSLLADLIRYLGIGIGSGCLIGFGVSFLTQRLDLPLLEQSLALVAAYGSYLLSEQLGGSGVIAVVPVGLILGNFGSRIGMSPRTRVIVTEFWEFLAFFVNSIVFLLIGDQVPLESLWQNRGAIAITVVAMLAARAIATFGLGWLSNRLSHSDLSWRELVVVWWGGIRGAVSIALALSIPTVLLQRDLITATVFGSVLFTLLVQGLTMKPLLGALGLLGDQALRQQYAEAIARQTALQRVLLRLQQAEPQAEIDPEFCREQIQLIEAKLKSLAQELTELCDRQPELQHYALESLQDELLAIEADTYAEFVRSGQLSQELSPILGETLSFPAQPPAIPD

SEQ ID NO: 13062 - protein, 155 aa, Arabidopsis thaliana
PKRPRTRGLFKYAGLDTENLQNFECCLFVLFPYFSYMLAEGVGLSGIVSILFTGIVMKRYTFSNLSEASQSFVSSFFHLISSLAETFTFIYMGFDIAMEQHSWSHVGFILFSILFIGVARAVNVFGGAYLVNLFRRENQKIPMKHQKALWVEVVR

SEQ ID NO: 13063 - protein, 514 aa, Clavibacter michiganensis subsp. sepedonicus
MTFPATPALRPEHPVARSLSGLVSDFALDVVGDVDDVEVTGVTLSSSDVQPGDLYVGLRGVRVHGARFASDAAASGAVAVLTDPDGLAEARDSGLPVILTPDPRAALGDIAAWVHRSAENPATLYGVTGTNGKTSVVYLLDGLLRQLGVVTGLTSTAERRIGEESITSRLTTPEASELHALLARMREAEVRAVTIEVSAQALTRHRVDGLVFDVAAFINLSHDHLDDYADFEEYFEAKAAFFDPDRARRGVVSLDTVWGQRIVEQSRIPMTTISAQPGIEADWRVTVLEQTPDSTGFRLEGPDNRVLVSSVPVPGWFMAANAGLAIVMLVESGYDLDAVAHVLDRDGGIQAYIPGRAERVSGDTGPLFFVDYGHTPDAFEQTLQALRPFTPGKLVMVFGADGDRDTTKRAEMGAIAARLADVVVITDYHPRYEDPASIRASLIAGARAAVPDREIHEVPDPATAIRTAVSLVGEGDTILVAGPGHEDYHEVAGKKIPFSARDDARAALRDAGWS

SEQ ID NO: 13064 - protein, 435 aa, Burkholderia xenovorans LB400
MNALASAMNSDAPSLFSGINVIQTMTVFQITGALLAVVAVFGVINYRFIKLPDTLGITAVGLVVCLGISALGFYYPTMAVVARKIVTQIDFADIVFHGLLGFLLFAGALHVDLSRMRTQRRAVLLLATIGVLISVALVGLGFFYVTQWLGHPVSLLWCLAFGALISPTDPIAVLSVLKGAGAPESLETKITGEALFNDGTAVVAFVTLVGLASGANEFSATAVAIDLLREIAGALILGVSLGFAASLLLRGIDSYPVEILITLALATGGYSLAETLHVSAPLAVVIMGLVIGNHGALTSMSEKTREHLFSFWELLDELLNLVLFGLIGLEIIALSLHQHIVRLGLAAIPVVLVARGISVSIPLFALQNFRRVNPHSALMLTWGGLRGGISIALALSLPDFHGRDMFIGVTYLVVVFSLLIQATTLGPLVRRLNRR

SEQ ID NO: 13065 - protein, 484 aa, Clavibacter michiganensis subsp. sepedonicus
MTTRARPSATQAGADMIALTLAEIAEAVDGRLLLRGDATAQTVVDGVVDTDSRLIGPGGIFVAKPGEETDGHLFAPWAVEAGAALLLVERELDLPVPQVLVPDVVDALGRLAHEVVARVRALGELRMVAVTGSNGKTTTKNLLHAILETQGETVSPVASFNNEVGAPLTMLKVTRSTRFLVAEMGASGLGEITRLIRMAKPDVGIVLTVGLAHAGGFGGIERTLVTKTEMVKDLLPEDTAVLNADDPRVASMSDKTQAPVLWFGRDARAAVRATDIVASAAGTTFTLHLPDGSTRPVSFRVLGEHHVTNALAAAAGAWALGVDGDAIVSALQTVQRAERWRMEVLGGNGVTVINDAYNASPDSMAAALRTLAQIRGPEQRTVAVLGEMSELGEFSEEEHDRVGLLAVRLNIGQLVVVGRPARRLHLEAIGQGSWDGESIFAEDAAEAREILDGILRDGDLVLVKSSNSAGLRFLGDELGEKYSW

SEQ ID NO: 13066 - protein, 675 aa, Phaseolus vulgaris
MAAVLRSLRRRDVASATFSAYRSLTGSTKPAYVAQKWSCLARPFSSRPAGNDVIGIDLGTTNSCVSVMEGKNPKVIENSEGARTTPSVVAFNQKGELLVGTPAKRQAVTNPTNTVFGTKRLIGRRFDDPQTQKEMKMVPFKIVKAPNGDAWVEANGQQYSPSQIGAFVLTKMKETAEAYLGKSVSKAVITVPAYFNDAQRQATKDAGRIAGLDVQRIINEPTAAALSYGMNNKEGLIAVFDLGGGTFDVSILEISNGVFEVKATNGDTFLGGEDFDNALLDFLVNEFKRTESIDLSKDRLALQRLREAAEKAKIELSSTSQTEINLPFITADASGAKHLNITLTRSKFEALVNHLIERTKAPCKSCLKDANVSIKDVDEVLLVGGMTRVPKVQEVVLNIFGKSPSKGVNPDEAVAMGAAIQGGILRGDVKELLLLDVTPLSLGIETLGGIFTRLINRNTTIPTKKSQVFSTAADNQTQVGIKVLQGEREMASDNKMLGEFDLVGIPPAPRGLPQIEVTFDIDANGIVTVSAKDKSTGKEQQITIRSSGGLSEDEIEKMVKEAELHAQKDQERKTLIDIRNSADTTIYSIEKSLGEYREKIPSETAKEIEDAVSDLRKAMSGDNVDEIKSKLDAANKAVSKIGEHMSGGSSGGSSAGGSQGGGDQAPEAEYEEVKK

SEQ ID NO: 13067 - protein, 666 aa, Pseudomonas putida KT2440
MYQLPDDEAWLRFAREGLPRLREAGWDIDIHRDFAFNLQEVDDWYATIDEAPGHEWFDLELGIVVDGQRHSLLPIVLHLLRSSPELLRPSELARRSDDEPLLIDLNRGRLDAPALRVALPYGRIKAVMGTLGELYLHEDTAGPSLRMERADAARLNEIEGLPLHWEGGEHVRDLGRRLRDARDLQVEPPTGLQASLRPYQQQGLNWLQALREMGTGGILGDDMGLGKTLQALAHLLLEKQSGRLSAPALAVMPTSLIPNWLDEAQRFAPDLRVLALHGPGRSKHFTKLHEYDLVLTTYALMPRDLEQLRPQAWHVLILDEAQNIKSSSSKAALAVCELQAGQRLCLTGTPMENNLGELWSIFHFLMPGWLGDLKRFNQDYRNPIERHGDSERMAHLASRIRPFLLRRTKEQVATELPAKTEMVHWVELSDAQRDTYEAVRVAMDQKVRDEIARNGAARSQIVILDALLKLRQVCCDLRLVKGVESKGNQADKGKLGALLEMLEELLSEGRRVLLFSQFTSMLALIEQELEKRKIRYSLLTGDTRDRRTPVQQFQQGESEVFLISLKAGGVGLNLTAADTVIHFDPWWNPASENQATDRAYRIGQDKPVFVFKLITRGTVEEKIQLLQQEKAALAASLLDGGQAGQWRLGDEEIEALFAPLPGKRGR

SEQ ID NO: 13068 - protein, 454 aa, Desulfitobacterium hafniense DCB-2
MNLKKKKVLVVGAGRSGLAAVKRLKALGARVILTDQKEPDQLSGILELGLPDGQLVLGHIPQWHEVEAEVIVLSPGVSPQLPFIQEGIAQGALVWSEVELALRDHPAFKIGVTGTNGKTTTTTLIGELARRTGKSTLVAGNIGVALSDQVENLDEEGIIVAELSSFQLELVDSLCMNVGILLNVTPDHLDRHGTLENYLAAKARIFEKQRPSDCAILNWDDARVRELAPHLKARVVFFSPTSLLAEGYGVQGDEIVLARDGKITPIIKRRELQLRGNHNLENIMASIAAVRELGLSWEEIAQGLREFKGVEHRQEVVGTYEGILFINDSKGTNPDAAEKALYAFEEPIVLIAGGKNKGLDFHDFMKTVKEQVKSLVLVGSAAAEMEQAAKDTGIRHYLRAETFAEAVELAIAEAEPGNVVLLSPACTSWDMFKSYEERGEFFKELVRRHYREPI

SEQ ID NO: 13069 - protein, 92 aa, Glycine max
MERRRVMEHLKTYPAFPGWYADVSWPGEAHIYKMEKILFHGKSEFQELLVFESDTSRHGKIAIPDGYIQLTENDEFAYQEMLIHLALCSIPN

SEQ ID NO: 13070 - protein, 897 aa, Synechococcus sp. PCC 7002
MRILKTLTLRGPNYWSIRRKKLIVMRLDLEEIAEIPSNEISGFYEALSETLPSLVEHHCSPGCRGGFLSRVREGTLMGHIVEHVALELQELAGMPVGFGRTRVTGDHGVYNVVFEYIYEQAGRYAGRAAVRLCQSILDTGRYSPKELEQDLADLKDLCASSALGPSTETIVKEAESRGIPWSLLSARSMIQLGYGLHQRRLQATLSNQSGILAVELACDKEGTKNILADAGVPVPRGTVIRYLDDLEDAIEDVGGYPIVIKPLDGNHGRGITIDIKTWADAEHAYDLASEASKTRSVIVERYYKGSDHRVLVINGKLVAVSERVPAHVVGDGHSTIETLIEETNRDPNRGDGHDNVLTRIVIDQTALKVLDRQGLSLDTVLQDGEIAYLRATANLSTGGIAVDRTDDIHPYNVWLFERVAKIIGLDIAGIDVVTEDITQPLPDTDGVIVEVNAAPGFRMHVAPSRGLPRNVAAPVLDMLYPDGSPSRIPIIALTGTNGKTTTTRLTAHIYRQTGKVVGYTSTDGVYIGDYLAQKGDNTGPQSAAMILQDPTVEVAVLESARGGILRAGLAFDRCDVGVVLNVAADHLGLGDINTIEQMAQVKGVIAETVSPDGYAVLNADDPLVAAMAEKVRGKVTYFSMQPDNPLVLEHIRRGGLAAVYDNGYLTLLEGEWKLQVEHVKHAPVTMGGMAPFMIANALAACLAAFAQGVDIEHIRQGLRTFKPSAAQTPGRMNLFDLGTHHALVDYAHNPAGYEAVGAFVKNWPGERIGVVGGPGDRRDEDLILLGRIAAAVFDRIIVKEDDDKRGRHAGEVADLIRQGIQEENPNCQYETILDEQRALNVALDEAPQEALVVIFPESVTRAIAMIEQRLPSQTNPGLNGTATVSSEAPVNSPSIAS

SEQ ID NO: 13071 - protein, 919 aa, Geobacillus kaustophilus HTA426
MKALETIQISCRWNEEIRCFELSGSTHPSSWVSPLLAWHEETFYGTMIDIEDDIVRLSPWQALTLFALRPHSRFSAIEWADEFTARLEEWAKHIWNGLRERRFLPDASLWKSTGGAWSEAGRTRWRGADDDPDPFVATWRSLAVADWLSRDPELRGIWGEIVRTYPLIASPSGQWTGTEDDWLEQIGWLGDRPPFVVGLRLVEPSEEGDVWTLEAVLIAVDDSVIAPASDIPRAWRPYESSIQRAIRRICAIVPWLDAGEGLRTELSNEEAWRFLSEDSLKLTEAGVRLLLPDWWHDIRQAQLSIKAKLSPSVNAESLFGLERLADFDWRVATNGIELTEEEFAALAEQKRRLIRLRGQWLILDPALVRRAQALMEKAKKEGVPIHDIVAQTLLSEAEEREEAADESIPIHIDVHDQFRAFIRQLQQLDGLPKANVPPSFHGTLRPYQQRGVDWLVFLRRFGFGACLADDMGLGKTVQLLAYLAHVKEIERPDTPALLICPTSVIGNWQKECARFTPDLRVYVHHGPNRAKNDAFVQTAGEADLVITSYNLAHLDQDDLKQIHWHAICLDEAQNIKNAQTKQARAIRRLSGKHKIALSGTPVENRLGELWSIFHFLNPGYLGSAAEFERRFAGPIEKEGDARKKAALQTLIRPFLLRRTKTDEAVALNLPDKLEQKEYCPLTAEQAALYEQLVNDTLERAKEASPFARRGLILQMLNGVKQICDHPALYLKERRPRQLVERSHKLEKLIELIEQIRANDESCLIFTQYVRMGEMIQELLSDLFDERVLFLHGGVPKQTRDRMVDEFQAKKAPIFLLSLKAGGTGLNLTAANHVIHFDRWWNPAVENQATDRAYRIGQTKFVHVHKLITTGTIEEKIDEMLEQKQALADVITEGEAWITELSDDELRDLLALSAAAKGGA

SEQ ID NO: 13072 - protein, 279 aa, Synechococcus sp. PCC 7002
MPSETSLAQQTSFKSSILVIGGAEDKVHGKEILASFFRRSGGTGAAIAIIPSASREPLLIGDRYQRIFEDMGVAKVKVLDVRDRIHAEDRYYQEFVEDCTGVFMTGGDQLRLCGLLADTPLMERIRQRIHSGEITLAGTSAGAAVMGHHMIAGGSSGESPNRGLVDLAMGLGMIPEIIVDQHFHNRNRMVRLLSTIAVHPDRLGIGIDEDTAAVFEQEGYLEVLGRGTVTIVDAQDLTHTNQSRVDTSEPLSLHNLHLHILCHGDRYDLKNHRPMSGNL

SEQ ID NO: 13073 - protein, 1019 aa, Synechococcus elongatus PCC 7942
MAVLHGGWLGDRFCVWAEAWQAGEPQSAAEIAIHPYAIAATDLNDWCQKYRLGSLTGTPTEVLLSIPSDLKKEAVLPFLSGQEIPDGALLWSWQIPVLSLEAAIAGQWLATLPLGSAEDHPWLGPDLRFWSHIYRWAQSLLARGRFYPALESSDRGLTAVWLPLFNQAGDRQRFDRYSQQLPFSQFCYQAIETAAACPWQPQPQDLLLRVLQTWLTARLQPAIAAGTLVSADLLAAWQQSLANGKPLKLEDSEASRLQTAIDRWLLPVQNGAAQAWRMVLRLVPPTEQEQPWQLEFGLQAATDPDRFWPASLLWQDPLPPGLPDQSQELLLRGLGQACRLYPQLQTSLATACPEFHPLTTAEVYQLLKQVIPQWQEQGIEVQLPPGLRGQGRHRLGVEVSATLPSDRPSVGLEALLQFRWELSLGGQRLTKAEVERLAALETPLVEINGDWIEVRPQDIESAREFFRKRKDQPNLTLADAIAIASGESPNVGRLPVVNFEAAGLLEEALAVFQGQRSPAALPAPPTFQGELRPYQERGVGWLSFLQRFGIGACLADDMGLGKTIQLLAFLLHLKHSNELTRPVLLVCPTSVLGNWEREVQKFAPELRWKLHYGPDRAQGKALATALKDCDLVLTSYSLVARDQKAIAAIDWQGIVLDEAQNIKNDQAKQTQAVRAIAQSPTQKPRFRIALTGTPVENRLSELWSIVEFLQPGHLGTKPFFQKRFVTPIERFGDADSLTALRQRVQPLILRRLKTDRSIIADLPEKQEMTVFCPLVQEQADRYQVLVNEALANIEASEGIQRRGQILALLTRLKQLCNHPSLLLEKPKLDPNFGDRSAKLQRLLEMLAELTDAGDRALVFTQFAGWGSLLQQFLQEQLGREVLFLSGSTKKGDRQQMVDRFQNDPQAPAIFILSLKAGGVGLNLTKANHVFHYDRWWNPAVENQATDRAFRIGQRRNVQVHKFVCAGTLEEKIDQMIASKQALAQQIVGSGEDWLTELDTNQLRQLLILDRSAWVEEEEP

SEQ ID NO: 13074 - protein, 415 aa, Oryza sativa Indica Group
MAWWWWWSEAVVVGGGTGGGSSGTVVSICVFTAVLCVCLVAGHLLEENKWVNESITALLIGCVVGAIIFLLSEGKNSRILRFDEQLFFIYVLPPIIFNAGFQVKKKQFFHNFLTIMSFGIFGVFISVAIVSTGCYWLFPKVGFGDLGAVDYLDLILFTTTALGAIFSSTDTVCTLQVISQDETPRLYSLVFGEGVVNDATSVVLFNAIKNLDITQLKGGVALKVISDFLYLFFTSTMLGVTIGLSTAYALKALYFGRHSTDREVALMALMAYLSYMLAEGKFTFSGVTLDPVHATIITSTIIVVFFTTLVFGFLTRPLISAILPHQHRQSTTPGTGGGGRSTGSSSPKDDFIMPFLSPDEEASGSGSGFLQAKRSISMLLERPVHTVHIYWRKFDDRFMRPIFGGPMERDRGNCY

SEQ ID NO: 13075 - protein, 1118 aa, Adiantum capillus-veneris; identical to SEQ ID NO: 9712

SEQ ID NO: 13076 - protein, 663 aa, Oryza sativa
MDRVRGSAFLLGVLLAGSLFAFSVAKEETKKLGTVIGIDLGTTYSCVGVYKNGHVEIIANDQGNRITPSWVAFTDSERLIGEAAKNQAAVNPERTIFDVKRDIGRKFEEKEVQRDMKLVPYKIVNKIGKPYIQVKIKDGENKVFSPEEVSAMILGKMKETAEAYLGKKINDAVVTVPAYFNDAQRQATKDAGVIAGLNVARIINEPTAAAIAYGLDKKGGEKNILVFDLGGGTFDVSILTIDNGVFEVLATNGDTHLGGEDFDQRIMEYFIKLIKKKYSKDISKDNRALGKLRREAERAKRALSNQHQVRVEIESLFDGTDFSEPLTRARFEELNNDLFRKTMGPVKKAMDDAGLEKSQIHEIVLVGGSTRIPKVQQLLRDYFEGKEPNKGVNPDEAVAYGAAVQGSILSGEGGDETKDILLLDVAPLTLGIETVGGVMTKLIPRNTVIPTKKSQVFTTYQDQQTTVSIQVFEGERSMTKDCRLLGKFDLSGIPAAPRGTPQIEVTFEVDANGILNVKAEDKGTGKSEKITITNEKGRLSQEEIDRMVREAEEFAEEDKKVKERIDARNQLETYVYNMKNTVGDKDKLADKLESEEKEKVEEALKEALEWLDENQTAEKEEYEEKLKEVEAVCNPIISAVYQRTGGAPGGRRRGRLDDEHDEL

SEQ ID NO: 13077 - protein, 682 aa, Debaryomyces hansenii CBS767
MSGTEAIQLLNQSSGYGILVGVGALFAIGMILTTKLLEKYLHEDAKSTEVFMVANRSVGIPLLASSVYLSWTWATELLWVCTMVYNYGIMASYWYSAGLAVQICLMAVIGIEAKKKIPACHTSLEIVELRYGKACHLLFMFLSLTNNLLSCCSMIVGAAGAISIIAGNLHIVASTMLIPFGVLLYTTVGGLKATFLTDFVHSFILLIILCYVDTAIISSKEIGGLDGLYDLVLKHESDRYIEGNYNGSFLTGKSQGAIFFGIILTLGNFGLTVMDSSFWQKSFSANTKASLPGYLIAGFFIAANVWGLGSIVGLSSIVLEGTPTFPTYPRKMTPSEVSSGFVLPYTVKGLLGNGGVGAILLVIYLAVTSTVSAQMISVSSILSFDIYKKYIKPDAQNHQMIRVSHFGVIFFGLFAAGFSVMLHYVGVDMTWLGYFYSMIICPGVIPLVFTITWSRQTKLAAFISPIIGLVCGLVVWTTTASHYYNEVTVASLGGQLPCMFGGLTALFLPGIVSIVVSLTIRPHRFDWNQLRRAELIISEEDEHIPNQKIELDSSEESNGNKEIIDKASQKTNIRNRYDETDSDNVYDELLETEEQKNRLLTTYLKLGYAAFIFVLLITWVLWPLPLYRDWVWSRAYFKGYITVSLIWVYGALLVIGVYPLIDGRHSATKIIRGVYNDYLKRD

SEQ ID NO: 13078 - protein, 119 aa, Glycine max
MSQADISYSCGSCGYPLNLTSSNRITSNIASEYQKSVKKGSLSFASVDLSRFTQIDQINCFPVSWFNRSKTKLLCRKCGVHIGYGYGGESHVLCGFESPTSSTSQRKFTIKIRSLQPSS

SEQ ID NO: 13079 - protein, 491 aa, Bacillus thuringiensis serovar konkukian str. 97-27
MKLHTLVSCLHDFPVVPKENPEITSIEADSRKVKEGSLFVCMKGYTVDSHDFAKQAAAQGAAAIVAERPIDVDVPVVLVKNTFRSLAVLADYFYGQPTHKLHLIGITGTNGKTTTSHIMDEIMRAHGHKTGLIGTINMKIGDETFEVKNTTPDALTLQQTFAKMVEHGVDSTVMEVSSHALDLGRVHGCDYDVAVFTNLTQDHLDYHKTMEEYKHAKGLLFAQLGNSYNHNREKYAVLNNDDAVTVEYMRSTAATVVTYGIDTTSDVMAKDIVMTSGGTTFTLVTPYESVNVTMKLIGKFNVYNVLAATAAGLVSGVSLETIIDVIKELAGVPGRFEVVDGGQNYTVIVDYAHTPDSLENVLKTAKQFAKGDVYCIVGCGGDRDRTKRPIMASVATQYATHAIYTSDNPRSEDPAAILDDMVHGANGNNYEVIIDRKEAIHHAITKAKADDIIIIAGKGHETYQIIGKDVHHFDDREVAKEAITERLNNEE

SEQ ID NO: 13080 - protein, 1168 aa, Arabidopsis thaliana; identical to SEQ ID NO: 9722

SEQ ID NO: 13081 - protein, 401 aa, Shewanella sp. ANA-3
MKQLIRNIVCLGLGLSLGLSISLSSQENAKSYQSDFDYPLLQDVLETVETYYVKTVSKDELVQAAIKGIFEHLDPYSSFLNHQELLDLKDSNRGEYFGFGFEVASDKDHISIIAPFANSPAEQAGIQAGDIIIKLNDTPTTETNLADILNQIKQHSLSNQSIHLTLKHHNDDAQFEVSLKPSTITIQSVTSKLLDGNIGYVRLSSFQENSTEDMVRSLSQWQNAHLTGLILDLRNNPGGLLDQAIKIADLFLAKGRIVSTSGRFFDANSDYYASPQTMLTNVPMLVLINKGSASASEVLAAALQENGRAKLLGETSFGKGTVQSLIPILNDGNAIKLTIAQYNTPRGENIHDIGIVPDIKVATETGSNQKNMAIIDAISARTDVSQDSLVTSAIAWMQHHD

SEQ ID NO: 13082 - protein, 1158 aa, Arabidopsis thaliana; identical to SEQ ID NO: 9724

SEQ ID NO: 13083 - protein, 302 aa, Colwellia psychrerythraea 34H
MKAIKKFIYAWISQKFMGGCSSYNSLETRKGCRSKEQARDVFSKGSIPHAQGKIFFNPWVAHQFAKEHGFPLVIKPNVSGFSRGSHFPITSYGQLYKAIFLAKLWWPTTVVEQYLQGKNYRVVVIKGQVMSVIERFAPFVMGDGKTTIHQLIDQENVVRESMKLFPCISHLKKNAITVKFLKKQNLTLDDIPAEGEVITLFYRISLAPGGVVKTIDKTTISMKNTALFLKVLDLFDANILGIDVIFEHDITKDYSDQKCIFLEVNSRPYLKMHDYPRFGKKEDLTPYFKQLEQLDISQADIF

SEQ ID NO: 13084 - protein, 893 aa, Oryza sativa
MSPLQKQYYKWILERNFQNLNKGVRGNQVSLLNIVVELKKCCNHPFLFESADHGYGGDSIGDRNKVERIVMSSGKLVLLDKLLVRLRETNHRVLIFSQMVRMLDILAEYLSLRGFQFQRLDGSTRADLRHQAMEHFNAPGSDDFCFLLSTRAGGLGINLATADTVIIFDSDWNPQNDLQAMSRAHRIGQQETVNIYRFVTCKSVEEDILERAKKKMVLDHLVIQKLNAEGRLEKKESKKGGSMFDKNELSAILRFGAEELFKEDKTDEETKKKLESMDIDEILERAEKVETKGGEGEEGNELLSAFKVANFSSGEDDATFWSRLIQPDASDMVEETLAPRAARNKKSYVEDHQLDKNSNRKRRGIDAQEKPRRRSSRTMDTAVSLPLIDGSAHQVREWSFGNLSKKDATRFVRAVKKFGNPSQIGLIVDDVGGAIAKSSVDQQLELFTLLIEGCQDAVKNNMDAKGTVLDFFGVAVKAHELIARVEELQFLARRIARYKDPVRQYRIQAPYKKPQWSASCGWTETDDARLMVGIHWYGYGNWEKIRLDPKLSLTAKIAPATLGERETFLPRAPNLDNRASALLQKEFANLRGKSSKAKGGPRQAIDNESNGGARSLRGRQKDTKIKEDNNSIKDDFKKRKVVEPEAREEGEISESEAETKYRQDKEEKWLEWCSEVLDDEQEILKRLDRLQNTSVNLPKEKVLSRIRKYLQIIGKHEGEIVDQHSESYKQSRMAMRLWNYVANFSSMSGEQLHDLYLKLSQDQMEAGVGPSHGGNFASVPPNRGPKSNQLHPSRNQRSTRSVQYVSESFNNGENTGNSEAWKRRRRSEPDNQFDNQPLYQAPPIMTNGNRLQESSSSAGILGWAPVEMRRYGNERPKRGVHPSRFPPGHGPLL

SEQ ID NO: 13085 - protein, 177 aa, Physcomitrella patens subsp. patens
MTDEGEVIAEGKAKAPLEPPIYDFVVKDLSGEDFQLSVYKGKVLLIVNVASLCGLTTQHYTELTELHTKYREKGLEILAFPCNQFGRLEQGDNEQIKEFVTTKFQAEFPVFDKVHVNGPQELPLFKYLKSQKGCGVLGDSIKWNFTKFLVDKSGNVFQRYAPTIPPSKIENDIQSCL

SEQ ID NO: 13086 - protein, 223 aa, Glycine max
METGGFHGYRKLPNTTSGLKLSVSDMNMNMRQQQVASSDQNCSNHSAAGEENECTVREQDRFMPIANVIRIMRKILPPHAKISDDAKETIQECVSEYISFITGEANERCQREQRKTITAEDVLWAMSKLGFDDYIEPLTMYLHRYRELEGDRTSMRGEPLGKRTVEYATLATAFVPPPFHHHNGYFGAAMPMGTYVRETPPNAASSHHHHGISNAHEPNARSI

SEQ ID NO: 13087 - protein, 95 aa, Zea mays
ARRSTKPTSPTSATSTRRGTVHSPASDKCVKERRKTINGDDIIWSLGTLGFEEYVEPLKIYLNKYREVPFQLSSSNPIYWVYIRSFVSCVQLPRH

SEQ ID NO: 13088 - protein, 596 aa, Thermotoga maritima MSB8
MAEKKEFVVGIDLGTTNSVIAWMKPDGTVEVIPNAEGSRVTPSVVAFTKSGEILVGEPAKRQMILNPERTIKSIKRKMGTDYKVRIDDKEYTPQEISAFILKKLKNDAEAYLGGEIKKAVITCPAYFNDAQRQATKEAGIIAGLEVLRIINEPTAAALAYGLDKAGKEEKVLVYDLGGGTFDVSILEIGEGVIEVIATAGNNHLGGDDFDQRLIDWMAEEFKKQHGIDLREDRQALQRLRDAAEKAKIELSTKMETDVSLPFIAVSPSGQPLHLEMRITRSLFESLTRDLVEMTRGPIEQALNDAKLSPQDIDEIILVGGMTRVPMVQRFIKEFFGKEPNKSVNPDEAVAIGAAIQAAILAGTEGAKGRDIVLVDVTPLTLGIEVKGGLFEPIIPRNTKIPVRKSKIFTTVEDGQTEVEIRVYQGERPIARENIFLGSFKLVGIPPAPRGVPQIEVTFDIDSDGIVHVSAKDLGSGKEQSMVVTGRHKLSEDEIKRMIEDAKRYEEQDKRLKEEIELKNRADDLAYSVEKTLKEHGDKIPADLKSRLEDMIRELRDAINRNDIPKVKMLFDDLQKESMKIGEYLYKSATGGETSNQ

SEQ ID NO: 13089 - protein, 495 aa, Desulfitobacterium hafniense DCB-2
MRVKSVRKRLSEIASGIEIVNHVGDQDTLIQGMVMDSRQVQPGDLYACVPGMNVDGHDFAAQAIAQGAAALLVERILPLDIPQLQVKKVREVMGNLAANLYDHPAAKLEVVGVTGTNGKTTITYLVESIAAGEGKKVGLIGTLGARIAGRELPGNRTTPEAIDLQKLLKEMVDEGVQLAVMEVSSHALVFGRVTGCEFDAGIFSNLTQDHLDYHKTMEEYLQAKAQLFSGLTGVKEPKVGVVNGDDPAAETLIRLSAAPVVTYGVNADLLDYRAEDILLTADGVKFTVRFKGEAEQVEYSTPGMFSVYNALAAFAWGVESGRSPGQVREALAAVQGVPGRFESVRMGQPFQIIVDYAHTPDGLENVCRTAQEFTQGRLITVFGCGGDRDKGKRPQMGAIAEELSDHVIVTSDNPRTEDPRQIIRDILEGIEGIDYTANVNRREAIECACLLAKEGDTVLIAGKGHEDYQIIGKDVFPFDDREVAREALRRLGYVG

SEQ ID NO: 13090 - protein, 1142 aa, Triticum aestivum
METGEAGSPSPDDAVLFFGVALVLGIASRHLLRGTRVPYTVALLVLGVALGGLEYGTKHGLGKLGAGIRIWSAINPDLLLAVFLPALLFESSFSMEVHQIKKCMAQMVLLAVPGVVISTVLLGAAVKLTFPYDWNWKTSFLFSGLLSATDPVAVVALLKDLGASKKLSTIIEGESLMNDGTAIVVYQLFYRMVLGKTFDAGSIIKFLSQVSLGAVALGLAFGIASVLWLGFIFNDTIIEISLTLAVSYIAFFTAQDALEVSGVLAVMTLGMFYAAFAKTAFKGDSQQSLHHFWEMVAYIANTLIFILSGVVIADGVLQDNIHFERHGTSWGFLVLLYVFVQISRAVVVGVLYPLLRHFGYGMDIKEATVLVWSGLRGAVALSLSLSVKRASDSVQTYLKPEVGTMFVFFTGGIVFLTLILNGSTTQFLLHLLGLGKLSATKLRVLKYTQYEMLNKALEAFGDLRDDEELGPVDWVNVKKYITCLNNLEDEQAHPHDVPDKDDHIHTMNLKDTRVRLLNGVQAAYWGMLEEGRITQSTANILMRSVDEAMDLVSSQSLCDWKGLRSNVHFPNYYRFLQMSRLPRRLVTYFTVERLELGCYICAAFLRAHRIARRQLHDFLGDSEIARIVIDESTAVGEGAKKFLEDVRVTFPQVLRALKTRQVTYAVLTHLSEYIQDLGKTGLLEEKEIVHLDDALQTDLKKLKRNPPLVKMPRVRELLNTHPLVGALSADVRDPLLSNTKETIKVHGTILYREGSRRTGIWLVSTGIVKWTSRRLCTRHSLDPILSHGSTLGLYEALTGKPYICDIITESVVHCFFIEAEKIEQLRQSDPSIEDFMWQESALVIARILLPQIFEKMAMREMRVLISERSSMNVYIKGEAIELGHNNVGILLEGFLKTENRTLITAPAVLLPSNTDLNLFGLQSSAMNQIDYCYTAPSYQVEARARAIIFEIGRLDIEADLQRSASLLSSTLGPSRTQSKEHVGLLRWPESFRRSSGPGNASLAEIRGQPGSFSARALQVSMYGSMTDGMHRARRQPRLAHVEGNQKHSVSYPKVPSRAADTRPLLSVRSEGSNAMKRKSAPAPAIAPALAPFPPPLAEGQQRRAVGEDDDSSDESVGEEVIVRVDSPSMLSFNPPSGPPRGS

SEQ ID NO: 13091 - protein, 1146 aa, Populus tremula; identical to SEQ ID NO: 9730

SEQ ID NO: 13092 - protein, 226 aa, Glycine max
METGGFHGYRKLPNTTAGLKLSVSDMNMRQQVASSDHSAATGEENECTVREQDRFMPIANVIRIMRKILPPHAKISDDAKETIQECVSEYISFITGEANERCQREQRKTITAEDVLWAMSKLGFDDYIEPLTMYLHRYRELEGDRTSMRGEPLGKRTVEYATLGVATAFVPPPYHHHNGYFGAAMPMGTYVREAPPNTASSHHHHHHHHHHARGISNAHEPNARSI

SEQ ID NO: 13093 - protein, 671 aa, Arabidopsis thaliana
  misc_feature (71)..(71): Xaa can be any naturally occurring amino acid
  misc_feature (82)..(82): Xaa can be any naturally occurring amino acid
  misc_feature (100)..(100): Xaa can be any naturally occurring amino acid
MARSFGANSTVVLAIIFFGCLFAFSTAKEEATKLGSVIGIDLGTTYSCVGVYKNGHVEIIANDQGNRITPXSWVGFTDSERXLIGEAAKNQAAVNPERTXVFDVKRLIGRKFEDKEVQKDRKLVPYQIVNKDGKPYIQVKIKDGETKVFSPEEISAMILTKMKETAEAYLGKKIKDAVVTVPAYFNDAQRQATKDAGVIAGLNVARIINEPTAAAIAYGLDKKGGEKNILVFDLGGGTFDVSVLTIDNGVFEVLSTNGDTHLGGEDFDHRIMEYFIKLIKKKHQKDISKDNKALGKLRRECERAKRALSSQHQVRVEIESLFDGVDLSEPLTRARFEELNNDLFRKTMGPVKKAMDDAGLQKSQIDEIVLVGGSTRIPKVQQLLKDFFEGKEPNKGVNPDEAVAYGAAVQGGILSGEGGDETKDILLLDVAPLTLGIETVGGVMTKLIPRNTVIPTKKSQVFTTYQDQQTTVSIQVFEGERSLTKDCRLLGKFDLTGVPPAPRGTPQIEVTFEVDANGILNVKAEDKASGKSEKITITNEKGRLSQEEIDRMVKEAEEFAEEDKKVKEKIDARNALETYVYNMKNQVSDKDKLADKLEGDEKEKIEAATKEALEWLDENQNSEKEEYDEKLKEVEAVCNPIITAVYQRSGGAPGAGGESSTEEEDESHDEL

SEQ ID NO: 13094 - protein, 68 aa, Picea sitchensis
MTTSRRLADRKSAKFQKNILKRGGVPETTMKKGNTYPVGPIVLGFFVFIVIGSSIFQIIRTASSGGTA

SEQ ID NO: 13095 - protein, 448 aa, Treponema pallidum subsp. pallidum str. Nichols
MQTVQDVYEFLRKYYVDEVDPHILYKGALEGMINSLQDPYTTFVESDSISGVNLQDTTKGFFGGIGVVISKSRTSTPGKPAYVEVTAAIEDTPSWKGGIRPRDLIVKIGTMSTDTMTMDEVLKKLRGPIGTKVTLVVKRGTKIFRPFTLTRAKIEIPTVKYAKIDPNIAYVRLIEFNPVTATRMVETVTELRRQGCDRLILDLRNNPGGLITAAVDVTSSFIPSGTVVTTKSRVQGHSITFSVNARAQKLPPSMPVIVLINRDSASASEIVSGALKDHKRAYLVGQTTYGKGVVQQVFDLNERESLKMTISRYYTPSDANIDKSGIPPDLEVRETEFTPEEEEALVSLFKSEKVKLFAEQNRTMNSERIKQYARGLAREFKLRSILVEKLIAQEYHRHNASFVYDLEYDEQLRKAVELIRTQDIHALVARTKTVKELQEGIQEKKKVS

SEQ ID NO: 13096 - protein, 1146 aa, Populus tremula; identical to SEQ ID NO: 9732

SEQ ID NO: 13097 - protein, 223 aa, Glycine latifolia
METGGFHGYRKLPNTTSGLKLSVSDMNMNMRQQQVASSDQNCSNHSAAGEENECTVREQDRFMPIANVIRTMRKILPPHAKISDDAKETIQECVSEYISFITGEANERCPREQRKTITAEDVLWAMSKLGFDDYIEPLTMYLHRYRELEGDRTSMRGEPLGKRTVEYATLVTAFVPPPFHHHNGYFGAAMPMGTYVRETPPNAASSHHHHGISNAHEPNARSI

SEQ ID NO: 13098 - protein, 840 aa, Coccidioides immitis RS
MPPSASPFFRPNKPPARQSIRIGSTKPSVRRNTSILQFFNKAETPPKPVSSQNRITQYISQRRSSTSRPLSLNDSVNTEVEEFESLFVEDVRARDNNGATTDTQAFSDRERSASPDGFWAGTGAADNAILYGAGEDRYHENGKAVKKRKVGYDGFELDPGEVNGTIDQDTTVPQGDATSKDSAGATPAGKLRFTGPFLIDSDSESEPGFLGQSSRQSETENQPDLEVGYRFSAGKESMKVSEPRQSEEVSEDSDEDSRGMGSECSGTEEPSEFTELAEANAFGPIEECPDDEEVAVCPICQTGLRGLTDSEASLHVNQCLDGDSAPLPRTMKSEVTKKVSKASLSRAELKVTSRPGQRSPFTVNSTVTTSSSAFSKIMSGNAEDAAWAAAAANEVASRGKQAYERTCPFYKILPGFSICVDAFRYGAVEGCNAYFLSHFHSDHYIGLNSNWSHGPIYCSKVTGNLVRQQLKVNPKFIVDLEFEKPFEVPETGGVRVTMIPANHCPGSSLFLFERVFGQGKARRFQRVLHCGDFRASPAHIQHPLIRPDAVDPVTGQPKQQRIDVCYLDTTYLNPKYAFPSQEDVVNACARMCVSLNENKPGHHDIWKRGKANGEDLDEKDNSGNNAKASGNPKPRLLVVIGTYSIGKERICLGIAKALNCKIFATAAKQRICACLEDPELSSLLTSDPLEAQVHMHSLMEIRVDTLSEYLSSFKPHFTHIVGFRPTGWNYRPPAGRMIDNPSVSTVLRSESWKARFTVNDLVPQRGSNKQSSCFGVPYSEHSSFRELTMFCCALRLGKVIPTVNVGSRKTREKMKLWVDKWEAEKRKSGFFKLEEGATRW

SEQ ID NO: 13099 - protein, 233 aa, Glycine latifolia; identical to SEQ ID NO: 454

SEQ ID NO: 13100 - protein, 286 aa, Moritella sp. PE36
MDGCSNYNSLEVRRGCRSKKQARDKFAAGNIPHAQGTIFFNPLTAVKFAKAHGFPLVIKPNVSGFSRGSHFPIRNYKELWRAMFLAKLWWPTTVVEQYLQGKNYRVVITKTGVISVLQRYPAFVNGDGVNTISSLIETENAVREKMGLYPCNNPISQGQQTISYLAKQGLTLTSVPDNEQQVELFYRISLAPGGVVETIKRDLIPSYNHELFAKVLNLFDAEILGIDVIMEQGIEHDAREQKLIFLEVNSRPYLKMHNYPRYGEADDLSGQLGLISVATNQQADTF

SEQ ID NO: 13101 - protein, 328 aa, Lotus japonicus
VAADLPVKRQREEEEEDQQNGLSQNDSSTPQGLSAVIPGWFSEISPMWPGEAHSLKVEKILFQGKSDYQNVMVFQSSTYGKVLVLDGVIQLTERDECAYQEMITHLPLCSIPNPKKVLVIGGGDGGVLREVSRHSSVEKIDICEIDKMVVDVSKEFFPDIAVGFEDPRVSLHIGDGVAFLKAAPEGSYDAVIVDSSDPIGPAQELFEKPFFSSVARALRPGGVVCTQAESIWLHMHIIEDIVANCRQIFKGSVNYAWTTVPTYPSGMIGFMLCSTEGPSVDFKHPVNPIDEDDSQQSARPLKFYNREIHSAAFCLPSFAKRAIGAKAN

SEQ ID NO: 13102 - protein, 314 aa, Brassica napus
MISLTVTTPSLRETEDMHSKSESGNQIVSEAHHHTSSTSINSLNPWLRAAASCNANSSVEEAGDKSIALENQTNLESSNGSKSPSNRDENGNKESQVTASPQQSAADYSEKSQELVHPGSTPPPHPQLVSHTVGWASSNPYQDSYYAGMMGAYPLTYVPHGGMPHSRMQLPPEMAQEPVYVNAKQYQAIMRRRQARAKAELEKKLIKSRKRYLHESRHQHAMRRPRGTGGRFAKKTNTEASQQKDGEKRNACATQSPTSSHSDQHEGCSDEYRTNQSDEMQSSAYKIREEADCSGQQWNNISSNHPSQPLLAIK

SEQ ID NO: 13103 - protein, 874 aa, Vitis vinifera
  misc_feature (350)..(350): Xaa can be any naturally occurring amino acid
  misc_feature (358)..(358): Xaa can be any naturally occurring amino acid
MSLNTLKETLRQCTNPSSSTLISYTNSSISREIDPINPRKPPKSSLSKQLQRLQDPFSLPQIQPRNQQKQSLDHEEEEEVEAQEGFEKPQLGFLQFDLTGPFVPLVLSSDDEVPVIQVPASINHRLLEHQREGVKFLYNLYKHNHGGVLGDDMGLGKTIQTIAFLAAMFGKDGECGDSTILKGNQMGKKGPVLIVCPTSVIHNWESEFSKWATFSVSVYHGANRDLILDKLEAHGVEILITSFDTYRIHGSILSEVPWEIVVIDEAHRLKNEKSKLYTACLEIKTCKRIGLTGTIMQNKIMELFNLFDWVAPGCLGTREHFREFYDEPLKHGQRSTAPERFVRVADERKXHLVAVLHXYLLRRTKEETIGHLMMGKEDNVVFCAMSELQKRVYTRMLQLPDIQCLINKDLPCSCGSPLTQVECCKRTVPNGIIWSYLHRDNPDGCDSCPFCLVLPCLVKLLQISNHLELIKPNPRDDPDKQRKDAEFASAVFGTDIDLVGGNTQSESFMGLSDVKHCGKMRALEKLMLSWVSHGDKILLFSYSVRMLDILEKFLIRKGYCFSRLDGSTPTNLRQSLVDDFNSSPSKQVFLISTRAGGLGLNLVSANRVVIFDPNWNPAQDLQAQDRSFRYGQKRHVVVFRLLAAGSLEELVYSRQVYKQQLSNIAISGKMEKRYFEGVQDCKEFQGELFGICNLFRDLSDKLFTSEIIELHENQRQDHGHNRSTKMDLSELGSYFVQSKEAIETVSSAPESRKPKYFKSDTTLEDLGIVYAHRNEDIVNFGPTIQGKEEASVAQHDGQRQSHIPVAEKRRPNGVSRKENASSAKDWKKREFSLLAQFMGMKEVEFSKWLLAAAPSEREKVLQDYKKRKKKIPNG

SEQ ID NO: 13104 - protein, 361 aa, Lotus japonicus
MGDAAGRGLECQKTMDGKESNRNGLEKELPLCCLKAIASDPELDAKCHSTVVSGWFSAPQTCSGKSGKDAYFNNPMWPGEAHSIKVDKILYKEKSEYQEVLVFESSIYGKVLVLDGIVQLTEKDECAYQEMIAHLPLCSIASPETVLVVGGGDGGVLREVSRHSSVKRIDICEIDKMVIDVSRKFFPELAVGFDDPRVHLHVGDAVEFLRCTPEGKYDAIIVDSSDPVGPAQELVEKPFFETLAKALRPGGVLCNMAESMWLHTHLIQDMISVCRETFKGSVHYAWASVPTYPSGLIGFLLCSTEGPPVDFVNPINPIEKLEGADKHKRKLRFYNSEMHTAAFALPAFLKREVSLIRDPSA

SEQ ID NO: 13105 - protein, 303 aa, Brassica napus
METEDMHSKSESGNQIVSEAHHHTSSTSINSLNPWLRAAASCNANSSVEEAGDKSIALENQTNLESSNGSKSPSNRDENGNKESQVTASPQQSAADYSEKSQELVHPGSTPPPHPQLVSHTVGWASSNPYQDSYYAGMMGAYPLTYVPHGGMPHSRMQLPPEMAQEPVYVNAKQYQAIMRRRQARAKAELEKKLIKSRKRYLHESRHQHAMRRPRGTGGRFAKKTNTEASQQKDGEKRNACATQSPTSSHSDQHEGCSDEYRTNQSDEMQSSAYKIREEADCSGQQWNNISSNHPSQPLLAIK

SEQ ID NO: 13106 - protein, 1566 aa, Physcomitrella patens subsp. patens
MARREGTGRGRLLPRQERGSGECSTSVESSSRISCVMPFPNASAVGTSTQWRKGKNNSSWQHDPDDCTRDSCYDDRRKKVTPKNTSADTSTKPLLEAYSNGSWWDVEILKKNRDKYYVHYVKFGNQIVQWVPFGHLRMRSRTSQLLDCDGIKPGVDVCVMSQHPHANESSRAWYDAKVVDVTRKQHTPKTCKCFFQIALYTIPTTLPCNHRERLLLPNYAKPVGLGEMHIMREARGITFQQVVSASLPSVTNIPRVWAKDGILWCSSFCDYSDTSRRRSLSFESRVAGGNSGPSLSQGPEEPTSVPGSLPLVSFDSFLAEEGIILSDGKDEDDLIVSPVPNSYAPIPASGGEVSDEDDVILLSGNSFHAPVPPSRDGVKPFPVLNASKTQPIVFDINDETDVEEVVPKTIPQKEDTTEMPDFAFIERYSSDEMEQSSEKLEDVSNTAETSGNSDEDLDELVLSKIPFSKPGGQSPLKPMSVTSDMSSPLPSFRDVPFGPETSPIVEPATFSENSDEHVNADYIERTIAGSRVAKRRLVNNQTTCRENLNPPFTSRFQTQGRPKKKLLSRAGQQCPEQGCLNNAVKEQVKVYASEQFETLGMALIRPSVKGGKRLNNIDTMGVKEFADDLKGHPLTVSPVMPDILARSKDGSKTGLLKQVAIQQFIACRFVSECALVQARWDVFDTPLLLRQTCLPKAKRPKRVGTIAGPRNVEKEITYAELFETVDPVHCYIAEEKVSEAEGMGLSPSWNPLMNAVGPTLLQEVQDDPLAYVWEEMRAAQESCKKVNGAMDEKSPDSTSLIAECENPDGSKCQEHAVIFDQEVGIVCAVCGNVLLEIENMWERDNAKRITATKDNDEDIYDENMLASWDFEDLSHKQQDSIEKGSNFELIPELAKHMQRHQKHGFQFLWRNLAGQDANGNPCFPPREPGGCVISHAPGTGKTFLIISFLHSYIKKYPHCRPVIVAPKIMLQPWEREFRKWNVGIPVYNFNKAAEQGRIFLQQHEEAGDVQLNSGGRWKKQRSMNACREAMLWQWTKTPSVLVISYSMFALMTTQERMTSSTVRTILLERPHILVLDEGHFARNSRAQILKPLMAVKTPLRIMLSGTLFQNNFEELYTSLNLVRSGFVKTYAKDAGLKFNIQQEIELKGDDEVEHHTAEWKEKAAKAAEVQAKKLFMEEVGNKIDKGQKGELSPGSLAQGLEQLRRLTSPFIHHYKGGVLRDLPPLRDFAIMLQPTALQVKLVQSVTRRLEDKTMLERECLLSLICIHPSLFLEHNVGKALTDLLSQEEMNEVATNRDPEVGVKTRFVINLLNQLRYGQEKILIFCQNLVPFILLEEMLKNEFGWVREQEILQLDGKVDPDERQSIIERFNDRKGKIRVLLASTKACGEGITLTGASRVVFMDVLWNPAVIRQAIHRAFRIGQRNAVHVYRLVASGTMEESKYQRMVSKDWKSQSIFRGSDENIIGEVQHCFWEVKKQTSKDPALNELRRQDEALDQPAFKHIFRHGGLFDDDYSDDPDGRGIDATDWLRGIEDSDSYDIDAYDDSADGDNDDFEILEEIILSKFVE

SEQ ID NO: 13107 - protein, 682 aa, Rickettsiella grylli
MIPVKNELLIAEKFMASAQPKNTIIGIDLGTTNSCMAIMEGGKAKVIDNIEGRKTTPSIVSFDHNEIKVGEVAKRQSVTKPAETIFAVKRLIGRKFTDAEVQKDIKMVPYKIVPAKNGDAWVEVNGKKLSPQEISAQILMKLKRDAEKYLGYEVKDAIITVPAYFNDSQRQATKDAGRIAGLEVKRIINEPTAAALAYGLDKKNKSAKGTDAKIAVYDLGGGTFDISIIEIAEVDGEHQFEVLATNGDTFLGGEDFDLRVINYLADEFKKDQGIDLHKDPLALQRLKEAAEKAKIELSSTHETDINLPYITADSSGPKHLHIKLTRAKLESLVDDLIKQSIEPCKKAIKDAKLSVEEISQIILVGGQTRMPKVQEIVKNYFGKEARHDVNPDEAVAIGAAIQGGVLAGDVKDVLLLDVTPLSLGIETLGGIMTPLIERNTTIPTKKSQVFSTAEDNQPAVTIHVLQGEREQAKDNRTLGRFDLTDIPPGPRGTPQIEVTFDIDANGIINVSAKNKTTGKEQKIVIKSGSGLSEEEIQKMVKDAEIHADEDRKFRELIKTRNEADSLIDGVSKALTNAGDKINADEKAQLEKAIEELKDALKGTDKENIEAKLKALTETSSKMSDRLHAQPDASAQDTTTANQTDDAPHEQTESAKDNKDDVVDAVFEEVKDKDKKDNDKNKG

SEQ ID NO: 13108 - protein, 159 aa, Prochlorococcus marinus str. MIT 9312
MQVDVQNTTVFSADGSSIKLGQYSGEVILVVNVASYCGNTAQYEDLQKLHDLYSSKGLRILAFPCNDFGKQEPGSLSEIKDFCTTKYGVKFEIYEKVHAKGDTTEPYTTLNKVEPEGDVEWNFEKFLIGKDCKVIARFKPSVKPFDENLIAAIEVALDS

SEQ ID NO: 13109 - protein, 1161 aa, Arabidopsis thaliana; identical to SEQ ID NO: 9744

SEQ ID NO: 13110 - protein, 259 aa, Oryza barthii
LSYFLLISILGSVLLMFLKPSNPEFRPGYIDMLFLSTSALTLSSLITIEMEVLSSSQIVVITLLMLLGGEVFVSFLGLMLRLNHKHNPEFSGDKVSSVPIELDTINSASTVISCEELQLEAAIPEVPSSTIKDLKRSKRLRWFLGFVVFSYFVVIHVAGFLLVLWYISRVSSAKAPLKKKGINIALFSFSVTVSSFANVGLVPTNENMAIFSKNPGLLLLFIGQILAGNTLYPLFLRLLIWFLGKVTKLRELKLMIKNP

SEQ ID NO: 13111 - protein, 532 aa, Zygophyllum xanthoxylum
MAPELFRMLATSDHSSVVSMNLFVALLCGCIVIGHLLEETRWMNESITALVIGVCTGVVILLISGGKSSHLLVFSEDLFFIYLLPPIIFNAGFQVKKKQFFRNFITIVLFGAVGTLISCTIISLGVIQFFKGIDVGPFDIGDYLAIGAIFAATDSVCTLQVLHQDETPLLYSLVFGEGVVNDATSVVLFNAIQSFDLTNINTQSAFHFLGQFLYLFLTSTLLGAFTGLLSAYIIKKLYFGRHSTDREVALMMLMAYLSYMLAELTNLSGILTVFFCGIVMSHYTWHNVTESSRITTKHAFATLSFVAEIFLFLYVGMDALDIEKWRFVSDSPKTSVAVSSVLMALVMAGRAAFVFPLSFLSNLAKKSPNDKITFREQIVIWWAGLMRGAVSMALAYNKFTTSGHTNVRGNAIMITSTISVVLFSTVVFGLLTKPLISCLLPHPKHTTSMLSDNGTPKSMNMPLLEQDSEADLGGREVPRPRSIRDLLSTPTHTVHYYWRKFDNAFMRPVFGGRGFVPFVPASPTERNEGQWA

SEQ ID NO: 13112 - protein, 1158 aa, Arabidopsis thaliana; identical to SEQ ID NO: 9748

SEQ ID NO: 13113 - protein, 304 aa, Solanum tuberosum
MAANQPEAYADDFLEQILAIPSYSGLPVADVGTPSETTSFTSASAVSHLNSAAAAGLQQPLFPLGLSLDNGRDDVSEAGAYAVKHERDGMNIGNLYAGLEHLQSHAVRHSVPSIHHVQPFQGPPTTSTTVTVPHPPSIRPRVRARRGQATDPHSIAERLRRERISERIKALQELVPSCNKTDRAAMLDEILDYVKFLRLQVKVLSMSRLGGASAVAQLVADIPLQSVEGDSGESRSNQHIWDKWSNVDTEREVAKLMEEDVGAAMQYLQSKSLCIMPISLAALIYPTQLPDDQSLVKPEAAAPS

SEQ ID NO: 13114 - protein, 259 aa, Oryza longistaminata
LSYFLLISILGSVLLMSLKPSNPEFRPGYIDMLFLSTSALTLSSLITIEMEVLSSSQIVVITLLMLLGGEVFVSFLGLMLRLNHKHNPEFSGDKVSSVPIELDTINSASTVISCEELQLEAAIPEVPSSTIKDLKRSKRLRWFLGFVVFSYFVVIHVAGFLLVLWYISRVSSAKAPLKKKGINIALFSFSVTVSSFANVGLVPTNENMAIFSKNPGLLLLFIGQILAGNTLYPLFLRLLIWFLGKVTKLRELKLMIKNP

SEQ ID NO: 13115 - protein, 185 aa, Thauera sp. MZ1T
MSFARLARALAPAVLLATLAPNAGAADDATTRLYDHSLRRLHADESVRLADRYAGQPVLVVNTASHCGFTRQFRELEAVHQRYKARGLKVAGFPSDDFRQEAADEAETAEVCFQNFGVTFDMYAPIHVTGTEAHPLFREIARQSAAPEWNFHKYVIDRNGRVVAAFGSRTKPDAPEVIAAIEKAL

SEQ ID NO: 13116 - protein, 1168 aa, Arabidopsis thaliana; identical to SEQ ID NO: 9755

SEQ ID NO: 13117 - protein, 1160 aa, Arabidopsis lyrata; identical to SEQ ID NO: 9758

SEQ ID NO: 13118 - protein, 109 aa, Zea mays
AAAALTKGGADDAARKPLPPCCVKAKARVPETEANCHDTVVSGWFTEPRSRFGEAHSLKVEKILFQGKSPYQEILVFESSTYGNVLVLDGIVQLTDKDECAYQEMVTHL

SEQ ID NO: 13119 - protein, 624 aa, Nocardioides sp. JS614
MADVDTALFLVALAVAVLAGVVVAGRIGVPAPLLLVVAGVAASFLPFLPEVHLEPDVVLFGLLPPLLYSAAITSSLVDFNANRRPILLLSVGLVVFTTLGVGVLVHELVPGLSWPVAFALGAVVAPPDAVAATSIGRHIGLPRRVVTILEGESLFNDATALVSLQTALGATLVGVELWRVGLDFVVAAGGGVLIGVVVFLVVGAMRRRLSDPMLDVAMSFVIPFTAFLAAEEVHASGVVAVVTAGLLLGHRAPVLQTAQSRIAERINWRTIAFLLENTVFALIGLQARWLFDDLGESTLSPARIIAVSAATLVAVIVLRLVWVFLSRSLLVRPRVDPATGQVPPWSFTLLLGWSGMRGVVTLAAAFLIPPDTRHREVLLVVAFAVVAGTLLVQGLSLPWLTRRLHVPAPDPLDDALARATLLQQASKAAVEELERQEYDDQAGVGDLIRQRLDQRNFAAWERLGTTADQESPAAVYYRIRMAMIAAERRRILEIRRSGTVASEVIAEVLSMLDVEESMLDNAHQERDEAEDYARRRWTLGETCDDLGRYPVVDAEPATYCQACLDEGTRWVALRRCLECGNLACCDSSPRQHATAHFRETQHPVMQSAEPGEDWRWCYLHHLTA

SEQ ID NO: 13120 - protein, 1164 aa, Arabidopsis thaliana; identical to SEQ ID NO: 9763

SEQ ID NO: 13121 - protein, 323 aa, Oryza sativa Indica Group
MESRPGGTNLVEPRGQGALPSGIPIQQPWWTTSAGVGAVSPAVVAPGSGAGISLSGRDGGGDDAAEESSDDSRRSGETKDGSTGQEKHHATSQMTALASDYLTPFSQLELNQPIASAAYQYPDSYYMGMVGPYGPQAMSAQTHFQLPGLTHSRMPLPLEISEEPVYVNAKQYHGILRRRQSRAKAELEKKVVKSRKPYLHESRHQHAMRRARGTGGRFLNTKKNEDGAPSEKAEPNKGYGLNRYGFDFKPEMMVNRCIIEKVALVYECDLCVEKYSDNLRCASKHLKDISGMDCEGWSLLKIATALKLVWYPDKRIVTEAVFR

SEQ ID NO: 13122 - protein, 346 aa, Arabidopsis thaliana
MGRFKNNKKSRVIGKPIAKKNQEDVSHVTGDKIPKSFVFSRMKLAGPVKQLQMDLRKLMLPYTALSLKEKKRNTLRDFLNVSGPMGVTHFLMLSKTASSLSLRVARTPQGPTLTFKIHQYSLASDIAQSQLRPRCPQDLFKSPPLIVLSGFGSQELHLKLATIMFQNIFPAIDINTVKLSTCQRLVLLNYNKDTKLIDFRHYSIRLQPVGVSRRIRKFVQNHQVPDLRNLQDVSDFVTKAGYGSESEGDEEAATVTLSSDLGRVNKGATKSAVKLQEIGPRMTMQLVKVEEGLCTGGIIFSEYEDVDGKKEKLKKKQDEEEEEDSEEEGEEGSEEDGEDMDEDFED

SEQ ID NO: 13123 - protein, 1144 aa, Populus tremula; identical to SEQ ID NO: 9765

SEQ ID NO: 13124 - protein, 1144 aa, Populus tremula; identical to SEQ ID NO: 9768

SEQ ID NO: 13125 - protein, 1144 aa, Populus tremula; identical to SEQ ID NO: 9771

SEQ ID NO: 13126 - protein, 182 aa, Rhizobium leguminosarum bv. viciae 3841
MTGNVLDIPVKTVDGRETTLNEYKGRVLLVVNVASKCGLTVQYEGLEKLYGEKRERGFVIAAFPANDFKGQEPGTDAEILDFCTSTYDVTFPIFSKISVRGEAQHPLYRQLTKAGVKTTGDGPMRERLKSHGMTGGDEDDILWNFEKFLIGRDGKVAARFAPDVTADDSRLVSAVDKELSKG

SEQ ID NO: 13127 - protein, 1144 aa, Populus tremula; identical to SEQ ID NO: 9772

SEQ ID NO: 13128 - protein, 1144 aa, Populus tremula; identical to SEQ ID NO: 9776

SEQ ID NO: 13129 - protein, 693 aa, Azotobacter vinelandii
MKRLLPSTLFAFTLGLSASLLAQTADAGNWDTLQPDRDQVIASLNVVELLKRHHYSKPPLNDARSEKIYESYLKLLDPARSYFTAADIAEFDRWRTQFDDFLKSGDLQPGFTIYKRHLTRLAERLDFTLGLLEKGVDSFDFERDESLLVDREKAPWAPDKAALDDLWRKRLKDEVLRMKIAGKEPKAIQELLIKRYRNQLARLDQTRGEDIFQTYINAFAQTYDPHTNYLSPDNAENFDINMSLSLEGIGAVLQSDNEHVKVVRLVPAGPAEKSKQLAPADKIVGVAQANGEMVDVIGWRLDEVVKLIRGPKGSVVRLEIIPAGNAPNDETSKVVAITREAVKLEEQAAKKSVLELPHEGRTYKLGVIEIPAFYLDFKAFRAGDPDYKSTTRDVKRLLSELKAEKVDGVVIDLRNNGGGSLQEATELTGLFIDQGPTVLVRNNDGRVDVLADENGGTYYTGPMAVLVNRLSASASEIFAGAMQDYHRALIIGGQTFGKGTVQTIQPLNHGELKLTLAKFYRVSGQSTQHQGVIPDISYPDEVDTQEIGESALPEAMPWDSIRPAIRPEIDPFRPLLNELKARHDQRTAQDPDFVFTRNRLDLSRQLMQETTVSLNESKRRAQHSSIESKQLAIENERRKAKGEELLTKLKEEDENTLPLADDKNKKPEDDAYLAETGRILLDYLSLRASVAKH

SEQ ID NO: 13130 - protein, 565 aa, Bacteroides thetaiotaomicron VPI-5482
MKKLLNRRIALVLVAVIATVAFFSFKSGDDRNFQIAKNLDTFNAIVKELDMFYVDTIDPNKTIREGIDNMLFSLDPYTEYYPEEDQSELEQMVKGSFGGIGSLITYNTKLKRSMIAEPFEGTPAAKAGLKAGDILMEIDGKDLLGKNNSEVSQMLRGQAGTSFKLKVERPNEKGGQTPMEFTIVRESIQTPAIPYATVMDNKVGYISLSTFSGNPSKDFKKALLDLKKQGATSLVIDLRNNGGGLLDEAVEIANYFLPRGKVIVTTKGKTKQASNTYKTLREPLDLDIPIAVLVNSGTASASEILSGSLQDLDRAVIVGNRTFGKGLVQVPRSLPYGGMMKVTTSKYYIPSGRCVQAIDYKHRNEDGSVGTIPDSLTNVFYTAAGREVRDGGGVMPDITVKQEKLPNILFYLVRDNLIFDYATQYCLKHPTVAAPEKFVVTDADYNDFKELVKKADFKYDQQSEKILKTLKEAAEFEGYMTDAAEEFKALEKKLNHNLDRDLDYFSKDIKRMIANEIIKRYYFQRGGIIEQLKDDDDLQEAIKVLNDPAKYKEMLSAPITKAEKK

SEQ ID NO: 13131 - protein, 853 aa, Saccharomyces cerevisiae
MSRCSNAALMTVVEDAVGARVAARTRNMSNGVNYREKEVNDLTADISDSDSDLDSEDNKHGKGDNDTAPIWLQDDVHSDEDIQLDSEDDSDTEAVQAQVVDKLAKDTKSEQKSLDDELSEMDTKTVSLKLKKLNEFVRQSQVYSSIIADTLLHRSNEVANANTKDNSNSDDEEHSSKKRKTKKKSITDFFKKQKKNEDTTTQNGAPDDAAIKQPRLLKNCILKPYQLEGLNWLITLYENGLNGILADEMGLGKTVQSIALLAFIYEMDTKGPFLVTAPLSTLDNWMNEFAKFAPDLPVLKYYGTNGYKERSAKLKNFFKQHGGTGIVITSYEIILRDTDLIMSQNWKFLIVDEGHRLKNINCRLIKELKKINTSNRLLLTGTPLQNNLAELWSLLNFIMPDIFADFEIFNKWFDFDSLNLGSGSNSEALNKLINDELQKNLISNLHTILKPFLLRRLKKVVLANILPPKREYIINCPMTSAQEKFYKAGLNGKLKKTMFKELIKDFFTLNDEYIGHVSNRSIRDFINYKLSGNETSNTDNKINPTLLQMDKLYKKNLQMEISNKKLQNMMMQLRQIIDSTFLFYFPYLHPEDLTLETLLKTSGKLQILQKLIPPLISEGHKVLIYSQFVNMLDLIEDWCDLNSFATFRIDGSVNNETRKDQLEKFNSSKDKHNIFLLSTRAAGLGINLVGADTVVLFDSDWNPQVDLQAMDRCHRIGQESPVIVYRLCCDNTIEHVILTRAANKRNLERMVIQMGKFNNLKKLALNEGSFLKANKAGVNVTNKDLVQELSMLLMSDESNIGFENGGQKENKATEGQLTDKEVEELTNRSLEAYKANRVVDLPHVKLFETTSGL

SEQ ID NO: 13132 - protein, 460 aa, Populus trichocarpa
MALNASKVSSSPFVTQRKLTSTSHGIICSFSKSFQKNKLHPTHQGIELQQLSSKHLLTAKLAFSGESLQGIHGKPVSLIISRRSSTLCQSTRTHRTEEKECTRPYSDSSDSSRAQVGEKEDEHQLMSGRTIHSCHALAEACRFVYNDAKFVNERARNDIILLSRGISRLDARARKGVAILGSGFLKLDARAREDTEKIDRDVKEKAERLHHIATIIKDRAQTKLKTAADKHWSDGALEADLRLADFRAKQRAMEDALMALEFVKNIHELMVSKMYKFPLRKEEGSLTANGILGNIMLEKNGRTLDFFPGEVSTDRITAIQEAYWSMASALSEADGIDYTDPEELELLVTTLIDLDAMDGKGSVSLLAECSNSPDVNTRQALANALAAAPSMWTLGNAGMGALQRLAEDKNPAIANAASKTIHELKKQWEIQEGDSWRFMMNQKPVEEVDSQEDNNDADTG

SEQ ID NO: 13133 - protein, 140 aa, Zea mays
GALMETKNLIVSKHAIDEEAQAAYVEKIIKRIGNPHLEDAVERVGRAPLRKLSRKERFIGPAAELAENDQPIKYLLDAIEMAFRFQDVPDDEESKQLAEIMSENGPEDVVKQVCGIQDNEKIFPQLVNVVQRVQADSAEE

SEQ ID NO: 13134 - protein, 1088 aa, Legionella pneumophila str. Lens
MLNEAISKMPEAFEAKILLRGEEYFQKGQVLNIRLSDGLLKGRVKGSASQIYDIHMDLKSWPAKPSRCSCAYQYNCKHAAACLFALREREKINLQSLSSNKLDRKLDVWLKNLRAQEASEIKKEGATHHLIYLIDLKLRGYEHKVSIKLALAKLLKRGGYGKKIIFNTLANSKKQHFMGDDNDIVAQLLFKCNVSGWFDNLLIRNTELLDKIIATGRAFFIENEDTPIQKGETLTGECQWILSWNGNQILKLRHDNQNIEPLLLDESWYFDIKNVVMGHLNSPYPIKQLRHLLDAPPIPLEQAELLAKKMSKNCPEFPMPNVFNQKETKQLKPIPVLILDAVTEQEEHRWIDDGEENNSLYIAKIFFDYEGLLVPFAEECEKVVSLKGDVLVEYQRDKEFEDLKIQELRNSIDLRPFHQWEKYHWNLPDHSFFVLKDVQIVSDLESLYQQSLPYLKDHGWRIEFASPFYQEIVSADEVEWYSDIQESTTDFFSYQLGILVEGKPVSIVPLVADLIQRYKGNDLDNLPDEQLVKLPLLDGRLLQLPMGRIKPLVRLLLQFGLRQIDQNQQLQINKYQLVLMQEVELAIAATKSRWQGAESLREELRKLVRLNDLPEIKVPSGLQAHLRDYQHYGLNWLQFLRVSRFNGVLADDMGLGKTVQTLAHLQYEKEQSRLHKASLIIAPTSLVGNWFAEAKRFTPEIRVLIYHGSDRHQDNFDDYDLIISTYGLIHRDKEKFVGYPFYYLILDEAQFIKNARTKTTQIIQQLKASHRLCLTGTPLENNLSELWSLFHFLMPGLLGDAKQFRLWFRTPIEKYADMGRRDLLAKRVQPFLLRRTKNQVANELPPKTEITRTIELVGAQRDLYEAIRMSMEKKVRDAIARQGLGKSHILLLDALLKLRQVCCDPRLLSMSEAEIAHGTSCKLDALMELLDNLVEEGRRVLVFSQFTSMLKLIEELLIVRQYDYLKLTGQTQNRQALVDQFQQGDTPIFLISLKAGGTGLNLTRADTVIHYDPWWNPSVEDQATDRTHRIGQESPVFVYKLITSGTVEEAILGMQEKKRQLVEGILSTDASRSMVLSEDDLNQFFMPL

SEQ ID NO: 13135 - protein, 443 aa, Pyrococcus horikoshii OT3
MVRKVNIIKGNEGQGKRIKFVQLIFVDINGMPKGMEVPITRLEEAIEEGIAFDGSSVPGFQGIEDSDLVFKADPSTYVEVPWDNVARVYGYIYKDGKPYEADPRGVLRRTLERLEKLGIKVYIGPEPEFYLFKKNGSWELEIPDVGGYFDILTLDKAKDIKREIAEYMPYFGLTPEVLHHEVGKAQHEIDFRHDEALKTADNIVSFKYIVKAVAEMHGLYATFMPKPIYGMPGNGMHLHISLWKDGENIFKGEEGLSETALYFIGGLLKHAKALAAVTNPTVNSYKRLVPGYEAPVYISWGYKNRSALIRVPAFWGNGARIEYRCPDPSANSYLAFAAILMAGLDGIKHKIEPFAYVEENVYEMDEKRREEIGIDMLPENLGEALDELERDKVVKEALGGAYRNFVGYKRKEWEEYLDYLEAKNLPKDTKNVTEWELERYFFI

SEQ ID NO: 13136 - protein, 159 aa, Bacillus licheniformis ATCC 14580
MSIYDISVKTIKGEDTTLRPYKGKVLLIVNTASKCGFTPQYQQLQDLYETYKDRGLEILGFPSNQFMNQEPGDEKSIEEFCSVNYGVTFPMFSKVNVKGDQIHPLFRHLTNKAKGMLGTKAVKWNFTKFLVDQTGENVVRFSPQTNPKEMEETIQKWLG

SEQ ID NO: 13137 - protein, 564 aa, Vibrio cholerae
MGKIIGIDLGTTNSCVAVLDWRQARVIENAEGERTTPSVIAYTDGETLVGQPAKRQAVTNPQNTLFAIKRLIGRRFEDEEVQRDIKIMPYKIVKADNGDAWVEAKGQKMAAPQVSAEVLKKMKKTAEDFLGEPVTAAVITVPAYFNDAQRQATKDAGRIAGLEVKRIINEPTAAALAYGLDKQGGDRTIAVYDLGGGTFDISIIEIDEVEGEKTFEVLSTNGDTHLGGEDFDNRMINYLVDEFKKDQGIDLRNEPLAMQRLKEAAEKAKIELSSAQQTDVNLPYITAPITGPKHMNIKVTRAKLEALVEDLVQRSLEPLKVALADADLSVTDITDVILVGGQTRMPMVQKKVAEFFGKEPRKDVNPDEAVRVGAAVQGGVLAGEVKDVLLLDVTPLSLGIETMGGVMTKLIEKNTTIPTKANQVFSTAEDNQSAVTIHVLQGERKQAMYNKSLGQFNLEGINPAPRGMPQIEVIFDLDADGILHVSAKDKQTGKEQKITIQASGGLSDAEIEKMVQEAEANKEADKKFEELATARNQADQMIHATRKQITEAGEALPADEKAKI

SEQ ID NO: 13138 - protein, 160 aa, Alnus firma
MNTLEGRGFTEEQEAVVVKSWNAMKPNAGELGLKFFLKIFEIAPSAQKLFSFLRDSNVSLERNPKLKSHAMSVFLMTCESAVQLRKAGKVTVRESSLKKLGAVHFKHGVVDEHYEVTKFALLETIKEAVPEMWSPEMKIAWGEAYDQLVAAIKSAMKPSS

SEQ ID NO: 13139 - protein, 140 aa, Arabidopsis thaliana
  misc_feature (91)..(91): Xaa can be any naturally occurring amino acid
  misc_feature (111)..(111): Xaa can be any naturally occurring amino acid
MASSMLSSATMVASPAQATMVAPFNGLKSSAAFPATRKANNDITSITSNGGRVNCMQVWPPIGKKKFETLSYLPDLTDSELAKEVDYLIRXNKWIPCVEFEFGARICVPVXTVTHPDTMMDGTGQCGSFPCSVAPTPLKC

SEQ ID NO: 13140 - protein, 882 aa, Clostridium thermocellum ATCC 27405
MRIQSIQCFAGRNIYSHKPVVKVTLDIGELYKLPTKDLGDFNERLLALFPGLKKHYCSLGYEGGFEERLKEGTYIGHVTEHLIIELQNILGYEVNYGKTRIVEEPSLYFIVFEYKNEKCAIECARAAVNIVLKLVRNEEVDTEAIINNLRAIAVETDMGPSTKAIYEEAKKRGIPVTRIGDGSVLRLGYGKYSRIVQASLTDFPSCINVDMAGNKQLAKRLLAENKIPVPDGDTAYSFEGALQIAREIGFPVVIKPVDSNQGKGVTLNIKDEQEMEIAYNEARKYSRVVLVEKYVKGKDYRVLVVGDRVAAVAERRPPFVIGDGVHTVEELVAIENLSSLRGDDHEKPLTKIKLDATALKVLKDQGIGKDHVPSLGERIYLRYNGNLSTGGTARECTDEIHPYNADIAVKAAQIIGLDIAGVDITTEDISVPISENGGAIIEINAAPGLRMHLFPSEGKTRNVAADILDMLFPEASPHSIPIVSVTGTNGKTTTTRLIGHTLACLGKKVGMTSTGGIFIGDECVLKGDNTGPTSAAMVLSSKEVEVAVLETARGGIVRKGLGYDLADVGVITNIAEDHLGIDGMNTLEDLAFAKSLVVEAVKPGGYSVLNADDKFVRYFMERAKGEIILFSKNNSNPVVKEHMQKGGKALYVDKDSIFIYNGKTAEVLMSVKEIPITYGGMIECNIENSLAAASALYGLNLSIEAIRKGLATFNPDMESNPGRFNIVDMGDFKVMLDYGHNPAGYLEVMKFLDKIDAKRLVGVIGMPGDRDDLSIYKAGEICSKCFSKIYIKEDSDLRGREPGEVAGILYDAVISSGTKKENVEIIYSEDRALEKALLDAQPGDFVVMFYENFERAAEVVERVRRELLENTDTAGPVIQNVG

SEQ ID NO: 13141 - protein, 176 aa, Brassica napus
MGGSISVPEKSIHEFTVKDSSGKEVDLSVYQGKVLLIVNVASKCGFTQTNYTQLTELYRKYKDQGLVILAFPCNQFLNQEPGTSQDAHEFACTRFKAEYPVFQKVRVNGQNAAPVYKFLKSKKPSFLGSRIKWNFTKFLVGKDGQVIDRYGPTVPPLSIEKDIKKALGDEGAFPST

SEQ ID NO: 13142 - protein, 669 aa, Cronartium ribicola
MSRTGPLRGSGFNRPLWAGLLSTAIMLAFGTQTYAQSNSTANLGSVIGIDLGTTYSCVGVQERGRVEILTNDQGNRITPSYVAFTTDGDRLIGDAAKNQAPSNPTNTIFDAKRLIGRKFNDPDVQRDIKLYPFKVVKKGDKPAIQVEVKGEKRTFTPEEVSAMVLGKMKETAEAYLGRKVSNAVVTVPAYFNDAQRQATKDAGTIAGLNVLRIVNEPTAAAIAYGLDKTKGERQIIVYDLGGGTFDVSLLSIDEGVFEVLATAGDTHLGGEDFDNRLIEHFIKLWKRKHDGEDITTNLRTMGKLKRDVEKIKRTLSSQQSARIEIESFFNGKDLSETLTRAKFEELNIDLFRKTMKPVEQVLKDANVKKDAIDDVVLVGGSTRIPKVQELLKEYFNGKEPSKGINPDEAVAFGAAVQGGILAGEEGNEDLVLIDVCPLTLGIETTGGVMTKLIDRNTVVPTEKSQIFSTASDNQPTVLIQVFEGERTMTKDNHQLGKFELTGIPPAPKGVPQVEVTFEVDANGIMKVSAADKGSGRVESITITNDKGRLSQDEIDRMVKEAADFADQDEALKKKIEARNAFENFIYTMKNQVADKEGLGGKLESDDKKTIQDELKKAQEWLDENTTTATAEDFDEQREALQAVISPITSKLYASGGGGGDDPLGSHDEL

SEQ ID NO: 13143 - protein, 1164 aa, Arabidopsis thaliana; identical to SEQ ID NO: 9781

SEQ ID NO: 13144 - protein, 473 aa, Bartonella quintana str. Toulouse
MKNGKQMKSKGSKPVSQFLKNLRGVDNWEQVSQWLALRNVEDIECITPDQAGVARGKMMLSKKFISETSLALPSAVFMATISGDYPEDGHGFEYPKTDGDLRLEPDLSTLSIVPWEEAPTAQVICDLVYQNGQGVDYTPRNVLRKVINFYTKMGLKPVVSPEIEFYLVEKNPDPDYPLVPPIGRSGRSIGGGQGYSIAGVNEFDDLIDDIYHFSEAQGLEIDTLIHEEGAGQFEINLRHGDPIELADQVFIFKRTIREVALKHNMYATFMAKPIQGQPGSAMHIHQSVVDKKTGMNIFTQEDGKENIRFRHFIGGLQRHIPGVLVMLAPYVNSYRRLVPDLSAPVNLRWGYDNRTTAFRVPRSSPQGRRVENRLPSSDANPYLALAASLACGLIGLQQELEPDEPTTKNVNTDNIELPRGLIEAVNLFEQDTAIRAILGDVFVSTYAAIKRQEFETFMEVISPWEREYLLLNV

SEQ ID NO: 13145 - protein, 628 aa, Aspergillus nidulans FGSC A4
MAETAVQPPLSQAVGYIVVVLIGAIIALVMMLVTKVLKKTTGEDNKKTEMFMTANRTVRTGLTASAVISLLGSSFTGYDYGVSGPFWFAAGCSPMIVFFALVGISCKRKIPEAHTSLEVVRIRYGHIAHAVFMVLCLVNNIFASANMLLGASAVISAIFLTDYFHTTIILIIACYFSVKAFQSDQIGSVGNLYELLKSAGQRHPVSGNQDGTYLTMTSKDMDTSYFIKAFSASPKAVVPGYAIGGAMYFSIPWALGTVMSSVALGLENQPNFPTYPRRMTSSEVSGGLVLPYAAMTIAGKGGAAAVLLMIFMAVTSTLSAQVIAVSSILSFDVYREYFKRSATDRDVIRASHLGVIFFAAFCAGFSTMLHYVGVDLGWTLYMLGVVTCPGIFPMVFTVLWRRQSKAAAILSPILGLATGLAVWLTTAGHFGGEVTVATTGQVLPCVYGTVASAFSPILYSVLITLIRPQDYDWSDFKKEKLSLEKLESDLTTVHHETRDSTAGSIEDGGVNSAAVKAQELKRWGRIAAFWAVATFLGHWVLWPLPMYGSHYVFGKGFYIAWVVVAIIWLWATMFVETLYPIVDGGYQQILQVYRGLRGRQPLPAVAKPGGESADGSISDGAQGEQVKA

SEQ ID NO: 13146 - protein, 1164 aa, Arabidopsis thaliana; identical to SEQ ID NO: 9782

SEQ ID NO: 13147 - protein, 141 aa, Yarrowia lipolytica CLIB122
MMDENELTDKLVRVLREQATVQKIVSEIIPSDLAFAKDTRDVLIECCIEFIMMLSTESNEIAEKESKKTIAPEHVIKALQELGFIDYIEPIKDLIVEHKEALKSREKKVGKLEQSGMTEEELLRKQEEMFAAARSKLNNNA

SEQ ID NO: 13148 - protein, 864 aa, Pinus sylvestris; identical to SEQ ID NO: 9784

SEQ ID NO: 13149 - protein, 165 aa, Populus alba
LTKKFINLIKHAEDGILDLNKAAETLEVQKRRIYDITNVLEGIGLIEKKLKNRIQWKGLDVSRPGEADDNNVATLQAEVENLTMEERRLDEQTREMQERLRDLSEDENNQKWLFVTEEDIKSLPGFQNETLIAIKAPHGTTLEVPDPDEAVDYPQRRYRILLRST

SEQ ID NO: 13150 - protein, 1164 aa, Arabidopsis thaliana; identical to SEQ ID NO: 9785

SEQ ID NO: 13151 - protein, 145 aa, Oryza sativa
MGFSETQEELVLRSWQSMKKDSESIALKFFLRIFEIAPAAKQMFSFLRDSGDDVPLENHPKACESATQLRKTGDVKVREATLRRLGATHVKAGVADAYFEVVKTALLDTIKDAVPEMWSPEMKGAWEEAYDQLAAAIKEEMKKAA

SEQ ID NO: 13152 - protein, 380 aa, Brassica napus
MKLIQRISTAYIFRFTSHQNNPAKTLIPLSHFTRFFSSSPSRAAAAAMDAKEASATDLKRPREEDDNAAAAASMETENGDQTKEPACFSSVIPGWFSEMSPMWPGEAHSLKVEKVLFQGKSDYQDVIVFQSATYGKVLVLDGVIQLTERDECAYQEMITHLPLCSIPNPKKVLVIGGGDGGVLREVARHASVEQIDMCEIDKMVVDVSKQFFPNVAIGFEDPRVNLVIGDGVAYLKNAAEGSYDAVIVDSSDPIGPAKELFEKPFFQSVARALRPGGVVCTQAESLWLHMDIIEDIVSNCREIFKGSVNYAWTSVPTYPSGVIGFMLCSTEGPDVDFKHPVNPIDDSKSSGPLKFYNAEIHSAAFCLPSFAKKVIESKTN

SEQ ID NO: 13153 - protein, 669 aa, Oryza sativa Japonica Group
MARGATWTRRLHLHGLFLAVLLLLTLPAGSTAAAGGGGGTVIGIDLGTTYSCVGVYRNGHVEIIANDQGNRITPSWVAFTGGGERLIGEAAKNQAAANPGRTVYDAKRLIGRRFADAEVQRDMRLLPFAVVDKGGKPHVRVEVRGGDVRLLSPEEVSAMVLARMKETAEAYLGEEVTRAVVTVPAYFNDAQRQATKDAATIAGLAVERILNEPTAAALAYGVGKEGAGGKNVLVFDLGGGTFDVSVLAIDGGVYEVLATNGDTHLGGEDFDQRVMEHFVELVRRKHGRDIAGDARALGKLRRECERAKRALSIQHQVRVEVESLFDGVDLSEPLSRARFEELNNDLFRKTMAPVRKAMADARLSNADIDEIVLVGGSTRIPKVRQLLRDYFGGKQPNQGVNPDEAVAYGAAIQANIVGGDTDNKTRDMVVLDVTPLTLGLETAGGVMATLIPRNTPVPTKRAQLFSTYKDKQTTVTVKVFEGERSMTRDNRLLGRFDLAGIAPAPRGAPQIEVAFEVDADGILSVSAADRATGRSERITISGDDRKTSREEIDRMLGEAEEFADEDRRHRERAGARNSLEAYVYGVKNAVVGGEMAGAMDGGEKEKVEAAVMEAYEWLDGNQDVGKEEYEEKLRELEDVCNPVMSAVYQRSGGSRRDGDGGGDDDHDEL

SEQ ID NO: 13154 - protein, 1226 aa, Zea mays
  misc_feature (416)..(416): Xaa can be any naturally occurring amino acid
  misc_feature (454)..(454): Xaa can be any naturally occurring amino acid
MDEEDDDQRLLHSLGVQTEPKRDDEPGAAVDDPSGSSVAPEFDAQANLHQKLRSVQLEIDAVASTIKRAKNASVDGQDKKKQKQANHTSQDEPHGGALQQALATERLKSLKKAKAQIQKEILQSDPYPSGSDNRKDKMLAMLVEEEPRRKKKSLMPARGPKKTSAPRLKTMSYDDDDDFDAVLDGASAGFMETEREELIRKGLLTPFHKLKGFEKRVELPGPSHRQNDPSEQAEEAIEASRIARVAQSMQQIAQSRPTTKLLDPESLPRLDAPTAPFQRLGRPLKRPVPPSSEGRERKRQRNKTKRPLPDKKWRKANSRKESLLETDGEDVGDFATSVSEDDDQAAEGGLSPVILEGGLRIPGTIYEQLFDYQKVGVQWLWELHCQRAGGIIGDEMGLGKTVQVLSFLGSLHNSGXWQREASRWYPKFKVEILHDSANGSSKKSKAYSDSDSEXSWDSDQEEVRRAKPAKKWDDLISRVVNSGSGLLLTTYEQLRILGEKLLDIEWGYAVLDEGHRIRNPNAEITLVCKQLQTVHRIIMTGAPIQNKLSELWSLFDFVFPGKLGVLPVFETEFSVPITVGGYANATPLQVSTAYRCAIVLRDLIMPYLLRRMKVDVNAQLPKKTEHVLFCSLTAGQRSTYRAFLASSEVEQIFDGNRNSLYGIDVLRKICNHPDLLEREHAAQNPDYGNPERSGKMKVVEQVLKVWKDQGHRVLLFTQTQQMLDILENFLTACDYQYRRMDGLTPAKQRMALIDEFNNTDEIFVFILTTKVGGLGTNLTGANRIIIYDPDWNPSTDMQARERAWRIGQTRDVMVYRLITRGTIEEKVYHRQIYKHFLTNKVLKNPQQRRFFKARDMKDLFTLQDDEGNGSTETSNIFGQLSKDVNVGVPNDGQQHQVHIASALSSTSEAEPSNGGNSKVDDNSDQADEESSILKSLFGAQGIHSAINHDAIMDANDDQKVRLEAEASQVAQRAAEALRQSRMLRSHDSFAVPTWTGRSGAAGAPSSVRRKFGSTVNSQLIPSSQPSETSSSRNRSLPVGALSGKALSSAELLAKIRGTREASASDALEHQLNVGSSSNLVSSPSGNGGRASNPPNRSMIVQPEVLIRQLCTFIQHNGGSATSTSITEHFKSRIQSKDMLLFKNLLKEIATLQRGAEGDLTRRNLRRCVGVVNTRIGIPTCYDLGERIADSLQATKGSAAVGRKLGTDLHLPRAFIADKRVMLAVRI

SEQ ID NO: 13155 - protein, 686 aa, Coprinopsis cinerea okayama7#130
MSIRVPSYTTNTAPPTPSAPAAEDEEFYSSWSLFLVCLLLILSLWTSYYLQIKRIRAVHETTVSIFAGMFVGLIIRLAPGTMIREMLTFKHTLFFNLLLPPIILNSGYELKQENFFRHFGSIIVFAFLGTFISAVGVGVIVHVYSLLGIESMDLSLIEGLTFGSTLSATDPVTILAIFNQYKVDPKLYTVIFGESLLNDAVSIVMYETLRKFHGSEVYLSSLFHGVGIFLISFTISMLLGVAFGLVMSLLLKHSHLNHFPHIESCLVALSAYICYFLSTGLTLSGIVSLLFCGITLKHYAYHTMSRRTQRGSKALFGTLAHLSENFIFIYLGMALFTSAPTSEPVFSYVKPLFILITTIAVVFTRYAAVFPLSEAINFVARHAWGQRQEVLPHSYQMMLFWAGLRGAVGVALAAGFNGPNAKVLRMTVLLVVVITVLFFGGTTSRMLEVLKIKTNVDDDEGGSSDEDEYPPYGGVRLGGRNGQWNRWNDYEESTAIPRGPGRVGVHYGNQAPHSPTANQAIFSSASSESYDSDAEVLPLAPTAHRQSDERRDRNDRPHQPATEDGKWFQTIDERYLLPLFSNATASRTFHARRSARRQASASANASSSSAAMHDDSSASGRRDSRNAWDSDVEIDLARQTPRSALPPRLALSTASGDNDSSRTERGLGSPVLRVGSQFSNNSSNDS

SEQ ID NO: 13156 - protein, 1144 aa, Populus tremula; identical to SEQ ID NO: 9788

SEQ ID NO: 13157 - protein, 769 aa, Listeria monocytogenes
MLDSFKEDPNLRKLLFSGHFGLEKENIRVTSDGKLALTPHPAIFGPKEDNPYIKTDFSESQIEMITPVTDSIDSVYEWLENLHNIVSLRSENELLWPSSNPPILPAEEDIPIAEYKTPDSPDRKYREHLAKGYGKKIQLLSGIHYNFSFPEALIDGLYANISLPEESKQDFKNRLYLKVAKYFMKNRWLLIYLTGASPVYLADFSKTKHEESLPDGSSALRDGISLRNSNAGYKNKEALFVDYNSFDAYISSISNYIEAGKIESMREFYNPIRLKNAHTDQTVESLAEHGVEYLEIRSIDLNPLEPNGISKDELDFIHLFLIKGLLSEDRELCANNQQLADENENNIALNGLAQPSIKNCDNEDIPLADAGLLELDKMSDFIKSLRPEDTKLRAIIEKQKERLLHPEKTIAAQVKQQVTKEGYVDFHLNQAKTYMEETEALAYKLIGAEDMELSTQIIWKDAIARGIKVDVLDRAENFLRFQKGDHIEYVKQASKTSKDNYVSVLMMENKVVTKLVLAEHDIRVPFGDSFSDQALALEAFSLFEDKQIVVKPKSTNYGWGISIFKNKFTLEDYQEALNIAFSYDSSVIIEEFIPGDEFRFLVINDKVEAVLKRVPANVTGDGIHTVRELVEEKNTDPLRGTDHLKPLEKIRTGPEETLMLSMQNLSWDSIPKAEEIIYLRENSNVSTGGDSIDYTEEMDDYFKEIAIRATQVLDAKICGVDIIVPRETIDRDKHAIIELNFNPAMHMHCFPYQGEQKKIGDKILDFLFD

SEQ ID NO: 13158 - protein, 387 aa, Salmonella enterica subsp. arizonae serovar 62:z4,z23:--
MKVNTMKALHFGAGNIGRGFIGKLLADAGIQLTFADVNQVVLDALNARHSYQVHVVGENEQVDTVSGVNAVSSIGDEVVELIASVDLVTTAVGPVVLERIAPAIAKGLAKRKAQGVDAPLNIIACENMVRGTTQLKGHVMNALADGDKAWVEQHVGFVDSAVDRIVPPSASATHDPLEVTVETFSEWIVDKTQFKGALPTIPGMELTDNLMAFVERKLFTLNTGHAITAYLGKLAGHQTIRDAILDESIRAVVKGAMEESGAVLIKRYGFDADKHAAYIQKILGRFENPYLKDDVERVGRQPLRKLSAGDRLIKPLLGTLEYGLPHVNLVKGIAAAMHFRSDEDPQAQELADMITEKGPLAALAQISGLDANSDVVAEVVNAYNATK

SEQ ID NO: 13159 - protein, 1144 aa, Populus tremula; identical to SEQ ID NO: 9789

SEQ ID NO: 13160 - protein, 420 aa, Ipomoea batatas
MAKPNGIIYSSPKSPQHPKIYAKTQVIEHSTQSNGYLSMLRLKLSNKGFWRAYRAPSGYIATRGSSLRCHSAETRHAETEECVREYRDSSDTSSMQGKDKDPASLGKSGTPSPGLAEACKFVYNDAKFVNERAKNDIVLLSRGIMRLDARARQDVAFLGSEFLKLDARAREHTEKIDNDVKRKAERLHHVATILKNKAQSRLKNAADRHWSDGALEADLRRADFAAKQRAMEDALMALEFVKNIHDMMVSKMCNLKRSSLNPNKMTERITLEKNGKMLNFLPGEVSAERISAIQEAYWDIAAALSEADGIDYTDPEELELLVATLIDLDAMDGKSSVSLLAECSSSPDVNTRKALANALSAAPSMWTLGNAGMGALQRLAEDTTLNRCCCIENHQRIEEAVGNRGGGQLEVHGERKITRR

SEQ ID NO: 13161 - protein, 706 aa, Physcomitrella patens subsp. patens
MGRLTVTVVSVVKPWVGSSCSVIDCQVKCVETMFYRAWYCHGFGKSWGLARSKTLTDGQQLTEAPPHPRNSNSASNIGHSKRFKTPREFMQSLSMSWIKSPFNSDMMRRRVESSKQRLKRIVCGSHTFFWLHVAYYGVLTIVGTMSLWWCRERNSISFLDCIFTVVSMVTTTGLTSVLLRDFNTTGLFTLMVLMLLGSSVFVSLLPIYVRRLRILRYNRALDTSNAANVSSSQLSSYNSSDCHHSRATGMSPISNHTLQIVAEVDAQSHDSGTGFGRHPHINSDPVVINIANRFNDLSDEQEVAQQSDDLRIARWLEDQALRSLSWIIPTYIVVLLTFGFLAVVWNNSFNSKEASKIRSLFDAQGINPTLAAIFMSISAFSNTGSSPLDENFVPFATSSLVLVSLTVLFLGGNTLFPPILRFIIWGLRTLKRTDDPQKDVYNFLLRYPRRCSTHLFPHMQSLWIIATVLGFNTVDLIAFCALEWKSAALAALPDRSAWIKLMDGLFQSLNTRSSGMNVLTLSTLSPSLLVLYSAMMCIAVYPVYLSRQHTRLTHTDFNQLHLFSTSDLCDPEKHKSTADGADDNRLSTQYKQLLTRDSASLFVLVFLVCTLEMRNTNSDPLNYSVFNIVFEVISAYGNVGLSLGYSCEQWQRASSNSSTSQLADECKNVSYSFSGKWSSGSKLLLICCMILGKHRSLPNDDDSTIS

SEQ ID NO: 13162 - protein, 1144 aa, Populus tremula; identical to SEQ ID NO: 9790

SEQ ID NO: 13163 - protein, 1146 aa, Populus tremula; identical to SEQ ID NO: 9793

SEQ ID NO: 13164 - protein, 1146 aa, Populus tremula; identical to SEQ ID NO: 9796

SEQ ID NO: 13165 - protein, 665 aa, Scherffelia dubia
  misc_feature (178)..(178): Xaa can be any naturally occurring amino acid
RSVAAMAGRGRAFVVSAVCALALLCAVVRAEEEAKKIGTVIGIDLGTTYSCVGVYKNGRVEIIANDQGNRITPSYVAFTDNERLIGDAAKNQATSNPERPVYDVKRLIGRKFTDKDVQRDMKLVSYTIIDHNGKPYIQVDVKGEKKSFSPEEVSAMILVKMKETAEAFLGKTVKHAVXTVPAYFNDAQRQATKDAGVIAGLAVERIINEPTAAAIAYGLDQKGGEKNILVFDLGGGTFDVSVLAIDNGVFEVMSTNGDTHLGGEDFDQRVMEYFIKLIKKKYKKDISGDNRAKQKLRREPERAKRALSNQHQVRVEIEGLYEGVDLSEPLTRARFEELNNDLFRKTLGPVKKAMEDAGLEKSEIQEILLVGGSTRIPKVQELLKEYFDGKEPNKGVNPDEAVAFGAAVQGGILSGEGGEEVDGLLLLDVAPLTLGIETVGGVMTKLIPRNTVIPTKKSQTFTTYQDQQTTVSIQVFEGERTMTRDCHLLGKFDLNGIPPAPRGVPQIEVTFEVDANGILNVAAEDKGTGKKEKIVITNDKGRLSQEEIERMVQEAEEFADEDKKVKERIDARNSLETYCYNMKNTVEDSDKLADKLAEEDKEKVKEAVQEALDWMDENQTAEADEYKEKLKELEDVCNPIVSAAYQGGEGGGAGGEEDLGDHDEL

SEQ ID NO: 13166 - protein, 452 aa, marine gamma proteobacterium HTCC2143
MISALLLSDIARETGGQLFGEASFSNVCTDTRSVSPGDLFVALAGDHYDGNQFVSDAVIAGAVAAITSEAVTAAIPSVKVDDTRFALGQIARLNRRRFSGPVVALTGSAGKTTTKEMVARILCERGEVLATEANFNNEIGVPLTLLAIDPSHQFAVVEMGASHIGDIAYLTQFAEPTIAVLTNAMAVHIEGFGSIEAVAKTKGEIFENLPEGGVAIINQDEPFFQQWLQQAGKASVVTFSKYDTSANYYASNIHIQTNASTVFELHLAQQTITIKLALLGEHNVLNAVAAAAAAMTAGATVDDVKKGLESVRPVDGRLKASADSNRTVIDDTYNASPGSVMAAIDVLSGFSGRRCLILGTMAELGGLAEKSHRDVASYARHKGIEELLVVGEFASLVSESFGAACLPFDDVQQLLDVLDESLHSSVILVKGSRSAHMERVVEALKNNNKREK

SEQ ID NO: 13167 - protein, 449 aa, Magnetospirillum magnetotacticum MS-1
MIRKILIAAGTFALLSTTALTPVSAAERKETYKLLDLFGEVLEKVRSEYVEPVNDEDLIEAALNGMLASLDPHSSYLNPKNSKDMDIQTRGEFGGLGLEVTMENGWVKVVSPIDDTPAYRAGMQPGDFVTHLDGEQVQGLSLSEAVDRMRGTVNTDIKLTVRRAGVEQPFDIKLTRAVIKVQTVKGQTHGDIGYIRISQFSATTHADLVRIMAQLKKDIGKTPTGFVIDLRNNPGGLLDQAVAVSDDFLDKGEIVSTRSRRPEDTQRFNARPGDIADGLPLVVLINDGSASASEIVAGALQDHKRAVLLGTRSFGKGSVQTLMPLHGHGSLRLTTARYYTPSGRSIQAVGIEPDIKAAQSKVEPVAGAVVERRSEASLRKALPNPNGEKAKPAEKEKAEETKAPEQPKGEGGKAEAPAPIKLGDPAQDYQLARALDLLRGLSLYRPAQR

SEQ ID NO: 13168 - protein, 508 aa, marine gamma proteobacterium HTCC2143
MMAINEQKNSVILGDLTAIEDQRYAAIELSGIQSDSRKIAAGNLFLAVAGHAVDGRDYIAQAVANGAAAVLVERAGHSADKLNYPNVPIIAVENLNLKLSEIAGRFYNNPSHELSIVGVTGTNGKTSCTQLYMQIANLLGRSCGVIGTLGAGIDGQLNEGLNTTPDAISIQKILAEWRDHELAVAAMEVSSHGLEQGRVADVQFELALFTNLSRDHLDYHGSMLAYGETKARLFRQPGLKCAVINIDDHFGCALVDEMPATTDVIRYGVEPDARTNHSADVWVDNVRFHPSGVNARLHSDWGSVEINSPLLGEFNLSNLVAVICCFGLQGFALSSIANVIPKLMTVPGRMERIVSSADITVVVDYAHTPDGLEKALLAMRQHTDGKLWCVFGCGGNRDHGKRPLMGALVQRHADHVVVTSDNPRNESAAEIIDEILGGVDRPSMVEEDRGLAIQFAIANALPGDCVLIAGKGHEDHQLIGDFRVPFSDITQARLALAVRANAAGGDAR

SEQ ID NO: 13169 - protein, 269 aa, Clostridium thermocellum ATCC 27405
MGQKVRGNLIIIGGAEDKVGKKTILKYVADIVREKKGSLVILTTATQKPQEVGNNYRQVFETLGLMDIDVLNINSRDEADLDENAERIRSSGGIFFTGGDQLRITSILGGTKVYKALHEVYSKGVVIVGTSAGASVMSNTMIVEGKDNEPARKCTMKMAPGLGFLEEAIIDQHFDQRGRIGRLLCGVAENPFMLGIGIDEDTAIRVYPDAHFEVLGSNAVTVIDGSTIKSTNVSELNPDEILAISGVTLHVLPCGYGFDMKKKRSNSTY

SEQ ID NO: 13170 - protein, 68 aa, Brassica napus
MTTSKRLADRKIEKFDKNITKRGFVPETATKKGKDYPVGPILLGFFVFVVIGSSLFQIIRTATSGGMA

SEQ ID NO: 13171 - protein, 876 aa, Exiguobacterium sibiricum 255-15
MNYGLSERKIKQMSDTYAFRRGKRYVAAKKVTLRNYQSGDLLVEAAVQGEDLFTVTVRVKEHGVDAGCNCPSLAMDQSFCGHIVAVLLAMHHVQVYGTPGGNQSLIRPFATTRQTEDAAVTAYLQTLSKAERAKIRFDVNGSAIVMESITAQQRFIISPMYFDRLLQRRDHLRNLADVWLSPPLKQRLVSGPPTVELALDREAGGLELLVTFSYQGVRINPLQETNWLGRDVSLEGAVLRYVTESGFLERNGRYRLEEEAAEYQFLKGLLDPRVVYGELVVQVTESIRQSLPNGPFHPRIDVDTTDRLDWLTFRFSMDGIPEVELKQVLQSLVTRKTYHRLKNGQFVSFENRAFEQLQRVFRQLEAAEQDQLEAVLRAPALPNLKHLVGASFLHVHKQLTERWLELKNGTGVYLNFPEVLDRHLYPYQRAGIQFMANLAGHDGHGILADEMGLGKTIQAIGYLETLPPGRVLIVAPASLLHNWQAELTRFAPTRTVHLLTGARKHRLDQIETVPADGIFLISYPSLRADMEAHQAVEYDVVIFDEAQHLKNPASQTAVRLRRIRAKRRFALTGTPLENRTDDLWSIFRVIFPSLLPDLQTFQTWSHDEIKRFIRPFLMRRTKDEVLQDLPKKQIVHHYTDLGPTQKKLYASYLAKLQLETLQHLDETKREDRIKLLAGLTRLRQICCDPALFVEDYTGESTKLERLLTLIEEKLAAGHRILIFSQYTKMLARIRERLAAQQRAHFLLTGETPVEDRVALCERFNAGEVDLFLISLKAGGTGLNLATADTVILYDSWWNPAVEQQAADRAHRLGQQSPVEVIKLLMTGTIEEKMAELQDRKATMIDAVLSDQKPDILTIRELVRLLDSPAFIDSAGE

SEQ ID NO: 13172 - protein, 609 aa, Staphylococcus epidermidis RP62A
MGKVIGIDLGTTNSCVSILEGDEPKVIQNPEGARTTPSVVAFKNGETQVGEVAKRQAITNPNTVQSIKRHMGTDYKVDIEGKSYTPQELSAMILQNLKSTAENYLGDTVDKAVITVPAYFNDGERQATKDAGKIAGLEVERIINEPTAAALAYGLDKTETDQKVLVFDLGGGTFDVSILELGDGVFEVLSTAGDNKLGGDDFDQVIIDYLVSEFKKENGVDLSQDKMALQRLKDAAEKAKKDLSGVSQTQISLPFISAGENGPLHLEISLTRSKFEELADSLIKKTMEPTRQALKDAGLSTSEIDEVILVGGSTRIPAVQEAVKKEIGKEPHKGVNPDEVVAMGAAIQAGVITGDVKDVVLLDVTPLSLGIEIMGGRMNTLIERNTTIPTSKSQVYSTAADNQPAVDIHVLQGERPMASDNKTLGRFQLTDIPPAPRGVPQIEVTFDIDKNGIVNVTAKDLGTNKEQNITIQSSSSLSDEEIDRMVKDAEENAEADKKRREEVDLRNEADSLVFQVEKTVKDLGENISDEDKKNAEEKKDALKTALEGEDIDDIKAKKEELEKVIQELSAKVYEQAQQAQQQGQEEQGSQDSTVEDADFKEVKDDEDKK

SEQ ID NO: 13173 - protein, 159 aa, Frankia sp. FE245
ITKEQYSRDPRNIAKKAEEYLRGTGIADTAYFGPEAEFYIFDDVRYDYSPSGSMHAVDSVEAAWNTARKEEGGNLGYKPRFKGGYFPVPPTDHFTDLRSEMTRVLFDVGITVEMQHHEVGTAGQAEIDIRYDTLLKTADNLMLYKYVIRNVARSRGKTV

SEQ ID NO: 13174 - protein, 550 aa, Rhodopseudomonas palustris CGA009
MQAVAGRFTQNQRGDVEAKFQIFLTLLAVLAGTALLARRVNIAPAILLLIAGITLAFIPGMPAIELPPDLILLLVLPPLIYSASVAMSWREFCANLRAIGLLAIGCVIFTACAVAAASHYLIGLPWSVGFLLGAIVAPPDVVAPLAIARKLGLPRRIVVVLEGEGLANDATALILYRFAVAAIMTGAFSLTKASGTFVAIMAGELAFGVAVGWLSLRARHWVRDPQIEITLSLLTPYIAYWIPEHHGGSGVIATVACGLYISWNGPLLISAATRLQGIFFWDLVIYLIEGMLFLLTGFQLRALLERSKEFAFGDILSATLLVAAIVIAARFIWVYPAFYLPRFLSRRLRASDPYPSWRTVFVIGFTGVRGAVSLAAALALPYALPGGETFPYRDLILFVTFGVILITLVGLGLTLPAVVKLLGVTRVGHREQIAEHDDEITARREALAAAQASLKKITDNRELTDEVLKLLHARHQTRASLLPDPIGSPEHEASAVGIALVRELIAVERKFIHAQLRAGKITDEARRRIERDLDLEEASLANRESGPAPL

SEQ ID NO: 13175 - protein, 1126 aa, Arabidopsis thaliana; identical to SEQ ID NO: 9805
  misc_feature (722)..(722): Xaa can be any naturally occurring amino acid
  misc_feature (733)..(733): Xaa can be any naturally occurring amino acid

SEQ ID NO: 13176 - protein, 864 aa, Pinus sylvestris; identical to SEQ ID NO: 9806

SEQ ID NO: 13177 - protein, 593 aa, Mesorhizobium sp. BNC1
MTKTSGANRKGSAGRSDKALDHRLRRLRAHAKAPIERMGEGEQMRRSVALDCGWGRLIFAQTYTSNEGIIEALRNEEDNQRDIAFYVRDPHVLLQLAPGETFLDPSHTYRLDLSTYRSSRRQPKGFFIRRLASEADAKAVNAIYAARGMVPVAPEFFWSKRDSRSLTYLVAEEEATGDVIGTVTGVDHHRLFNDPERGASLWCLAVDPQSRHPGIGETLVRRLAEYFQARGAAYLDLSVLHDNEQAIRLYEKLGFQRVPTFTVKRKNPINEKLFVAPIEHYDELNPYARIIVDEARRRGVHIEVTDGAGGFFRLSHGGRSIHCRESLSELTSGVAVSICDDKAVTRRVIEKAGLRVPEQIVAGDEEELEAFLAKHGSVVVKPARGEQGRGVSVGLTNMEDISRAVAKAREVNDRVLVEACFDGQDLRLVVIGGKVVAAAVRRPPSVVGDGRKTLRELIEQQSRRRAAATGGESTIPIDDETQRCLAASGCTLETVPAKGNEVLVRKTANLHTGGSIHDVTDIVHPKLVDAACRAARAIDIPVTGIDLMVKAPSKPDYVFIEANERPGLANHEPQPTAQRFMDLLFPQSWFEEA

SEQ ID NO: 13178 - protein, 158 aa, Frankia sp. FE46
ITKEQYSRDPRNIAKKAEEYLRGTGIADTAYFGPEAEFYIFDDVRYDYNPYGSMHAVDSVEAAWNTARKEEGGNLGYKPRFKGGYFPVPPTDHFTDLRSEMTRVLFEVGITVEMQHHEVGTAGQAEIDIRYDTLLKTADNLMLYKYVIRNVARSRGKT

SEQ ID NO: 13179 - protein, 1164 aa, Arabidopsis thaliana; identical to SEQ ID NO: 9809
  misc_feature (647)..(647): Xaa can be any naturally occurring amino acid

SEQ ID NO: 13180 - protein, 154 aa, Zea mays
  misc_feature (17)..(17): Xaa can be any naturally occurring amino acid
QGMWVELSGKMHVLARXLGHLRQKTDDRIVLVSNYTQTLDLFVQLCRERRYPYVRLDGSTSINKRQKLVNQFNDLSRDEFVFLLSSKAGGCGLNLVGGNRLVLFDPDWNPANDKQAAARVWRDGQKKRVYIYRFLSTGTIEEKVYQRQMSKEGL

SEQ ID NO: 13181 - protein, 1104 aa, Debaryomyces hansenii CBS767
MRRDMSWYKDPSEDSAIQVEDSPKKESSYVQVPTSSPIHVKSSPTKSNNDLMPPSRTQINNGSGDNEDKERKLEAKRQAIRNHKDFPMVKRRFYYLQESDIFKGFVKGKGNLREITQWLTDNYNKAEILGRHEAELKRQRELGQEEKMKQEKERLLREYQRQEEINQRREQEEKERSEKEGQNIDDQYDDEDLSPIKVRGKARIKSAAPPPPPPPVLLESPEKQSSTKVHISKPKVSILDKYKYKPKQQPSIDQVFRPQEDIQPKRRKLVRASTVSSGDDSNRGSPVAATFNYQDQYVPKLKMTMNGHAVESDQSNRGDDGIVEDDDLEKLEEKIKANRRAAKASKNDRVIEVSDNDLEDDDMSDDMSEEDDDEGYKTGLTTIDSQILEFLNNASTQDIIEICNVPPKVSELIITKRPFQNIYVVAEDKFELPSENTEESGNEKKRRVQRKTLGQKIIENTEFSLKGYKAVDSLIKKCSEYGDLISKQMEKWGVTITGEGELEMVDLEPTQNAIEIEDKDDYEEEDEDIIVHHKSKSLTYIKEKPSLLPEDIDLKNYQQVGINWLNLLYRNNLSCILADEMGLGKTCQVISFMAHLKETETKKGPHLVIVPSSTLENWLREFNKFCPDLMVQAYYGSQSEREELRYDLQNSDYDVMVTTYNLATGAAPDFKFLRNQNFNMIVYDEGHMLKNSTSERYNKLMRLNAKYRLLLTGTPLQNNLKELVSLLAFMLPNLFNDKREDLQGLFNQKVSTVDSSEGNYNPLLSLQAIAKAKTMMTPFVLRRKKVQVLKHLPGKIHKIENCELTPTQRAIYDDYLNQGKRTRIERERRKKLSSKENEKAKKNAIPSSSNVMMSLRKASLHPLLFRTLFTDEKVAKMAKAIMNEPEYFDANQTYILEDMKVMADYELNNLCEKFPKTLSKFVLQDEDWLNGGKISKLIEILDKIINKKEKVLIFSLFTQMLDILEKVLTISNMKFLRLDGQTSVDTRQDLIDKFYDDETIPVFLLSTKAGGFGINLVAANHVIIFDQSFNPHDDKQAEDRAHRVGQTSEVVVTKLIAKNTIEENMLQLAENKLQLDQSISSNELTDSKFEEKAASLFEKLLFDN

SEQ ID NO: 13182 - protein, 183 aa, Arabidopsis thaliana
  misc_feature (134)..(134): Xaa can be any naturally occurring amino acid
MASSMLSSATMVASPAQATMVAPFNGLKSSAAFPATRKANNDITSITSNGGRVNCMQVWPPIGKKKFETLSYLPDLTDSELAKEVDYLIRNKWIPCVEFELEHGFVYREHGNSPGYYDGRYWTMWKLPLFGCTXDSVQVVEREWEKCQERSTPMPSFRIIGFDNTRQVQCISFIAYKPPSFTG

SEQ ID NO: 13183 - protein, 159 aa, Frankia sp. FE14
ITKEQYSRDPRNIAKKAETYLRGTGIADTAYFGPEAEFYIFDDVRYDYSPYGSMHQVDSVEAAWNTARKEEGGNLGYKPRFKGGYFPVPPTDHFTDLRSEMTRVLYETGITVEMQHHEVGTAGQAEIDIRYDTLLKTADNLMLYKYVIRNVARSRGKTV

SEQ ID NO: 13184 - protein, 417 aa, Anabaena variabilis ATCC 29413
MGFMQKQFFRLGFSLLVALSLAVGVVVQPATALTEEQKLVSEVWRIVNRSYLDETFNHQNWANVRQKALEKPLTDHKAAYGAIQNMLKTLGDPFTRFLDPEQYRSLQVSTSGELTGVGLQIALNPQSGKLEVVSPIAGSPADQAGIKPRDRIVKIEGISTTDLTLDEAATRMRGPIGSLVTLVIERDGEGEKEIRIVRDRIALNPVVAELRSSPEGKSFGYLRLTQFNANASMELAHAISSLEKKGAAAYILDLRNNPGGLLQAGIEIARQWLDSGTIVYTVNRQGIQGSFEAFGPALTDDPLIILVNQGTASASEILAGALQDNGRAQLVGETTFGKGLIQSLFELSDGSGLAVTIAKYETPNHRDINKLGIKPDTVVTQQILTRDEIATETDLQYQAALDLLSKNSVVAGIGNKG

SEQ ID NO: 13185 - protein, 824 aa, Zea mays
MAASSSRGAAAAAVDDDDEPYLLGFIISKIVGMRYYRGKVHGRETVGLVRQPLNRYDNNAIAVFNARNDQVGHLPGALAAVLAPLLDSHLLAAAQGIVPRSGSKINPNAYSLPCQVHLFARPAAASVVEAALHEAGIDLIHVDHPEFALSQAAAVMEQFKKPDRDRDVDKLFSLVGKEGKNQTQPMDPPGDVVLSELFGHQKEALGWMVHREESADLPPFWQEGEDGGFENVLTNQKTEKRPPPLKGGIFADDMGLGKTLTLLSLIGRTKARNVGAKKARGGKRRKVEDGGEGSRTTLVVCPPSVFSSWVTQLEEHLKAGSLKVYMYHGERTRDKKELLKYDLVLTTYSILGTEFEQEDSPVKDIEWFRVILDEAHVIKNSAARQTKAVIALNAERRWVVTGTPIQNSSFDLYPLMAFLRFQPFSIKSYWQSLIQRPLEKGSKAGLSRLQNLLGAISLRRIKEMDDGNKSMVELPSKTVLACYIDLSAEEREYYDQMEQEGRNKMQEFGDRDSILSNYSTVLYFILRLRQLCDDVALCPLDMKAWFPASSIEDVSKHPELLKKLALLVDDGDDFDCPICLSPPTKTVITSCTHIYCQTCILKILKSSSSRCPICRRTLSKEDLFLAPEVKHPDEDGSGNLESDRPLSSKVQALLKLLTASQNEDPSSKSVVFSQFRKMLILLEAPLRRAGFKTLRLDGSMSAKKRLQVIQEFSHGGSDSPTVLLASLKAAGAGVNLTAASTVYLFDPWWNPGVEEQAMDRVHRIGQKKEVKVIRLIVKGSIEERILALQERKKRLISGAFGKKGGKNEKEMRVEELRMMLGLGK

SEQ ID NO: 13186 - protein, 1164 aa, Arabidopsis thaliana; identical to SEQ ID NO: 9812
  misc_feature (665)..(665): Xaa can be any naturally occurring amino acid
  misc_feature (699)..(699): Xaa can be any naturally occurring amino acid

SEQ ID NO: 13187 - protein, 682 aa, Microcystis aeruginosa PCC 7806
MGKVIGIDLGTTNSCIAVLEGGQPIIVPNSEGGRTTPSIVGFGKGQRLVGQLAKRQAVTNAENTVYSIKRFIGRRWQDTETERGRVAYHCQRGRDDTVNIKIRDREFTPQEISAMILQKLKADAEAYMGEAINEAVITVPAYFTDAQRQATKDAGMIAGLEVLRIINEPTAAALAYGLDKQNEDQHILVFDLGGGTFDVSILRLGKGVFEVKATAGNNHLGGDDFDNLLVRWLVENFQSQENIDLSSDRMAIQRLREAAEKAKIELSSMISTSINLPFIAADETSPKHLELELTRAKFEELTRELVEKTLEPVQQSLKDSELQPSDIDRVVLVGGSTRMPAVQQLISRFFSTSQIDRSVNPDEAVALGAAIQAGVLGGEVEDILLLDVTPLSLGIETLGEVFTKIIDRNTTIPTSKSQVFSTAADGQTSVEIHVLQGERTMSRDNKTLGKFLLTGIPPAPRGVPQIEVAFEIDVNGILKVAASDQGTGKEQSILISHTGGLKPNEIEKMRLEAEKYAESDRRRLQMIDIRQQCDSLFYSYEVTIREHSQLVAPDIRQLADQKRQQLEIALRDPSLSPEKLKTTLAEFRQLVLEIGTRIYTGRQEQNQPLNGAGFESIDVTEKLTRPTRTRATSSNTFTNRPTLSRTRTRTYSNLETKSTELDSDDDPYDGEEISTSDYEAVD

SEQ ID NO: 13188 - protein, 159 aa, Frankia sp. FE34
ITKEQYSRDPRNIAKKAETYLRGTGIADTAYFGPEAEFYIFDDVRYDYNPYGSMHQVDSVEAAWNTARKEEGGNLGYKPRFKGGYFPVPPTDHFTDLRSEMTRVLYETGITVEMQHHEVGTAGQAEIDIRYDTLLKTADNLMLYKYVIRNVARSRGKTV

SEQ ID NO: 13189 - protein, 1164 aa, Arabidopsis thaliana; identical to SEQ ID NO: 9813
  misc_feature (1116)..(1116): Xaa can be any naturally occurring amino acid

SEQ ID NO: 13190 - protein, 1164 aa, Arabidopsis thaliana; identical to SEQ ID NO: 9814

SEQ ID NO: 13191 - protein, 169 aa, Synechocystis sp. PCC 6803
MTAQANNTIYGFSANALDGSPVALRDFEGKVLLIVNTASQCGFTPQYQGLQALYNRFGDRGFTVLGFPCNQFGQQEPGGSGEIKNFCETRYGVTFPLFEKVEVNGPNAHPLFKFLTAASPGMAIPFLGGAEDIKWNFTKFLVDRQGKVVKRYGSIAKPDEIAADIEKLL

SEQ ID NO: 13192 - protein, 499 aa, Synechococcus sp. WH 7803
MTQTLHALLKAVGLPVPAGVANATVTALTCDSRCVGQGSLFIGLPGERVDGGSFWPAALASGAAAVLIGEQAAAAHPPAPGDSVLVVPDPVAFWAGELASAFWQRPSMRMELIGVTGTNGKTTTTHLIEHLSQACGRPAALFGTLVNRWPGHSLTATHTTAAADRLQAQLAEALEGGTQVAAMEVSSHALDQQRVAGCRFSGAVFTNLTQDHLDYHPSMEAYFEAKALLFASPYLVGEGPRAVVNVDDPWGRQLADRLGERAWRCSLAHEADLTMADLRMTSNGVDGALRTPLGEGRFHSPLVGRFNLMNVLQAVGALLQQGLPLPLLLNALPSFRGVPGRMERIVLTGSAAEDHPAVLVDYAHTPDGLRNALEACRPFVRGQLICVFGCGGDRDRGKRPQMAAIAAALADQVVVTSDNPRTEDPGQILDDVVAGLPADAERQVEVDRAKAIALAIAQARCGDLVLIAGKGHEDYQILGTEKVHFDDREQAEQALRHWR

SEQ ID NO: 13193 - protein, 1146 aa, Populus tremula; identical to SEQ ID NO: 9816

SEQ ID NO: 13194 - protein, 562 aa, Rhodospirillum rubrum ATCC 11170
MDDLSHEFKKEASIDCGWGRLVFGQTFDGPGRLAEVMRTEGPERRDVAIYVRDPHVVLAMAPHEMFLDPSHTYRLDLARYRPSARQPHGFTIRPLAGPGDVDDINRIYAARHMVAVRPDFFEGPLASRGITLLVAEEGAGGRIIGTVMAIDHGRAFGDPARGSSFWCLAVDPQAIHPGIGEALVRAAVEQLAGAGATHTDLTVMHDNDQAIALYDKLGFERVDFFTMKRKNPINERLFTGPAPEARLNPYAEIIVTEARRRGIDVRVTDAEGGFFRLSFGGRSVHCRESLSELTSGVAVSICDDKAVTRRLVEAAGICVPEQIEAGDGAAVRAFLAHHGSVVVKPARGEQGRGIAVGLDTAEAVDAAIVTAGRFCERVLVERCAAGEDLRLIIIDFHLVAAALRRPPRVTGDAKTTLRDLIAVQSRRRAAATGGESSIPLDDETVRCLAASGFTLEDVPVEGCDIVVRRTANLHTGGTIHDVTDEVHPDLVAAGIRAARAIDIPVVGIDLLVRSPRAPDYVFIEANERPGLANHQPQPTAERFIDLLFPNSVPAAVRQASMI

SEQ ID NO: 13195 - protein, 646 aa, Herbaspirillum seropedicae
MGKIIGIDLGTTNSCVAVMEGNQPKVIENSEGARTTPSIIAYQEDGEILVGAPAKRQAVTNPKNTIYAAKRLIGRKFTEKEVQKDINLMPYQIVAADNGDAWIGVRDKKLAPPQISAEVLRKMKKTAEDYLGEEVTEAVITVPAYFNDAQRQATKDAGRIAGLDVKRIINEPTAAALAFGLDKAEKGDRKIAVYDLGGGTFDVSIIEIADVDGEKQFEVLSTNGDTFLGGEDFDQRLIDYIIDEFKKINGLDLSKDAIALQRIKASAERAKIELSSSQQTEINEPYIAMANGAPVHLNLKITRAKLESLVEELIAKTIEPCRTAIKDAGVKVSDIDDVILVGGMTRMPKVIEKVKEFFGKDPRRDVNPDEAVAVGAAIQGSVLSGDRKDVLLLDVTPLSLGIETMGGVMTKMIKKNTTIPTKFSQVFSTADDNQPAVTIKVYQGEREMAVGNKPLGEFNLEGIPPAPRGTPQIEVTFDIDANGILHVGAKDKATGKENKITIKANSGLNEEEIEKMVRDAEANAEEDKRLKELAETRNQGDALVHSTKKALGEYGDKLEAGEKDVIEAAIKNLEEALKGDDKAAIDAKTEALSTAAQKLGEKMYADQQAQAAAAGGAAGAAGAQAGAAGAAPKDDNVVDADFKEVK

SEQ ID NO: 13196 - protein, 1146 aa, Populus tremula; identical to SEQ ID NO: 9818

SEQ ID NO: 13197 - protein, 223 aa, Glycine max; identical to SEQ ID NO: 13086

SEQ ID NO: 13198 - protein, 1146 aa, Populus tremula; identical to SEQ ID NO: 9819

SEQ ID NO: 13199 - protein, 1146 aa, Populus tremula; identical to SEQ ID NO: 9821

SEQ ID NO: 13200 - protein, 482 aa, Bacillus pumilus SAFR-032
MKKQIASIMVSVVLLISAGVMTHKEGTHAESPQAAVAVAGQAQSSDKAKENGMEKIEKAYDLISNEYVEEVDRQKLLEGAIQGMLSTLNDPYSVYMDKQTAKQFSDSLDSSFEGIGAEVGMDEGKIIIVSAFKKSPAAKAGLKPKDEIISIDGESMKEKSLNDAVLKIRGKKGTSVALKIRRNGIEKELTFQIKREEIPLETVTSSVKEVNGHKTGYIAISSFSEDTAKDFTSSLKQLEKKGIEGLVLDVRGNPGGYLQSVEDILKHFITKDQPYIQIAERNGDRKRYFSKRKEQKPYPVNVLIDKGSASASEILAGAMKEAGKYEVVGDVSFGKGTVQQAVPMGDGSNIKLTLYKWLTPKGNWIHKKGVVPTIAIHQPDYFTVGPLQLKEPLQLDMNNEEVRQAQTLLKGLSFDPGRVDGYFDEETKKAVLAFQSTYNLDKSGVIDLKTAKMMNKMVDEVKSYEKNDLQLQTALKALYLKK

SEQ ID NO: 13201 - protein, 1422 aa, Ashbya gossypii ATCC 10895
MAKDLPDEVLANPELYGLRRSHRTPVGGSTQATYYESNDDEDSVVVSGRGRKRKKAIDIDSYSEEEPADNESTNEDISGDEDEDFGAPVRRRRKKGRRELSAEDDIMLPTRFSSRNNKAVNYNIDYSDDDLLESAEEEYEGDEGDEGEEEAYAQTPQIPDEHGIDFVVTHRLHEGHTEPVEWDVPECKECYEFLIKWNNESHIHNTWETAESLGNVRGVKKVDNYIKQYILLDHELRTDKYTTREDIEVMDLEHERRCDEFEEFKKVERIIDSDRVTLDDGSSQLQYLVKWKRLNYDEATWENASVIVKMAPEEVKRFQSRSSSKILPQHSSNYGSQRPGFEKLSVQPSFIKGGELRDFQLTGINWMAFLWSKSDNGILADEMGLGKTVQTVSFISWLIFARRQNGPHLVVVPLSTMPAWQETFEKWAPELNCVYYMGNQKSRDVIREYEFYTNPHTKGKKNIKFNVLLTTYEYILKDRLELGAIKWQFLAVDEAHRLKNAESSLYESLSSFKVANRMLITGTPLQNNIKELAALVNFLMPGKFTIDQEIDFENQDEKQENYIRDLHKRLQPYILRRLKKDVEKSLPSKTERILRVELSDVQTEYYKNILTKNYNALTAGTKGTHFSLLNIMNELKKASNHPYLFGNAENRVLAKFGDGNRSRENILRGLIMSSGKMVLLDKLLTRLKKDGHRVLIFSQMVRMLDILGDYLSIKGINFQRLDGTVPSSQRRISIDHFNAPDSNDFVFLLSTRAGGLGINLMTADTVIIFDSDWNPQADLQAMARAHRIGQKNHVMVYRFVSKDTVEEEVLERARKKMILEYAIISLGVTDGNKYTSKSKAEPSAGELSEILKFGAGNMFKAHDNQKKLEDLNLDDVLNHAEDHVTTPDLGESHLGGEEFLKQFEVTDYKADVEWDDIIPEDELRKLKDEEQKRKDEEYVQEQLQMMNRRNVALNKIKNSVNGDGAQSLSDKEDSRSKKRAKSNNLNSIGEREIRALYKAILKYGDLTERLGDLIADGTLPVKSLEKYGELYDELMSIARKQINDEESKRNEAISRLERDVEEYKTKVKSGEIKPDDNAKDLPIARLAAKRREKRAVLFEFYEIKGLNAETIVNRTDDLRFLHNFLKNNYPSDPMKFRFLNRLPKPITNWNCTWTQEDDEKLLVGVDKYGYGSWSQVRDDPFLGLSDKIFLNEPGTQTNDSAAADADAADKKTRLANAAKKVPGSVHLGRRVDYLLTVLREEAKGTDSAAAPQAALAAKKRARKSSGSSKSATPDARPEDSPSIKRTRALPAASRPSSGSPGPQLKRNGKKQASPKAPMEREYESMDEDECRRTMHSVRASLKRLKRGGAGLDRNEWAAILKRELLAVGNYIERHKGDSADRDRAQFKRHLWSYSAQFWPAQVKSSKIMAMYDKLAASAAAPR

SEQ ID NO: 13202 - protein, 1146 aa, Populus tremula; identical to SEQ ID NO: 9824

SEQ ID NO: 13203 - protein, 579 aa, Azotobacter vinelandii
MKTSAYGQRLLRGQTPSYERLQALLAEEGQSERHLPVALHCGWGRLLVGHTYPDPASLADDLLGERPGERDIALYVAAPHQVLAQAPQQLFLDPSDTLRLWFSDYRPARRTFRGFTIRRVQSQADWDGLNRLYQTRGMLQVDPGRLTPREDGGPVYWLAEDSDSKALVGGAMGLNHVEAYGDPEHGSSLWCLAVDPACTRPGVGEALMRHLIEHFMSRGLAYLDLSVLHDNHQAKNLYAKLGFRPLPTFAVKRKNSINQPLFLGPGPAAELNPYARIIVDEANRRGIEAQVDDAEAGLFTLIHGGRRIRCRESLSDLTSAVSMTLCQDKQLTHRWLSRAGLRMPAQRLAGSREENAAFLAEHWRLVVKPVNGEQGQGVAVDLGTLEEVEHAIETARRFDSRVLLESFHRGQDLRILVIGFEVVAAALRHPAEVIGDGRTSIRALIEAQSRRRQAASGGESRIPLDAETERVLRQAGHDYDSVLPEGRRLAVRRTANLHTGGCLEDVTARLHPALMEAAVLAARALDIPVVGLDLLVEAVDRPDYVIIEANERAGLANHEPQPTAERFVDLLFPLSKSPS

SEQ ID NO: 13204 - protein, 213 aa, Arabidopsis thaliana
MTNQTIKLGSGLRQDNEVISVMRAGKLRYSKPNKYWVESSHKRYVPRPEDHVLGIVVDCKGENYWIDIKGPQLALLPVLAFEGANRRNYPKFEVSTLLYTRVVKTNTGMNPELSCVDESGKAAGFGPLKDGFMFETSTGLSRMLLSSPTCPVLEALGKKLSFETAFGLNGRCWVHAAAPRIVIIVANALMNSETLSGTQQRIMVEKLLEKISD

SEQ ID NO: 13205 - protein, 1738 aa, Arabidopsis thaliana
MAFFRNYSNDTVSHNVLDENEERQNAATFQSSPLNEDVDGTYSERGFDMNMDVQYQSDPEPGCSIRQPNETAVDNVADPVDSHYQSSTKRLGVTGRWGSTFWKDCQPMGQREGSDPAKDSQSGYKEAYHSEDNHSNDRSEKLDSENENDNENEEEDNEMNKHQSGQADVPADEMLSDEYYEQDEDNQSDHVHYKGYSNPTNSRSLPKAGSAVHSNSRTSRAIHKNIHYSDSNHDHNGDADMDYEEEEDEDDPEDADFEPYDAADDGGASKKHGQGWDVSDEDPESDEEIDLSDYEDDYGTKKPKVRQQSKGFRKSSAGLERKSFHVSSRQKRKTSYQDDDSEEDSENDNDEGFRSLARRGTTLRQNNGRSTNTIGQSSEVRSSTRSVRKVSYVESEDSEDIDDGKNRKNQKDDIEEEDADVIEKVLWHQLKGMGEDVQTNNKSTVPVLVSQLFDTEPDWNEMEFLIKWKGQSHLHCQWKTLSDLQNLSGFKKVLNYTKKVTEEIRYRTALSREEIEVNDVSKEMDLDIIKQNSQVERIIADRISKDGLGDVVPEYLVKWQGLSYAEATWEKDVDIAFAQVAIDEYKAREVSIAVQGKMVEQQRTKGKGENSFSNAELWLLFSVASLRKLDEQPEWLIGGTLRDYQLEGLNFLVNSWLNDTNVILADEMGLGKTVQSVSMLGFLQNTQQIPGPFLVVVPLSTLANWAKEFRKWLPGMNIIVYVGTRASREVRNKTNDVHKVGRPIKFNALLTTYEVVLKDKAVLSKIKWIYLMVDEAHRLKNSEAQLYTALLEFSTKNKLLITGTPLQNSVEELWALLHFLDPGKFKNKDEFVENYKNLSSFNESELANLHLELRPHILRRVIKDVEKSLPPKIERILRVEMSPLQKQYYKWILERNFHDLNKGVRGNQVSLLNIVVELKKCCNHPFLFESADHGYGGDINDNSKLDKIILSSGKLVILDKLLVRLRETKHRVLIFSQMVRMLDILAEYLSLRGFQFQRLDGSTKAELRQQAMDHFNAPASDDFCFLLSTRAGGLGINLATADTVVIFDSDWNPQNDLQAMSRAHRIGQQEVVNIYRFVTSKSVEEEILERAKRKMVLDHLVIQKLNAEGRLEKRETKKGSNFDKNELSAILRFGAEELFKEDKNDEESKKRLLSMDIDEILERAEQVEEKHTDETEHELLGAFKVANFCNAEDDGSFWSRWIKPDSVVTAEEALAPRAARNTKSYVDPSHPDRTSKRKKKGSEPPEHTERSQKRRKTEYFVPSTPLLEGTSAQVRGWSYGNLPKRDAQRFYRTVMKFGNHNQMACIAEEVGGVVEAAPEEAQVELFDALIDGCKESVETGNFEPKGPVLDFFGVPVKANELLKRVQGLQLLSKRISRYNDPISQFRVLSYLKPSNWSKGCGWNQIDDARLLLGILYHGFGNWEKIRLDESLGLTKKIAPVELQHHETFLPRAPNLKERATALLEMELAAAGGKNTNAKASRKNSKKVKDNLINQFKAPARDRRGKSGPANVSLLSTKDGPRKTQKAEPLVKEEGEMSDDGEVYEQFKEQKWMEWCEDVLADEIKTLGRLQRLQTTSADLPKEKVLFKIRRYLEILGRRIDAIVLEHEEDLYKQDRMTMRLWNYVSTFSNLSGDRLNQIYSKLKQEKEEEEGVGPSHLNGSRNFQRQQKFKTAGNSQGSQQVHKGIDTAKFEAWKRRRRTENDVQTERPTITNSNSLGILGPGPLDRSHRARQTGFPPR

SEQ ID NO: 13206 - protein, 316 aa, Petunia x hybrida
MEQENHNNNNCTNDKESACISSVLPGWFSEISPLWPGEAHSLKVEKILFQGKSDYQNVMVFQSSTYGKVLVLDGVIQLTERDECAYQEMITHLPLCSIPNPKKVLVIGGGDGGVLREVSRHSSIEQIDICEIDKMVVEVSKQFFPDVAVGYEDPRVNLHIGDGVAFLKAVPAGTYDAVIVDSSDPIGPAQELFEKPFFETVARALRPGGVVSTQAESIWLHMDIIENIVTNCRQIFKGSVNYAWTTVPTYPSGMIGFMLCSTEGLEVDFKNPVNLIENDEIHSKTLPPLKFYNFEIHKASFALPSFAKRVIESKGN

SEQ ID NO: 13207 - protein, 607 aa, Geobacillus kaustophilus HTA426
MSKIIGIDLGTTNSCVAVLEGGEVKVIPNPEGNRTTPSVVAFKNGERLVGEVAKRQAITNPNTIISIKRHMGTDYKVEIEGKQYTPQEISAIILQYLKSYAEDYLGEPVTRAVITVPAYFNDAQRQATKDAGRIAGLEVERIINEPTAAALAYGLDKEEDQTILVYDLGGGTFDVSILELGDGVFEVKATAGDNHLGGDDFDQVIIDYLVNQFKQEHGIDLSKDKMALQRLKDAAEKAKKELSGVTQTQISLPFISANENGPLHLEMTLTRAKFEELSAHLVERTMGPVRQALQDAGLTPADIDKVILVGGSTRIPAVQEAIKRELGKEPHKGVNPDEVVAIGAAIQGGVIAGEVKDVVLLDVTPLSLGIETMGGVFTKLIERNTTIPTSKSQVFTTAADNQTTVDIHVLQGERPMAADNKSLGRFQLTGIPPAPRGVPQIEVTFDIDANGIVHVRAKDLGTNKEQSITIKSSSGLSEEEIQRMIKEAEENAEADRKRKEAAELRNEADQLIFMTDKTLKEVEGKVSADEIKKAQDAKEALKAALEKNDIDDIRKKKDALQEAVQQLSIKLYEQAAKQAQSAGSQGGAANHKDNVVDAEFEEVNDDK

SEQ ID NO: 13208 - protein, 182 aa, Brassica napus
  misc_feature (40)..(40): Xaa can be any naturally occurring amino acid
MAYSMLSSAAVVTSPAQATMVAPFTGLKSSSAFPVTRKAXNNDITSIVSNGGRVNSMQVWPPVGKKKFETLSYLPDLTEVELGKEVDYLLRNKWIPCVEFELEHGFVYREHGSTPGYYDGRYWTMWKLPLFGCTDSAQVLKEVQECKTEYPNAFIRIIGFDNNRQVQCISFIAYKPPSFTGA

SEQ ID NO: 13209 - protein, 653 aa, Gibberella zeae PH-1
MGPAVGIDLGTTYSCVGIFREDRCDIIANDQGNRTTPSFVGFTDTERLIGDAAKNQVAMNPQNTVFDAKRLIGRKFADAEVQADMKHFPFTIIDKAGKPAIEVEFKGEKKTFTPEEISAMILTKMRETAESYLGETVNNAVVTVPAYFNDSQRQATKDAGLIAGLNVLRIINEPTAAAIAYGLDKKVEGERNVLIFDLGGGTFDVSLLTIEEGIFEVKSTAGDTHLGGEDFDNRLVNHFVNEFKRKHKKDLSTNVRALRRLRTACERAKRTLSSSAQTSIEIDSLFEGIDFYTSITRARFEELCQDLFRSTIQPVDRVLTDAKIDKSLVHEIVLVGGSTRIPRVQKLITDYFNGKEPNKSINPDEAVAYGAAVQAAILSGDTSSKATNEILLLDVAPLSLGIETAGGMMTKLIPRNTTIPTKKSEVFSTFSDNQPGVLIQVYEGERQRTKDNNLMGKFELTGIPPAPRGVPQIEVTFDLDANGIMNVSAVEKGTGKSNKIVITNDKGRLSKEEIERMLNDAEKYKEEDEAEGKRVAAKNGLESYAYSLRNTLSDPKVEEKIEASDKETLTAEIDKVVQWLDDNQQATREEYEEHQKELEGKANPIMMKFYGAGGEGAPGGMPGMPGGPGGFPGAGGPAPGAGGDDGPTVEEVD

SEQ ID NO: 13210 - protein, 141 aa, Arabidopsis thaliana; identical to SEQ ID NO: 10482

SEQ ID NO: 13211 - protein, 343 aa, Leptospira interrogans serovar Lai str. 56601
MQSLKLKPGEFLSPEKFVLEGFEDLEISTQIVLRDALNRGLEVEILDRKNHFLRLKNQNGLVQYVKEASKTALDSYITFLVMENKTISKIIMYEYNLQVPAGDSFIDSESALFFWQKNLDRKMVVKPVTTNFGIGISVLPPRTSEEDAKKAIKIAFNHSESIIVEEFAEGNEYRFLVIGEETVAVCNRIPANVTGDGIHTIQDLVSFKNEDPRRGVGHVTPLEKIQLGDTELDVLQQSGFTKDFIPAKDQKVFLRKNSNISTGGDSMDVTDLAHPYYKELAVKAAKSVGAKICGVDIILQDLEKKGDYRILELNFNPVLYIHNYPYEGKNRDVGNKILDLLGF

SEQ ID NO: 13212 - protein, 195 aa, Araucaria heterophylla; identical to SEQ ID NO: 9829

SEQ ID NO: 13213 - protein, 174 aa, Zea mays
MAEAPASPGGGGGSHESGSPRGGGGGGSVREQDRFLPIANISRIMKKAIPANGKIAKDAKETVQECVSEFISFITSEASDKCQREKRKTINGDDLLWAMATLGFEDYIEPLKVYLQKYREMEGDSKLTAKSSDGSIKKDALGHVGASSSAAQGGAYNQGMGYMQPQYHNGDISN

SEQ ID NO: 13214 - protein, 177 aa, Arabidopsis thaliana; identical to SEQ ID NO: 562

SEQ ID NO: 13215 - protein, 468 aa, Neorickettsia sennetsu str. Miyayama
MTNNRAASILEFVAKNEIRFIDFRFTSITGKFLHITRHSDSITADALTHGISLDSSLIQGWHDVDRSDVVLVPDLESCSSFLDPFAAQPTLCVVCDIVEPHGRGSYEHSPRATTKKAMEFLRSIGIADKAFFGLEMEFFVLDDARFAVKENGAFFELDSSEGIYNSGRRYEYNNHAHREGSRNCYLASQPSDSLNDIRAEILETLREVKIKPLLHHHGAASSQCRICFHHGEALETSDNMQKCKYITRNVASSYGKSATFMPKPFKDYNGNGMRLHVSLWKDEQNLFVPQDPREEISQLCKYYIGGIIKHRKALNAILNPLANSYKRLADIHNASYGLGYSPENRLAVVRIPHCRKGNPSGKRIEIRFPDAGTNPYIGTAALIMAGIAGIREKVLPEAAVELEKSSKVSLCRSLEEALLALDTDRQFLTEGDVFTNDQLDTYIKLLSDDSEEVSKHPVPIEFIKYYNV

SEQ ID NO: 13216 - protein, 492 aa, Carboxydothermus hydrogenoformans Z-2901
MKIAELVEILKTIITKNGINWAELEVTGIEQDSRQVKPGNIFVAIKGFTADGHDFIEKVIEKKPALIVAEEERPGIFGVNHLLVKDSRQALALLARTFYGNPTEKISVIGVTGTNGKTTVTHLVTSLLESFGYKTGLIGTIYNRIGDKILPVTNTTPDALSLQRLFAEMVKSEVSHVAMEVSSHALVQKRVLGIDFKTGVFTNLTQDHLDFHESMENYFNAKKELFKILAEQKALPGVINKDDFYGQRILKEVAHPFVTYGIKEQADITAKNVELTNSGTAFTLCYQEEEYPVKVKLLGLFNVYNILAAVGTLLTLGFSLPDIVKNLPLLNPVPGRFELIDEGQDFAVIVDYAHTPDGLENILKSARAITPGRVIAVFGCGGDRDKTKRPKMGKISATLADITIITSDNPRTEDPEAIINEIEKGFFDALPGKYLKEVDRKKAIKTALLLAKPGDTVVIAGKGHEDYQIIGTTKYPFDDRVVAREILRGERR

SEQ ID NO: 13217 - protein, 133 aa, Vitis vinifera
MAEAPTSPGGGGSHESGEHSPRSNVREQDRYLPIANISRIMKKALPANGKIAKDAKETLQECVSEFISFITSEASDKCQKEKRKTINGDDLLWAMATLGFEDYIDPLKVYLHRFREGDAKGSVKGGDGSTKKD

SEQ ID NO: 13218 - protein, 483 aa, Clostridium acetobutylicum ATCC 824
MKLKQLLQNIDYDLIKGDININIEGISYNSKKVKQNYVFVSIKGARFDGHDFIKEAAQNGAAAVIIDEDFHDSIENTTLVKVKNSKVALACLCNLFYEEPSRELNLVGVTGTNGKTTVIHYIRDMLEAFGNSTGTIGTLGYELKDKEINVEKINPTTPEALELNQILRDFIDKGAKNAVMEVTSSALMKHRVDYCSFKVGVFTNLSQDHLDEHGTIENYKNEKIKLFKMCPVGVINLDDNIAGEIIEKGTCEFFTYGVLTNADLTASDMVYKPNSVSFNVHYKGISSKVKVNVPGEFTVYNVLAAIGSLLCLGIDFESILKLVSSIKPVLGRLETINNPLNKNIIIDYAHTPDSLEKLLIMAREMTNGRIITVFGCGGDRDKSKRGLMGMAVGILSDYCIITSDNPRHEKPEDIIRDIERGMQTINSSYEKITDRRCAIKRGIEILKEEDILIIAGKGHEDYQIIGDNKVHFDDREVVNELLG

SEQ ID NO: 13219 - protein, 1164 aa, Arabidopsis thaliana; identical to SEQ ID NO: 9837

SEQ ID NO: 13220 - protein, 769 aa, Listeria innocua
MLDSFKENEALRKYLFSGHFGLEKENIRVTSDGKLALTPHPAIFGPKEDNPYIKTDFSESQIEMITPVTDSIDAVYEWLENLHNIVSLRAENELLWPSSNPPILPAEEDIPIAEYKTPDSPDRKYREHLAKGYGKKIQLLSGIHYNFSFPEALIDGLYAEISHPNESKRDFKNRLYLKVAKYFMKNRWLLIYLTGASPVYLADFTKTNSEEVLNDGSKALHRGISLRNSNAGYKNKESLFVDYNSFDAYISSISNYIEAGKIESMREFYNPIRLKNAHTDQTVESLAKHGVEYLEIRSIDLNPLEPNGISKDELIFIHLFLIKGLLSEDRELCANNQQLADENENNIALNGLAQPAIKNCDNEEMSLADAGLLELDKMSDFIQSLIPNDNHFQAIIEKQKERLLHPEKTIAAQVQAQSAKEGYVEFHLNQAKTYMEETEALAYKLVGAEDMELSTQIIWKDAIARGIKVDVLDRAENFLRFQKGDHVEYVKQASKTSKDNYVSVLMMENKVVTKLVLAEHGIRVPFGDSFSDQALALEAFSLFEDKQIVVKPKSTNYGWGISIFKNKFTLEDYQEALNIAFSYDSSVIIEEFIPGDEFRFLVINDKVEAVLKRVPANVTGDGIHTVRQLVEEKNTDPLRGTDHLKPLEKIRTGPEETLMLSMQNLSWDSIPKAEEIIYLRENSNVSTGGDSIDYTEEMDDYFKEIAIRATQVLDAKICGVDIIVPRETIDRDKHAIIELNFNPAMHMHCFPYQGEKKKIGDKILDFLFE

SEQ ID NO: 13221 - protein, 496 aa, Cyanothece sp. PCC 7424
MIKLRELLTKVPSLVIPEHPALDKEVKGISTNSHACQLGDVFIGMPGTRVDGGEFWTSAIEAGAIAAIITPQAGSKYPPTEDVCVIQAADMVSICAEISAAFYGYPAQQMKMIGVTGTNGKTTTTHLIEYFLTQSQFNTALLGTLYTRWQGYQQTALHTTPFATELQEQLAQAVKAGSEYAVMEVSSHALAQRRVAGCPFEVAVFTNLTQDHLDFHKDMEDYFNAKALLFSPDYLTGRAIINLDDPYGQRLINSLSGEKVWSYSVNNPDANFYTKDLTYEANGVSGILHTPIGEVNFYSPLVGQYNIANLLAAVGAVVHLGVDLKSIVESLPLFSAVPGRMERVKISDKQDISVIVDYAHTPDSLENLLKAARPFIEGKMICVFGCGGDRDRTKRPKMGKIAAELADLAVVTSDNPRTENPEQILEDILAGIPQSVKPVVISDRAEAIRTAIMDAKPGDGVLIAGKGHEDYQILGTEKIHFDDREQAREALTIRLS

SEQ ID NO: 13222 - protein, 1164 aa, Arabidopsis thaliana; identical to SEQ ID NO: 9841
  misc_feature (470)..(470): Xaa can be any naturally occurring amino acid

SEQ ID NO: 13223 - protein, 1165 aa, Arabidopsis halleri; identical to SEQ ID NO: 9845
  misc_feature (585)..(585): Xaa can be any naturally occurring amino acid

SEQ ID NO: 13224 - protein, 159 aa, Frankia sp. FE36
ITKEQYSRDPRNIAKKAETYLRGTGIADTAYFGPEAEFYIFDDVRYDYNPYGSMHQVDSVEAAWNTARKEEGGNLGYKPRFKGGYFPVPPTDHFTDLRSEMTRVLYETGITVEMQHHEVGTAGQAEIDIRYDTLLKTADNLMLYKYVIRNVARIRGKTV

SEQ ID NO: 13225 - protein, 651 aa, Chlamydophila caviae GPIC
MIKILRLCALVLTCLPSFSFASELLHEADIRKTVDRLIEYHVDVQDISPDILMRSLRGYSQSFDSHKAYLTEQEVGNFIQSTDIKKRLLKNYKTNNFAIYQNLNRVIKDSIIRAREWRTEWLSDPEALVKEAATHALIKKPKQWARSIQEVKERQRSLLLSYISVYLSDSSKNRYQGKEASLTQLCVRQLEAHENPYLGINDYGKPMSPQEESHHFHVRVVKAMAHSLDAHTTYFSKDEALAMRIQLEKGMCGIGVILKEDIDGVSVKEIIPGGPAHKTGDLHVDDIIYRVDGKNIENLPFRAVLDCLRGSQGSEVTLDVHSQDQNRTVKLRREKISLDDRRVDVSYESYGNGVIGKITLHSFYEGENQISSEQDLKRAIQSLQDKNLLGLVLDIRENTGGFLSQAIKVSGLFMTNGVVVVSRYADGSIKRYRTVSPKKFYDGPLTILVSKSSASAAEIVAQTLQDYGVAIIVGDEQTYGKGTIQHQTITADSDKEGFFKVTVGKYYSPSGKSTQLQGVRSDIHIASRYFAEPLGERYLEHPLPADSCDNVMDDNLKDLDAQMRPWFQKYYTPNLQKEETVWKEMLPQLTANSKQRLSENKNYKIFLDELKDPSEAIRPFGSNDLQMEESVNILKDMILLRERKAAISLGG

SEQ ID NO: 13226 - protein, 185 aa, Zea mays
MAEAPASPGGGGGSHESGSPRGGGGGGSVREQDRFLPIANISRIMKKAIPANGKTIPANGKIAKDAKETVQECVSEFISFITSEASDKCQREKRKTINGDDLLWAMATLGFEDYIEPLKVYLQKYREMEGDSKLTSKSSDGSIKKDALGHVGASSSAVQGMGQQGTYNQGMGYMQPQYHNGDISN

SEQ ID NO: 13227 - protein, 620 aa, Methanosarcina barkeri str. Fusaro
MAKILGIDLGTTNSCMAVMEGGEAVVIPNAEGARTTPSVVGFSKKGEKLVGQVAKRQAISNPENTVYSIKRHMGDANYTVTLQGTQYKPQEISAMILQKLKTDAEAYLGETIKQAVITVPAYFNDAQRQATKDAGAIAGLDVLRIINEPTSASLAYGLDKGDIEQKILVYDLGGGTFDVSILELGGGVFEVKSTSGDTRLGGDDFDQRIVNYLLAEFRKIEGIDLSKDKAVLQRLTDAAEKAKIELSGVASTNINLPFLTVGADGEPKHLDIDLTRAQFQKMTEDLLEKTLVSMRQALSDAKLTPNDLDKVILVGGATRMPAVVELVENFTGKKPYKNINPDEAVAIGAAIQAGVLGGEVKDVLLLDVTPLTLGIETLGGIATPLIPRNTTIPTKKSQVFSTAADNQPSVEIHVLQGERGVASENKTLGRFTLDGIPPAPRGIPQIEVTFDIDANGILHVGAKDLGTGKEQSISIQKPGGLSDDEIDRMVKDAELHAEEDKKRKEDVETRNNAEALINAAEKTLKEAGDAATEDQKSKVTAAIDDLKKALEGKDSEDIKSKTEALQEAVYPISTAMYQKAQQQAQQAQQAEGEAGSHDAQGPDETVVDADYEVVDDEKRK

SEQ ID NO: 13228 - protein, 248 aa, Brassica napus
  misc_feature (159)..(160): Xaa can be any naturally occurring amino acid
MDATKEASVTDLKRPREEDDHATAAVASMETDNSAPASNGEQTKKPACFSSVIPGWFSEMSPMWPGEAHSLKVEKVLFQGKSDYQDIIVFQSATYGKVLVLDGVIQLTERDECAYQEMITHLPLCSIPNPKKVLVIGGGDGGVLREVARHSSVEQIDMXXIEDIVSNCREIFKGSVNYAWTSVPTYPSGVIGFMLCSTEGPDVDFKHPVNPIDDSKSSGPLKFYNAQIHSAAFCLPSFAKKVIESKTN

SEQ ID NO: 13229 - protein, 1045 aa, Cleome hassleriana; identical to SEQ ID NO: 9846

SEQ ID NO: 13230 - protein, 1146 aa, Populus tremula; identical to SEQ ID NO: 9847

SEQ ID NO: 13231 - protein, 651 aa, Chlamydophila abortus S26/3
MIKILRLCALVLTCFPSFSFASELLHEEDIRKTVDKLIEYHVDIQDISSDILVRSLLGYSQSFDPHKAYLTEQEINNFIYSADIKKRLLKNYKTNNFSIYQNLNRVIKESITRARQWRAEWLSDPEALVKEAASHSLMKKPNQWARSMEEAKERQRALLLSYISVYLSDSAKDRYLGKEASLTQLCARQLEAYENPYLGINDYGEPMLPQEESHHFHVRVVKAMAHSLDAHTTYFSKEEALAMRIQLEKGMCGIGVILKEDIDGVIVKEIIPGGPAEKTGELHVDDVIYRVDGRSIENLPFRAVLDCLRGSQGSEVILDVHSKDGNRTVKLKREKISLDDRRVDVSYEAYGDGIIGKITLHSFYEGDNQISSEQDLKRAIQSLQEKNLLGLVLDIRENTGGFLSQAIKVSGLFMTNGVVVVSRYADGSIKRYRTVSPKKFYDGPLTILVSKSSASAAEIVAQTLQDYGVAIIVGDEQTYGKGTIQHQTITADANTEGFFKVTVGKYYSPSGKSTQLRGVRSDIHVASRYFAEPLGERYLEHPLPSDSCDNVMNDNLGDLDSHMRPWFQKYYIPNLQKEETVWKEMLPQLTENSRQRLSENKNYKIFLEEVKDPSEAIRPFGSNDLQMEESVNILKDMILLRDRKAAVSLGG

SEQ ID NO: 13232 - protein, 1146 aa, Populus tremula; identical to SEQ ID NO: 9849

SEQ ID NO: 13233 - protein, 161 aa, Bacillus clausii KSM-K16
MSVYDFSVKTSNGQDVSLSAYKGNVLLIVNTATKCGFASQFAGLEKLYNDYKEKGFYVLGFPSNQFLNQEPVADEDMEQVCKINFGVTFPLFAKTDVKGKHANPLFNYLKAAKKGMLSEEIKWNFTKFLVNRKGEVIKRYAPATKPETIEADVIEELKADA

SEQ ID NO: 13234 - protein, 1146 aa, Populus tremula; identical to SEQ ID NO: 9851

SEQ ID NO: 13235 - protein, 1146 aa, Populus tremula; identical to SEQ ID NO: 9853

SEQ ID NO: 13236 - protein, 517 aa, Mesorhizobium loti MAFF303099
MALFELTLVLLLTAVALTALSRRLEVPYPSLLALAGVGIAFVPGAPMIEIDPELALALFIAPVLLDAAYDTSLRDLKRYRLSLLLLALGAVVFTTVVVAFVGWKMAGLPIAAAIALGAIVAPPDAVAASAVLGQFKVPHRITAILQGESLLNDATALLIYRLAVSAALGSIMLSNAIPVILLSTIGSLIAGYLLGRLSLLTLTRIEDAASSTVVQFAGTFGVWILADKLGLSAIITIVVYAITIARRAPRRMSARRRVSTYSVWESAVFVLNVLAFVLMGLQARSIVGRLSGEGQGEAFLFAATVLVVVIVARLVWVASYVAIIRWFARVGSEDKKRDLPTFGGAVLVGWCGMRGLVTLVVAIALPAGFPGRDPIVLAAFAVVLGTLVLQGMTLKPLLRILDFDPDRTIDNEVAQARVAVMQAALDVLSRKTSAAAAVVREQYEAQRVIAENPEDAQAATEYDRLRLYAINRQRDTLEELRSNGTIGDEAYHRLEEEIDWAELAASPAGRFQPLTTD

SEQ ID NO: 13237 - protein, 1146 aa, Populus tremula; identical to SEQ ID NO: 9854

SEQ ID NO: 13238 - protein, 671 aa, Listeria monocytogenes str. 4b H7858
MAIFISNLLNRFVPFVSVPLIQIGLGVLIAIMPITFDLQLNPELFLVMFIAPLLFNDGRQTDKAALWGMRMPILVLALGLVFATVVVIGYFVHWMIPTIPLAAAFALAAALAPTDAVAVSSLSGRINLPKRIMNLLEGEALINDASGLVAFQFAIAAMVTGVFSFMDASISFFVIAIGGILVGLILSWLKFRLLKWVRGLGMEDVTFHMLIQILTPFIIYLAAEEIHVSGILAVVAAGIMHSMEQKKMDPQSVKLNVVSQSTWSVIIFVLNGLVFLLLGTQLPAITEVVWNDSGSSNLQVMAYILSITAALILLRFLWVYISWSIGAKQRQKQNKKTQLPKFRPVVLTSLSGVRGAVTLASALAIPFFLDDGSLFPQRSLIIFIASGVILCTLVIATFILPLLAKSEEVTTEDERAETATRIRILRNVIRELKEQTLPETKAATDEVIEDYRRRIYDLQQNNSSNRGMDERERAKRLEIIQWERENTQKMTDEGRIVATDSYRYQHYLNMMEQAIKQRFRTKIKTAWMFLYRLIMLVIHPKKWGRITHKVKKGISKDSERFQAIRQLREENEVLIISKLKEQLTKENVDIIGPLITEHTIFLERVRKEHSPRGKRAKFEQKKREVQVLAFQLERDIIQNMFEKGGISRDLARDLRQNLNMIETYLYDDFLE

SEQ ID NO: 13239 - protein, 381 aa, Glycine max
MGDMYHFDKNLSSQDEISLFLRQILLRSSLPSHSMPAGSCTSNAAQQNVNAHHPSFTASQLQDGKILAVDSTASFVSGSAACSSFKGHGASAANVSSSSAGVSENENDDYDCESEEGVEAPAEEVPTKAASSRSSSKRSRAAEVHNLSEKRRRGRINEKMKALQNLIPNSNKTDKASMLDEAIEYLKQLQLQVQMLSMRNGLSLHPMCFPEGLQPLQLSQMGMELSERNRFTSLNMSATLPLHQDNNPLHYASNLPNKHNLPNQPSVPYPPYIDNPETSFGLEPRIQTDMKPLQHKGGSSEPIRGEDILQHQQSSGIHSDANTLGGSQVVKEFESGTRLSFPFDTQACEPKDNSNSSQPCIGGRDHSGVIIRNSETNIVGR

SEQ ID NO: 13240 - protein, 368 aa, Staphylococcus aureus subsp. aureus MRSA252
MKAVHFGAGNIGRGFIGYILADNNVKVTFADVNEEIINALATGHQYDVILADESKTTTRVNNVAAINSMQPSEELKQAILEADIITTAVGVNILPIIAKSFAPFLKEKTNHVNIVACENAIMATDTLKKAVLDITGPLGNNIHFANSAVDRIVPLQKNENILDVMVEPFYEWVVEKDAWYGPELNHIKYVDDLTPYIERKLLTVNTGHAYLAYAGKFAGKATVLDAVKDSSIEAGLRRVLAETSQYITNEFDFTEAEQAGYVEKIIDRFNNSYLSDEVTRVGRGTLRKIGPKDRIIKPLAYLYNKDLERTGLLNTAALLLKYDDTADQETVEKNNYIKEHGLKAFLSEYAKVDDGLADEIIEAYNSLS

SEQ ID NO: 13241 - protein, 549 aa, Escherichia coli CFT073
MEIFFTILIMTLVVSLSGVVTRVMPFQIPLPLMQIAIGALLAWPTFGLHVEFDPELFLVLFIPPLLFADGWKTPTREFLEHGREIFGLALALVVVTVVGIGFLIYWVVPGIPLIPAFALAAVLSPTDAVALSGIVGEGRIPKKIMGILQGEALMNDASGLVSLKFAVAVAMGTMIFTVGGATVEFMKVAIGGILAGFVVSWLYGRSLRFLSRWGGDEPATQIVLLFLLPFASYLIAEHIGVSGILAAVAAGMTITRSGVMRRAPLAMRLRANSTWAMLEFVFNGMVFLLLGLQLPGILETSLMAAEIDPNVEIWMLFTDIILIYAALMLVRFGWLWTMKKFSNRFLKKKPMEFGSWTTREILIASFAGVRGAITLAGVLSIPLLLPDGNVFPARYELVFLAAGVILFSLFVGVVMLPILLQHIEVADHSQQLKEERIARAATAEVAIVAIQKMEERLAADTEENIDNQLLTEVSSRVIGNLRRRADGRNDVESSILEENLERRFRLAALRSERAELYHLRATREISNETLQKLLHDLDLLEALLIEENQ

SEQ ID NO: 13242 - protein, 148 aa, Zea mays
  misc_feature (98)..(98): Xaa can be any naturally occurring amino acid
TIHGGVTCHSPNSHLLPGDETNFSTGTTKHTFATLSFIAEIFLFLYVGMDALDIEKWKLASSSPKKPIALSAIILGLVMVGRAAFVFPLSFLSNLSKXEARPKISFKQQVIIWWAGLMRGAVSIALAYNKFTASGHTEVRVNAIMITS

SEQ ID NO: 13243 - protein, 224 aa, Oryza sativa Japonica Group; identical to SEQ ID NO: 589

SEQ ID NO: 13244 - protein, 390 aa, Triticum aestivum
VIRTQLKRKATREENNAAESSDCMIVTTGVTGNPLLTPVSGKAVKNSKSKTKNNKAGPQTPTPNVGSPLNPSTPAGTCRYDSSLGLLTKKFINLLKQAEDGILDLNNAAETLEVQKRRIYDITNVLEGIGLIEKTLKNRIRWKGLDDSGVELDDGLSGLQTEVENLNLQEQALDERISDMREKLRGLTEDENSQRWLYVTEDDIKGLPCFQNETLIAIKAPHGTTLEVPDPDEAGDYLQRRYRIVLRSTLGPIDVYLVSQFDDGFENLGGAATPPRHTNVPKPGPCEDLHATNATQSSKSINVEYNIQHRQNTPQDPSSSNDYGGMTRIIPSDVNTDADYWLLTEGDVSITDMWETAQVQWDTAVFLPEDVSTPHAHHRPRMQVPSMDQP

SEQ ID NO: 13245 - protein, 152 aa, Solanum tuberosum
MSSFSEEQEALVVKSWGSMKKDAGEWGLKFFLKIFEIAPSAKKMFSFLKDSNVPLDQNPKLKVHAKSILVMTCEAAVQLRKAGKVVVRDSTLKKIGATHFKYGVADEHFEVTKYALLETIKEASPEMWSVEMKNAWGEAYDQLVSAIKTEMK

SEQ ID NO: 13246 - protein, 162 aa, Triticum aestivum
MSAAERAVVFSEEKDALVLKSWAIMKKDSANLGLRFFLKIFEIAPSARQMFPFLRDSDVPLETNPKLKTHAVSVFVMTCEAAAQLRKAGKITVRETTLKRLGGTHLKYGVADGHFEVTRFALLETIKEALPADMWGPEMRNAWGEAYDQLVAAIKQEMKPSE

SEQ ID NO: 13247 - protein, 856 aa, Oryza sativa Japonica Group
MSLHSLKETLQSSSFSQPQSESQPRSPPPLLARRPPKTSLSQQLLRLDASSSSSSFSVSPPPPPRTSPTSDAAADDAPPLPEEEDEVPCIRPRASLPPAASLDSRGPYEPLALSPPGERPVVQVPSSINCRLLVHQRDGVRFLYNLYRNNHGGVLGDDMGLGKTIQTIAFLSAVIGKDNDHGDQLVEGRKIAPILILCPTSVIRNWENEFAEWARCSVAVYHGPNRDLVLQKVETQRLEIVITSFDTFRIHGKILCGISWDLVVVDEAHRLKNEKSKLYTACLEITTRKRFGLTGTIMQNKIMELFNLFDWIVPGCLGDREHFRVYYDEPLKHGQRFSAPERFVQVADKRKKHLVSVLSKFLLRRTKEETIGHLMLGKEDNIVFCRMSDVQKRVYRRMLQQPDVQILINKDLPCSCGSPLTQVECCKRTEPHGIIWSYLHRDNPEGCSLCPFCLVLPCLGKLQQISNHLELIKPNLKDEIEKQKKDAELAAAVFDTDIELVGGGAKSENFMGLSDAEHCGKMRALERLLSLWTLQGDKILLFSYSVRMLDILEKFLIRKGYCFSRFDGTTPMNARQLLIDEFNRCPSKQVFLISTRAGNLGVNLVSANRVVIFDPSWNPAQDLQAQDRSFRFGQRRHVTVFRLLGAGSLEELIYSRQIYKQQLSNIAVSGKIEKRYFEGVQDDKKFQGELFGICNLFRDLSDKLFTSEIIEMHGEHGKGNTAETIGIREIVDTNIFGTQDQMKSSMTAIHNENKNLYHCGIVYAHRNEDVVNTRTNEASNCAEDKTVPRHLEELQSKKNETMHTIKAKSYSLVQKKKEFSRIASFMGMNDLEFSKWLLSVSPLQRHEVLDRYRNAK

SEQ ID NO: 13248 - protein, 239 aa, Arabidopsis thaliana
LFNLINRACRRHRSHYALKLPFFLFLLGLAANFLMAEGSMRPPEFNQPNKTSNGGEEECTVREQDRFMPIANVIRIMRRILPAHARISDDSKETIQECVSEYISFITGEANERCQREQRKTITAEDVLWAMSKLGFDDYIEPLTLYLHRYRELEGERGVSCSAGSVSMTNGLVVKRPNGTMTEYGAYGPVPGIHMAQYHYRHQNGFVFSGNEPNSKMSGSSSGASGARVEVFPTQQHKY

SEQ ID NO: 13249 - protein, 202 aa, Jablonskia congesta
RFLFMKNKVRMICDCLASPVKVIQDKKLAKPLSLCGSTLRSPHGCHAQYMANMGSIASLVMSVTINDNEDEMESDQSNGRKLWGLVVCHHASPRFVPFPLRYACEFLIQVFGVQISKEVQLAAQMREKHILQTQTVLCDMLLRDAPVGIITQSPNVMDLVKCDGAALYYRKKFWLLGVTPTETQIKDIVEWLIEYHSESTGL

SEQ ID NO: 13250 - protein, 181 aa, Brassica napus
MASVMLSSATMTSSLAHATMVAPFIGLKSSAAFPVTCKANTEITSITSNGGRVNCMKVWPPVGKKKFETLSYLPDLTDVEIAKEVDYLIRNKWTPCIEFELEHGFVYREHGNIPGYYDGRYWTMWKLPLFGCTDSTQVLKEVKKCKQEYPNAFIRIIGFDNNRQAQCISFIAYKPPSFTDA

SEQ ID NO: 13251 - protein, 159 aa, Frankia sp. FE19
ITKEQYSRDPRNIAKKAETYLRGTGIADTAYFGPEAEFYIFDDVRYDYNPYGSMHQVDSVEAAWNTARKEEGGNLGYKPRFKGGYFPVPPTDHFTDLRSEMTRVLYETGITVEMQHHEVGTAGQAEIDIRFDTLLKTADNLMLYKYVIRNVARIRGKTV

SEQ ID NO: 13252 - protein, 159 aa, Frankia sp. CcI3
ITKEQYSRDPRNIAKKAEAYLRGTGVADTAYFGPEAEFYIFDDVRYDYNPYGSMHQVDSVEAAWNTARKEEGGNLGYKPRFKGGYFPVPPTDHFTDLRSEMTRVLYETGITVEMQHHEVGTAGQAEIDIRYDTLLKTADNLMLYKYVIRNVARGRGKTV

SEQ ID NO: 13253 - protein, 874 aa, Arabidopsis thaliana
MSLLHTFKETLKPCGSFPSSSSLRVSSTQELEPSRKPPKSSLSQQLLRLDDSYFLPSKHESKISKTQVEDFDHNEDDHKRNIKFDEEEVDEDDERSIEFGRPGLSRAEFDYSGPYEPLMLSSIGEIPIIHVIFLPKSLTFAHVPASINCRLLEHQREGVKFMYNLYKNNHGGILGDDMGLGKTIQTIAFLAAVYGKDGDAGESCLLESDKGPVLIICPSSIIHNWESEFSRWASFFKVSVYHGSNRDMILEKLKARGVEVLVTSFDTFRIQGPVLSGINWEIVIADEAHRLKNEKSKLYEACLEIKTKKRIGLTGTVMQNKISELFNLFEWVAPGSLGTREHFRDFYDEPLKLGQRATAPERFVQIADKRKQHLGSLLRKYMLRRTKEETIGHLMMGKEDNVVFCQMSQLQRRVYQRMIQLPEIQCLVNKDNPCACGSPLKQSECCRRIVPDGTIWSYLHRDNHDGCDSCPFCLVLPCLMKLQQISNHLELIKPNPKDEPEKQKKDAEFVSTVFGTDIDLLGGISASKSFMDLSDVKHCGKMRALEKLMASWISKGDKILLFSYSVRMLDILEKFLIRKGYSFARLDGSTPTNLRQSLVDDFNASPSKQVFLISTKAGGLGLNLVSANRVVIFDPNWNPSHDLQAQDRSFRYGQKRHVVVFRLLSAGSLEELVYTRQVYKQQLSNIAVAGKMETRYFEGVQDCKEFQGELFGISNLFRDLSDKLFTSDIVELHRDSNIDENKKRSLLETGVSEDEKEEEVMCSYKPEMEKPILKDLGIVYAHRNEDIINIGETTTSTSQRLNGDGNSADRKKKKRKGCSEEEDMSSSNREQKREKYKMLAEFKGMEILEFSRWVLSASPFDREKLLQDFLERVK

SEQ ID NO: 13254 - protein, 159 aa, Frankia sp. FE131
ITKEQYSRDPRNIAKKAETYLRGTGIADTAFFGPEAEFYIFDDVRYDYNPYGSFHQVDSVEAAWNTARKEEGGNLGYKPRFKGGYFPVPPTDHFTDLRSEMTRVLYETGITVEMQHHEVGTAGQAEIDIRYDTLLKTADNLMLYKYVIRNVARSRGKTV

SEQ ID NO: 13255 - protein, 810 aa, Cryptococcus neoformans var. neoformans JEC21
MPSIRPSLSTLPSYLALPSRRTKWKALIVGSLNFYRIHLITFTVVPLITSSIMFACNTEYHISYIDCLFCCMSAMTVTGLATVDLSTLSPFQQVILFLQMIIGSLSFVSIVMILVRQYFFRQTFKHVLQERERRRTRLTKTITRVATAAPPISAIRKRFGAGFRQFDKGDTELKNGSPERSAPSSLELKAVSHSPKKPEDHHHKHWKKGHQKLRPDMIKRVQGGGVGLVNPMGWYDVERAEIATPAPTPELRSDTPLPSGKTVAADGKDLSQALEAVVVSGVAQARQSAGEAEQEVSEVENKEPKTKLSEAEAGAKVADKVSTGSNEGDRTPTPPPSPARHKIPYAGLQLTDGAGRSTGGGTEGKDAPYISFSATVGRNSRFQGLTTEQMDELGGVEYRALRVLLYIVVGYVIFMPLAGFVIIAPYISAGNRYDYVFNEQPRNVGIPWFALYQSISAFTNTGMSLCDMSMLPFQRAYLMIVGRSLFSVAHALLIPWTKFIWVIYKCVPESSRVRESLKFLLDHPRRCFVYLFPSTQTWVLALVMLTLTLIDWVSFLVLDLGTEAIMSLPIGTRIAAGFLQSAAVRAAGFSIVPLGDLAPAVKVLYVVMMYISVYPIALSVRSTNVYEEKSLGLFGDEVEEDDLSEEGSGAHAVAKYIGWHARRQLAFDIWWLAFALWLVCIIERGHIDNDQEWFSIFNIIFELVSAYATVGLSLGVPYDNYSFCGGFRKLSKLVVIIVMLRGRHRGLPVAIDRAVMLPKDFTTAEETAFEEERSRRASRMGSMFNEDVFDMRRGSYGGDVPNYRASDPAS

SEQ ID NO: 13256 - protein, 671 aa, Pectobacterium atrosepticum SCRI1043
MNNLIRITAIAGLLLAGSSFANENITRVEQIPQLHQEPQHATVSDRVASRFLRSHYRQFMLDAQFSEKIFNRYLNMLDYSHNVLLASDVAQFSGQKAQLGDALKSGQLDIPYALYNLAQKRRFERFQYALSLLDKPVDLTGNDTFELDRSKAPWPQNAGELNRLWDAKVKYDWLSLKLTGKDDKDIKETLTKRYQFAIRRLAQSNSEDVFQLVMNAFAREIDPHTSYLSPRNTEQFNTEMSLSLEGIGAVLQMDDDYTMINSMVPGGPAAKSKNITVGDRVVGVGQSGKPMVDVIGWRLDDVVALIKGPKGSKVRLEILPAGKGTKTRIITLTRERIRLEDRAVKMSVKTVGKDKVGVLDIPGFYVGLTDDVKVQLQKLEKQNVSSIVIDLRTNGGGALTEAVGLSGLFIPSGPVVQVRDNNGKVREDSDTDGIVYYKGPLVVLVDRFSASASEIFAAAMQDYGRALIVGEPTFGKGTVQQYRSLNRIYDQMLRPDWPALGSVQYTIQKFYRIDGGSTQMKGVTPDVMMPTGTETVDTGEKFEDNALPWDSIKAANYIKSGDLKALISKLNEHHQERIAKDPEFQFVAQDIARYNAMKDKRNLVSLNLAQREKENDDDEAMRLNRINDRLAREGKKPLKSLEDLPKDYQAPDPYLDETVKIANDLAQDQKE

SEQ ID NO: 13257 - protein, 159 aa, Frankia sp. FE140
ITREEYSRDPRNTAKKAESYLRGTGFADTAYFGPEAEFYIFDDVRYDYNPYGSLHAVDSIEAAWNTARKEEGGNLGYKPRFKGGYFPVPPTDHFTDLRSEMSRALIRAGITVEMQHHEVGTAGQAEIDIRYDTLLRTADNLMLYKYIIRNVALSRGKTV

SEQ ID NO: 13258 - protein, 469 aa, Bradyrhizobium sp. BTAi1
MKTAKDVLKAIKDNDVKYVDLRFTDPRGKWQHVTFDVSMIDEDIFAEGTMFDGSSIAGWKAINESDMCLMPDPVTATIDPFFAETTMIITCDVLEPTTGEPYNRDPRGIAKKAEAMVKSMGVGDTVFVGPEAEFFVFDDVRYSSSPYNTGFRLDSSELPTNSDTEYEGGNLGHRIRTKAGYFPVPPQDSVQDMRSEMLGAMARMGVKVEKHHHEVASAQHELGMKFDTLTLMADQMQIYKYCIHQVAHIYGKTATFMPKPVYGDNGSGMHVHQSIWKDGKPVFAGNKYSDLSETCLSYIAGIIKHAKAINAFTNPSTNSYKRLVPGYEAPVLLAYSARNRSASCRIPYTSSPKAKRVEVRFPDPLANPYLGFAAMLMAGLDGVKNKLDPGPAMDKDLYDLPKEELKQIPTVCGSLREALENLDKDRAFLKAGGVFDDDFIDSYIALKMTEVERFEMTPHPVEFDMYYSG

SEQ ID NO: 13259 - protein, 92 aa, Arabidopsis thaliana
  misc_feature (2)..(2): Xaa can be any naturally occurring amino acid
  misc_feature (5)..(5): Xaa can be any naturally occurring amino acid
  misc_feature (7)..(7): Xaa can be any naturally occurring amino acid
  misc_feature (52)..(52): Xaa can be any naturally occurring amino acid
  misc_feature (62)..(62): Xaa can be any naturally occurring amino acid
  misc_feature (74)..(74): Xaa can be any naturally occurring amino acid
  misc_feature (81)..(82): Xaa can be any naturally occurring amino acid
  misc_feature (91)..(91): Xaa can be any naturally occurring amino acid
SXATXVXSPAQATMVAPLNGLKSSAAFPATRKANNDITSITSNGGRVNCMQXWPPIGKKKFXTLSYLPDLYRFXNWLRKFXXLIRNKWDPXF

SEQ ID NO: 13260 - protein, 618 aa, Clostridium tetani E88
MAKVIGIDLGTTNSCVSVMEGGNPVVITNSEGARTTPSVVSFQDNGERLVGQIAKRQAITNPHKTIMSIKRYMGTDHKETIDGKEYTPQELSAIILQKLKADAEAYLGGTVTQAVITVPAYFNDSQRQATKDAGRIAGLEVLRIINEPTAASLAYGLDKMDTNQKILVYDLGGGTFDVSILELGDGVFEVKSTNGNTKLGGDDFDQRIIDHIAETFKKDSGIDLRTDKMALQRLKEAAEKAKIELSSSTQTNINLPFITADATGPKHIDMNLTRAKFNELTQDLVEGTLTPMKKALQDAEMSIGEIDKVILVGGSTRIPAVQDAVKNFTGKEPSKDVNPDECVAMGAAVQAGVLTGDVKDVLLLDVTPLTLGIETLGGVATPLIERNTTIPTRKSQVFSTAADGQTSVEIHVVQGERQMAADNKTLGRFTLSGIAPAPRGIPQIEVTFDIDANGIVNVSAKDKGTGKEANITITASTNLSDDEVEKAVNDAKKFEEEDKKRKESVEVKNNAEQIFYQTEKTLNELGDKVSAEDKATIEEKLNALKGVKDGEDIEAIKKATEDLTQAFYQISSKIYQDAGAPGAEGFDSNMAGEANAGQNANNDDNVVDADYKVEDDEK

SEQ ID NO: 13261 - protein, 535 aa, Arabidopsis thaliana
MSSELQISPAIHDPQGQEKQQQAAGVGILLQIMMLVLSFVLGHVLRRHKFYYLPEASASLLIGLIVGGLANISNTETSIRTWFNFHDEFFFLFLLPPIIFQSGFSLQPKPFFSNFGAIVTFSVLGTFVASMVTGLLVYLGGVMFLMYRLPFVECLMFGSLISATDPVTVLSIFQELGSDVNLYALVFGESVLNDAMAISLYRTMSLVRSHSSGQNFFMVIVRFLETFVGSMSAGVGVGFTSALLFKYAGLDVDNLQNLECCLFVLFPYFSYMLAEGLSLSGIVSILFTGIVMKHYTYSNLSANSQRFVSAFFHLISSLAETFVFIYMGFDIAMEKHSWSHLGFIFFSILFIVIARAANVFGCGYLVNLARPAHRKIPMTHQKALWYSGLRGAMAFALALQSVHDLPEGHGQTIFTATTAIVVLTVLLIGGSTGTMLEALEVVGDSHDTSLGDGFEVVNSRYMTSYDDEDTPPGSGFRTKLREFHKSAASFTELDRNYLTPFFTSNNGDYDDEGNMEQHHEERIPFTRRGNLNNRG

SEQ ID NO: 13262 - protein, 642 aa, Neisseria gonorrhoeae FA 1090
MAKVIGIDLGTTNSCLAISENGQTKVIENAEGARTTPSIIAYLDGGEILVGAPAKRQAVTNAKNTIYAAKRLIGHKFEDKEVQRDIESMPFEIIKADNGDAWVKAQGKELSPPQISAEVLRKMKEAAEAYLGEKVTEAVITVPAYFNDSQRQATKDAGRIAGLDVKRIINEPTAAALAFGMDKGDNKDRKIAVYDLGGGTFDISIIEIANLDGDKQFEVLATNGDTFLGGEDFDQRLIDYIIDEFKKEQGIDLKQDVMALQRLKEAAEKAKIELSSGQQTEINLPYITMDATGPKHLAMKITRAKFESLVEDLIARSIEPCRTALKDAGLSTGDIDDVILVGGQSRMPKVQEAVKDFFGKEPRKDVNPDEAVAVGAAIQGEVLSGGRSDVLLLDVTPLSLGIETMGGVMTKLIQKNTTIPTKASQVFSTAEDNQSAVTIHVLQGERERASANKSLGQFNLGDIAPAPRGMPQIEVTFDIDANGILHVSAKDKGTGKAANITIQGSSGLSEEEIERMVKDAEANAEEDKKLTELVASRNQAEALIHSVKKSLADYGDKLDAAEKEKIEAALKEAEEAVKGDDKTAIDAKAEALGTASQKLGEMVYAQAQAEAQAGEGAQANASAKKDDDVVDADFEEVKDDKK

SEQ ID NO: 13263 - protein, 108 aa, Triticum aestivum
  misc_feature (10)..(10): Xaa can be any naturally occurring amino acid
  misc_feature (18)..(18): Xaa can be any naturally occurring amino acid
  misc_feature (25)..(25): Xaa can be any naturally occurring amino acid
  misc_feature (28)..(28): Xaa can be any naturally occurring amino acid
  misc_feature (39)..(40): Xaa can be any naturally occurring amino acid
  misc_feature (47)..(47): Xaa can be any naturally occurring amino acid
  misc_feature (52)..(52): Xaa can be any naturally occurring amino acid
  misc_feature (56)..(56): Xaa can be any naturally occurring amino acid
  misc_feature (70)..(70): Xaa can be any naturally occurring amino acid
  misc_feature (73)..(73): Xaa can be any naturally occurring amino acid
  misc_feature (77)..(77): Xaa can be any naturally occurring amino acid
  misc_feature (82)..(83): Xaa can be any naturally occurring amino acid
  misc_feature (86)..(86): Xaa can be any naturally occurring amino acid
  misc_feature (95)..(95): Xaa can be any naturally occurring amino acid
DATAPVAGAXAVVAGAGXQAGISAXIPXWFSEISPMLPXXAHSLKVXNVLFXGKSXDYQNVMVFNPSTYXKVXSSHXLFQVXXKDXFAVTKEMIXHLPLLLPLKTPRW

SEQ ID NO: 13264 - protein, 533 aa, Mycobacterium sp. MCS
MSASLLAVLVVAVLLAAVARRADVSAPLALVVAGLAVGLIPGVPDIQLDPDLVLYVVLPPLLWSAGLESSYVALRRNVRSIGMLAVGLPLATTFAVGVVAYWAVPELTIAAALTLGAIVAPPDAVSATAVGRRLGLPRRLMTLLGGESLLNDATALTAYKVALGLAIGGSASWTGGLWTFALAAVGGVVGGGALGAVIVYVRSRLRDPLVESALGLVAPFGIYLLAEEVHGSGVLAVVVAALILGQHSTNASYATRLQDSAVWKAVQLLLESFAFLLIGLQLPKVIEELAGISAAVLVVSSLAVLATVIAVRIVWVYLFAYLPRLVSPALRYREPSPRPAQVFVVAWAGMRGVVSLAAAFAVPATTLSGAEFPGRPQLVFLTFVVVVGTLLLHGLTLPWLIRRLGVQGDEAHTDAVAAAAAQDRAARAAAERLDELLEQQRTDGTVDDVHERAAEVLRGWNTRRRNSAWEQLGRDEADIGESPAAAFRRLRLEMLAAERATLIAERDSGHIDDEVLRSVLHGLDLEEATLNRR

SEQ ID NO: 13265 - protein, 477 aa, Corynebacterium glutamicum
MAFETPEEIVKFIKFIKVEFVDVRFTDLPGTEQHFSIPAASFDADTIEEGLAFDGSSIRGFTRIDESDMNLLPDLGTATLDPFRKAKTLNVKFFFHDPFTREAFSRDPRNVARKAEQYLASTGIADTCNFGAEAEFYLFDSVRYSTEMNSGFYEVDTEEGWWNRGKETNLDGTPNLGAKNRVKGGYFPVAPYDQTVDVRDDMVRNLAASGFALERFHHEVGGGQQEINYRFNTMLHAADDIQTFKYIIKNTARLHGKAATFMPKPLAGDNGSGMHAHQSLWKDGKPLFHDESGYAGLSDIARYYIGGILHHAGAVLAFTNATLNSYHRLVPGFEAPINLVYSQRNRSAAVRIPITGSNPKAKRIEFRAPDPSGNPYLGFAAMMMAGLDGIKNRIEPHAPVDKDLYELPPEEAASIPQAPTSLEASLKALQEDTDYPHRSDVFTEDLIEAYIQYKYDNEISPVRLRPTPQEFELYFDC

SEQ ID NO: 13266 - protein, 483 aa, Chlamydophila pneumoniae CWL029
MDLKELLHGVQAKIYGKVRPLEVRNLTRDSRCVSVGDIFIAHKGQRYDGNDFAVDALANGAIAIASSLYNPFLSVVQIITPNLEELEAELSAKYYEYPSSKLHTIGVTGTNGKTTVTCLIKALLDSYQKPSGLLGTIEHILGEGVIKDGFTTPTPALLQKYLATMVRQNRDAVVMEVSSIGLASGRVAYTNFDTAVLTNITLDHLDFHGTFETYVAAKAKLFSLVPPSGMVVINTDSPYASQCIESAKAPVITYGIESAADYRATDIQLSSSGTKYTLVYGDQKIACSSSFIGKYNVYNLLAAISTVHASLRCDLEDLLEKIGLCQPPPGRLDPVLMGPCPVYIDYAHTPDALDNVLTGLHELLPEGGRLIVVFGCGGDRDRSKRKLMAQVVERYGFAVVTSDNPRSEPPEDIVNEICDGFYSKNYFIEIDRKQAITYALSIASDRDIVLIAGKGHEAYQIFKHQTVAFDDKQTVCEVLASYV

SEQ ID NO: 13267 - protein, 496 aa, Staphylococcus aureus subsp. aureus Mu50
MDDKQHTSSSDDERAEIATSNQDQETNSSKRVHLKRWQFISILIGTTLITAVITVVAYIFINQKISGLNKTDQANLNKIENVYKILNSDYYKKQDSDKLSKAAIDGMVKELKDPYSEYLTKEQTKSFNEGVSGDFVGIGAEMQKKNDQIMVTSPMKGSPAERAGIRPKDVITKVNGKSIKGKALDEVVKDVRGKENTEVTLTVQRGSEEKDVKIKREKIHVKSVDYKKKGKVGVITINKFQNDTSGELKDAVLKAHKDGLKKIVLDLRNNPGGLLDEAVKMANIFIDKGKTVVKLEKGKDTEAIQTSNDSLKEAKDMDISILVNEGSASASEVFTGALKDYNKAKVYGSKTFGKGVVQTTREFKDGSLLKYTEMKWLTPDGHYIHGKGIKPDVTIDTPKYQSLNVIPNTKTFKVGDDDKNIKTIKIGLSALGYKVDNESTQFDQALENQVKAFQQANKLEVTGEFNKETNNKFTELLVEKANKHDDVLDKLINILK

SEQ ID NO: 13268 - protein, 511 aa, Prochlorococcus marinus str. MIT 9301
MRSIKLFKLLNLVGIIPSLNLIDQEINNISFNSKEVQKGTLFLGMPGLNVDGGKFCIEAIENGAEAAIIGSAAKEKIGSFDRERILVIEDNLDYIFGQIVAEFWNRPSRKLKLIGVTGTNGKTTITFLLEYLLKKSGKKTALFGTLFNRWPGFSEVASHTTDFADKLQKKLNAAVEAESEFAILEVSSHSIAQKRISGCEFEGAIFTNLTQDHLDYHSDMESYFQTKRKLFFPPYLIEKDGISVLNHDDPWISKLSSDIEKRSSLVSTKITESEFENDDFFFVTDKKFTENGSTCIFHTPKEKIQLFVPLVGEFNLMNAIQAITILYKLNFSLKDLSKLIRSFPGAPGRMEKIEIDNDDVARSLPTVIVDYAHTPDGLKKVLQSIKKLCKGKLITVFGCGGDRDLGKRPLMGSIAEEFSDQLFITSDNPRSEEPQKIVNDILMGIKKREKITIEIDRFKAINESIKFANKKDIVLIAGKGHEDYQILNDKVINFDDRKIAYKLLKEKNKSQ

SEQ ID NO: 13269 - protein, 494 aa, Neisseria meningitidis FAM18
MSKPVFKKIALYTLGAISGVAVSLAVQGFAAEKDRRDNEVLPVQSIRTMAEVYGQIKANYYQDKPDADLFEGAMKGMVAGLDPHSEYMDKKGYAEIKESTSGEFGGLGMEIGQEDGFVKVVSPIEDTPAEQAGVKSGDFIVKIDNVSTRGMTVSEAVKKMRGKPGTKITLTLSRKNADKPIVVNLTRAIIKVKSVRHHLIEPDYGYIRVSQFQERTVESVNTAAKELVKENKGKPLKGLVLDLRDDPGGLLNGAVGVSAAFLPPEAVVVSTKGRDGKDRMVLKAVPEDYVYGMGGDPLAGIPAELKTVPMTVLINSGSASASEIVAGALQDHKRAVIVGTQSFGKGSVQTLIPLSNGSAVKLTTALYYTPNDRSIQAQGIVPDVEVKDKERIFESREADLVGHIGNPLGGEDVNSETLAVPLEKDADKPAVKEKGKKKKDEDLSSRRIPNPAKDDQLRKALDLVKSPEQWQKSLGLAAKKPVSNKDKKDKKDKK

SEQ ID NO: 13270 - protein, 223 aa, Arabidopsis thaliana
MGKKCDLCNGVARMYCESDQASLCWDCDGKVHGANFLLAKHTRCLLCSACQSLTPWKATGLRLGPTFSVCESCVALKNAGGGRGNRVLSENRGQEEVNSFESEEDRIREDHGDGDDAESYDDDEEEDEDEEYSDDEDEDDDEDGDDEEAENQVVPWSAAAQVPPVMSSSSSDGGSGGSVTKRTRARENSDLLCSDDEIGSSSAQGSNYSRPLKRSAFKSTVVV

SEQ ID NO: 13271 - protein, 254 aa, Oryza sativa Japonica Group
MEAGYPGTAANGAAADGNGGAQQAAAAPAIREQDRLMPIANVIRIMRRVLPAHAKISDDAKETIQECVSEYISFITGEANERCQREQRKTITAEDVLWAMSRLGFDDYVEPLGVYLHRYREFEGESRGVGVGVGAARGDHHHGHVGGMLKSRAQGSMVTHHDMQMHAAMYGGGAVPPPPHPPPHHHAFHQLMPPHHGQYAPPYDMYGGEHGMAAYYGGMYAPGSGGDGSGSSGSGGAGTPQTVNFEHQHPFGYK

SEQ ID NO: 13272 - protein, 186 aa, Oryza sativa Japonica Group
MAGNKKRGGRNMDQVKKAAVRSDGVGGSATNAELPMANLVRLIKKVLPGKAKIGGAAKGLTHDCAVEFVGFVGDEASEKAKAEHRRTVAPEDYLGSFGDLGFDRYVDPMDAYIHGYREFERAGGNRRVAPPPPAAATPLTPGGPTFTDAELQFLRSVIPSRSDDEYSGSSPAIGGYGYGYGYGKNM

SEQ ID NO: 13273 - protein, 107 aa, Zea mays
  misc_feature (21)..(21): Xaa can be any naturally occurring amino acid
  misc_feature (32)..(32): Xaa can be any naturally occurring amino acid
  misc_feature (67)..(67): Xaa can be any naturally occurring amino acid
  misc_feature (89)..(89): Xaa can be any naturally occurring amino acid
SPTLPPTLSSTRSPTRRLTSXALIYNVCANPXLPFFLKIYNIAPSATPTFPFLHNSNVPLTKYPYLXTHAMSLFIITCHATSHLRKPRXITLTPTTLNTLVATHSRY
